United States Patent Application Publication US 2026/0258424 A1 - sequence listing, part 2

SEQ ID NO: 1082 - protein, 2094 aa, synthetic construct
MPAAKRVKLDGGDKKYSIGLDIGTNSVGWAVITDEYKVPSKKFKVLGNTDRHSIKKNLIGALLFDSGETAEATRLKRTARRRYTRRKNRICYLQEIFSNEMAKVDDSFFHRLEESFLVEEDKKHERHPIFGNIVDEVAYHEKYPTIYHLRKKLVDSTDKADLRLIYLALAHMIKFRGHFLIEGDLNPDNSDVDKLFIQLVQTYNQLFEENPINASGVDAKAILSARLSKSRRLENLIAQLPGEKKNGLFGNLIALSLGLTPNFKSNFDLAEDAKLQLSKDTYDDDLDNLLAQIGDQYADLFLAAKNLSDAILLSDILRVNTEITKAPLSASMIKRYDEHHQDLTLLKALVRQQLPEKYKEIFFDQSKNGYAGYIDGGASQEEFYKFIKPILEKMDGTEELLVKLNREDLLRKQRTFDNGSIPHQIHLGELHAILRRQEDFYPFLKDNREKIEKILTFRIPYYVGPLARGNSRFAWMTRKSEETITPWNFEEVVDKGASAQSFIERMTNFDKNLPNEKVLPKHSLLYEYFTVYNELTKVKYVTEGMRKPAFLSGEQKKAIVDLLFKTNRKVTVKQLKEDYFKKIECFDSVEISGVEDRFNASLGTYHDLLKIIKDKDFLDNEENEDILEDIVLTLTLFEDREMIEERLKTYAHLFDDKVMKQLKRRRYTGWGRLSRKLINGIRDKQSGKTILDFLKSDGFANRNFMQLIHDDSLTFKEDIQKAQVSGQGDSLHEHIANLAGSPAIKKGILQTVKVVDELVKVMGRHKPENIVIEMARENQTTQKGQKNSRERMKRIEEGIKELGSQILKEHPVENTQLQNEKLYLYYLQNGRDMYVDQELDINRLSDYDVDHIVPQSFLKDDSIDNKVLTRSDKARGKSDNVPSEEVVKKMKNYWRQLLNAKLITQRKFDNLTKAERGGLSELDKAGFIKRQLVETRQITKHVAQILDSRMNTKYDENDKLIREVKVITLKSKLVSDFRKDFQFYKVREINNYHHAHDAYLNAVVGTALIKKYPKLESEFVYGDYKVYDVRKMIAKSEQEIGKATAKYFFYSNIMNFFKTEITLANGEIRKRPLIETNGETGEIVWDKGRDFATVRKVLSMPQVNIVKKTEVQTGGFSKESILPKRNSDKLIARKKDWDPKKYGGFDSPTVAYSVLVVAKVEKGKSKKLKSVKELLGITIMERSSFEKNPIDFLEAKGYKEVKKDLIIKLPKYSLFELENGRKRMLASAGELQKGNELALPSKYVNFLYLASHYEKLKGSPEDNEQKQLFVEQHKHYLDEIIEQISEFSKRVILADANLDKVLSAYNKHRDKPIREQAENIIHLFTLTNLGAPAAFKYFDTTIDRKRYTSTKEVLDATLIHQSITGLYETRIDLSQLGGDGGGSSGGSGGGGGTLNIEDEYRLHETSKEPDVPLGSTWLSDFPQAWAETGGMGLAVRQAPLIIPLKATSTPVSIKQYPMSQEARLGIKPHIQRLLDQGILVPCQSPWNTPLLPVKKPGTNDYRPVQDLREVNKRVEDIHPTVPNPYNLLSGLPPSHQWYTVLDLKDAFFCLRLHPTSQPLFAFEWRDPEMGISGQLTWTRLPQGFKNSPTLFNEALHRDLADFRIQHPDLILLQYVDDLLLAATSEQDCQRGTRALLQTLGNLGYRASAKKAQICQKQVKYLGYLLKEGQRWLTEARKETVMGQPTPKTPRQLREFLGKAGFCRLFIPGFAEMAAPLYPLTKPGTLFNWGPDQQKAYQEIKQALLTAPALGLPDLTKPFELFVDEKQGYAKGVLTQKLGPWRRPVAYLSKKLDPVAAGWPPCLRMVAAIAVLTKDAGKLTMGQPLVILAPHAVEALVKQPPDRWLSNARMTHYQAMLLDTDRVQFGPVVALNPATLLPLPEKEAPHDCLEILAETHGTRPDLTDQPIPDADYTWYTDGSSFLQEGQRRAGAAVTTETEVIWARALPAGTSAQRAELIALTQALKMAEGKKLNVYTDSRYAFATAHVHGEIYRRRGWLTSEGREIKNKNEILALLKALFLPKRLSIIHCPGHQKGNSAEARGNRMADQAAREAAMKAVLETSTLLAGKRTADGSEFEKRTADGSEFESPKKKAKVE

SEQ ID NO: 1083 - protein, 2093 aa, synthetic construct
MPAAKRVKLDGGDKKYSIGLDIGTNSVGWAVITDEYKVPSKKFKVLGNTDRHSIKKNLIGALLFDSGETAEATRLKRTARRRYTRRKNRICYLQEIFSNEMAKVDDSFFHRLEESFLVEEDKKHERHPIFGNIVDEVAYHEKYPTIYHLRKKLVDSTDKADLRLIYLALAHMIKFRGHFLIEGDLNPDNSDVDKLFIQLVQTYNQLFEENPINASGVDAKAILSARLSKSRRLENLIAQLPGEKKNGLFGNLIALSLGLTPNFKSNFDLAEDAKLQLSKDTYDDDLDNLLAQIGDQYADLFLAAKNLSDAILLSDILRVNTEITKAPLSASMIKRYDEHHQDLTLLKALVRQQLPEKYKEIFFDQSKNGYAGYIDGGASQEEFYKFIKPILEKMDGTEELLVKLNREDLLRKQRTFDNGSIPHQIHLGELHAILRRQEDFYPFLKDNREKIEKILTFRIPYYVGPLARGNSRFAWMTRKSEETITPWNFEEVVDKGASAQSFIERMTNFDKNLPNEKVLPKHSLLYEYFTVYNELTKVKYVTEGMRKPAFLSGEQKKAIVDLLFKTNRKVTVKQLKEDYFKKIECFDSVEISGVEDRFNASLGTYHDLLKIIKDKDFLDNEENEDILEDIVLTLTLFEDREMIEERLKTYAHLFDDKVMKQLKRRRYTGWGRLSRKLINGIRDKQSGKTILDFLKSDGFANRNFMQLIHDDSLTFKEDIQKAQVSGQGDSLHEHIANLAGSPAIKKGILQTVKVVDELVKVMGRHKPENIVIEMARENQTTQKGQKNSRERMKRIEEGIKELGSQILKEHPVENTQLQNEKLYLYYLQNGRDMYVDQELDINRLSDYDVDHIVPQSFLKDDSIDNKVLTRSDKARGKSDNVPSEEVVKKMKNYWRQLLNAKLITQRKFDNLTKAERGGLSELDKAGFIKRQLVETRQITKHVAQILDSRMNTKYDENDKLIREVKVITLKSKLVSDFRKDFQFYKVREINNYHHAHDAYLNAVVGTALIKKYPKLESEFVYGDYKVYDVRKMIAKSEQEIGKATAKYFFYSNIMNFFKTEITLANGEIRKRPLIETNGETGEIVWDKGRDFATVRKVLSMPQVNIVKKTEVQTGGFSKESILPKRNSDKLIARKKDWDPKKYGGFDSPTVAYSVLVVAKVEKGKSKKLKSVKELLGITIMERSSFEKNPIDFLEAKGYKEVKKDLIIKLPKYSLFELENGRKRMLASAGELQKGNELALPSKYVNFLYLASHYEKLKGSPEDNEQKQLFVEQHKHYLDEIIEQISEFSKRVILADANLDKVLSAYNKHRDKPIREQAENIIHLFTLTNLGAPAAFKYFDTTIDRKRYTSTKEVLDATLIHQSITGLYETRIDLSQLGGDGGGGSEAAAKGGTLNIEDEYRLHETSKEPDVPLGSTWLSDFPQAWAETGGMGLAVRQAPLIIPLKATSTPVSIKQYPMSQEARLGIKPHIQRLLDQGILVPCQSPWNTPLLPVKKPGTNDYRPVQDLREVNKRVEDIHPTVPNPYNLLSGLPPSHQWYTVLDLKDAFFCLRLHPTSQPLFAFEWRDPEMGISGQLTWTRLPQGFKNSPTLFNEALHRDLADFRIQHPDLILLQYVDDLLLAATSEQDCQRGTRALLQTLGNLGYRASAKKAQICQKQVKYLGYLLKEGQRWLTEARKETVMGQPTPKTPRQLREFLGKAGFCRLFIPGFAEMAAPLYPLTKPGTLFNWGPDQQKAYQEIKQALLTAPALGLPDLTKPFELFVDEKQGYAKGVLTQKLGPWRRPVAYLSKKLDPVAAGWPPCLRMVAAIAVLTKDAGKLTMGQPLVILAPHAVEALVKQPPDRWLSNARMTHYQAMLLDTDRVQFGPVVALNPATLLPLPEKEAPHDCLEILAETHGTRPDLTDQPIPDADYTWYTDGSSFLQEGQRRAGAAVTTETEVIWARALPAGTSAQRAELIALTQALKMAEGKKLNVYTDSRYAFATAHVHGEIYRRRGWLTSEGREIKNKNEILALLKALFLPKRLSIIHCPGHQKGNSAEARGNRMADQAAREAAMKAVLETSTLLAGKRTADGSEFEKRTADGSEFESPKKKAKVE

SEQ ID NO: 1084 - protein, 2094 aa, synthetic construct
MPAAKRVKLDGGDKKYSIGLDIGTNSVGWAVITDEYKVPSKKFKVLGNTDRHSIKKNLIGALLFDSGETAEATRLKRTARRRYTRRKNRICYLQEIFSNEMAKVDDSFFHRLEESFLVEEDKKHERHPIFGNIVDEVAYHEKYPTIYHLRKKLVDSTDKADLRLIYLALAHMIKFRGHFLIEGDLNPDNSDVDKLFIQLVQTYNQLFEENPINASGVDAKAILSARLSKSRRLENLIAQLPGEKKNGLFGNLIALSLGLTPNFKSNFDLAEDAKLQLSKDTYDDDLDNLLAQIGDQYADLFLAAKNLSDAILLSDILRVNTEITKAPLSASMIKRYDEHHQDLTLLKALVRQQLPEKYKEIFFDQSKNGYAGYIDGGASQEEFYKFIKPILEKMDGTEELLVKLNREDLLRKQRTFDNGSIPHQIHLGELHAILRRQEDFYPFLKDNREKIEKILTFRIPYYVGPLARGNSRFAWMTRKSEETITPWNFEEVVDKGASAQSFIERMTNFDKNLPNEKVLPKHSLLYEYFTVYNELTKVKYVTEGMRKPAFLSGEQKKAIVDLLFKTNRKVTVKQLKEDYFKKIECFDSVEISGVEDRFNASLGTYHDLLKIIKDKDFLDNEENEDILEDIVLTLTLFEDREMIEERLKTYAHLFDDKVMKQLKRRRYTGWGRLSRKLINGIRDKQSGKTILDFLKSDGFANRNFMQLIHDDSLTFKEDIQKAQVSGQGDSLHEHIANLAGSPAIKKGILQTVKVVDELVKVMGRHKPENIVIEMARENQTTQKGQKNSRERMKRIEEGIKELGSQILKEHPVENTQLQNEKLYLYYLQNGRDMYVDQELDINRLSDYDVDHIVPQSFLKDDSIDNKVLTRSDKARGKSDNVPSEEVVKKMKNYWRQLLNAKLITQRKFDNLTKAERGGLSELDKAGFIKRQLVETRQITKHVAQILDSRMNTKYDENDKLIREVKVITLKSKLVSDFRKDFQFYKVREINNYHHAHDAYLNAVVGTALIKKYPKLESEFVYGDYKVYDVRKMIAKSEQEIGKATAKYFFYSNIMNFFKTEITLANGEIRKRPLIETNGETGEIVWDKGRDFATVRKVLSMPQVNIVKKTEVQTGGFSKESILPKRNSDKLIARKKDWDPKKYGGFDSPTVAYSVLVVAKVEKGKSKKLKSVKELLGITIMERSSFEKNPIDFLEAKGYKEVKKDLIIKLPKYSLFELENGRKRMLASAGELQKGNELALPSKYVNFLYLASHYEKLKGSPEDNEQKQLFVEQHKHYLDEIIEQISEFSKRVILADANLDKVLSAYNKHRDKPIREQAENIIHLFTLTNLGAPAAFKYFDTTIDRKRYTSTKEVLDATLIHQSITGLYETRIDLSQLGGDGGGSSGGGPAPGGTLNIEDEYRLHETSKEPDVPLGSTWLSDFPQAWAETGGMGLAVRQAPLIIPLKATSTPVSIKQYPMSQEARLGIKPHIQRLLDQGILVPCQSPWNTPLLPVKKPGTNDYRPVQDLREVNKRVEDIHPTVPNPYNLLSGLPPSHQWYTVLDLKDAFFCLRLHPTSQPLFAFEWRDPEMGISGQLTWTRLPQGFKNSPTLFNEALHRDLADFRIQHPDLILLQYVDDLLLAATSEQDCQRGTRALLQTLGNLGYRASAKKAQICQKQVKYLGYLLKEGQRWLTEARKETVMGQPTPKTPRQLREFLGKAGFCRLFIPGFAEMAAPLYPLTKPGTLFNWGPDQQKAYQEIKQALLTAPALGLPDLTKPFELFVDEKQGYAKGVLTQKLGPWRRPVAYLSKKLDPVAAGWPPCLRMVAAIAVLTKDAGKLTMGQPLVILAPHAVEALVKQPPDRWLSNARMTHYQAMLLDTDRVQFGPVVALNPATLLPLPEKEAPHDCLEILAETHGTRPDLTDQPIPDADYTWYTDGSSFLQEGQRRAGAAVTTETEVIWARALPAGTSAQRAELIALTQALKMAEGKKLNVYTDSRYAFATAHVHGEIYRRRGWLTSEGREIKNKNEILALLKALFLPKRLSIIHCPGHQKGNSAEARGNRMADQAAREAAMKAVLETSTLLAGKRTADGSEFEKRTADGSEFESPKKKAKVE

SEQ ID NO: 1085 - protein, 2094 aa, synthetic construct
MPAAKRVKLDGGDKKYSIGLDIGTNSVGWAVITDEYKVPSKKFKVLGNTDRHSIKKNLIGALLFDSGETAEATRLKRTARRRYTRRKNRICYLQEIFSNEMAKVDDSFFHRLEESFLVEEDKKHERHPIFGNIVDEVAYHEKYPTIYHLRKKLVDSTDKADLRLIYLALAHMIKFRGHFLIEGDLNPDNSDVDKLFIQLVQTYNQLFEENPINASGVDAKAILSARLSKSRRLENLIAQLPGEKKNGLFGNLIALSLGLTPNFKSNFDLAEDAKLQLSKDTYDDDLDNLLAQIGDQYADLFLAAKNLSDAILLSDILRVNTEITKAPLSASMIKRYDEHHQDLTLLKALVRQQLPEKYKEIFFDQSKNGYAGYIDGGASQEEFYKFIKPILEKMDGTEELLVKLNREDLLRKQRTFDNGSIPHQIHLGELHAILRRQEDFYPFLKDNREKIEKILTFRIPYYVGPLARGNSRFAWMTRKSEETITPWNFEEVVDKGASAQSFIERMTNFDKNLPNEKVLPKHSLLYEYFTVYNELTKVKYVTEGMRKPAFLSGEQKKAIVDLLFKTNRKVTVKQLKEDYFKKIECFDSVEISGVEDRFNASLGTYHDLLKIIKDKDFLDNEENEDILEDIVLTLTLFEDREMIEERLKTYAHLFDDKVMKQLKRRRYTGWGRLSRKLINGIRDKQSGKTILDFLKSDGFANRNFMQLIHDDSLTFKEDIQKAQVSGQGDSLHEHIANLAGSPAIKKGILQTVKVVDELVKVMGRHKPENIVIEMARENQTTQKGQKNSRERMKRIEEGIKELGSQILKEHPVENTQLQNEKLYLYYLQNGRDMYVDQELDINRLSDYDVDHIVPQSFLKDDSIDNKVLTRSDKARGKSDNVPSEEVVKKMKNYWRQLLNAKLITQRKFDNLTKAERGGLSELDKAGFIKRQLVETRQITKHVAQILDSRMNTKYDENDKLIREVKVITLKSKLVSDFRKDFQFYKVREINNYHHAHDAYLNAVVGTALIKKYPKLESEFVYGDYKVYDVRKMIAKSEQEIGKATAKYFFYSNIMNFFKTEITLANGEIRKRPLIETNGETGEIVWDKGRDFATVRKVLSMPQVNIVKKTEVQTGGFSKESILPKRNSDKLIARKKDWDPKKYGGFDSPTVAYSVLVVAKVEKGKSKKLKSVKELLGITIMERSSFEKNPIDFLEAKGYKEVKKDLIIKLPKYSLFELENGRKRMLASAGELQKGNELALPSKYVNFLYLASHYEKLKGSPEDNEQKQLFVEQHKHYLDEIIEQISEFSKRVILADANLDKVLSAYNKHRDKPIREQAENIIHLFTLTNLGAPAAFKYFDTTIDRKRYTSTKEVLDATLIHQSITGLYETRIDLSQLGGDGGGGSGGGPAPGGTLNIEDEYRLHETSKEPDVPLGSTWLSDFPQAWAETGGMGLAVRQAPLIIPLKATSTPVSIKQYPMSQEARLGIKPHIQRLLDQGILVPCQSPWNTPLLPVKKPGTNDYRPVQDLREVNKRVEDIHPTVPNPYNLLSGLPPSHQWYTVLDLKDAFFCLRLHPTSQPLFAFEWRDPEMGISGQLTWTRLPQGFKNSPTLFNEALHRDLADFRIQHPDLILLQYVDDLLLAATSEQDCQRGTRALLQTLGNLGYRASAKKAQICQKQVKYLGYLLKEGQRWLTEARKETVMGQPTPKTPRQLREFLGKAGFCRLFIPGFAEMAAPLYPLTKPGTLFNWGPDQQKAYQEIKQALLTAPALGLPDLTKPFELFVDEKQGYAKGVLTQKLGPWRRPVAYLSKKLDPVAAGWPPCLRMVAAIAVLTKDAGKLTMGQPLVILAPHAVEALVKQPPDRWLSNARMTHYQAMLLDTDRVQFGPVVALNPATLLPLPEKEAPHDCLEILAETHGTRPDLTDQPIPDADYTWYTDGSSFLQEGQRRAGAAVTTETEVIWARALPAGTSAQRAELIALTQALKMAEGKKLNVYTDSRYAFATAHVHGEIYRRRGWLTSEGREIKNKNEILALLKALFLPKRLSIIHCPGHQKGNSAEARGNRMADQAAREAAMKAVLETSTLLAGKRTADGSEFEKRTADGSEFESPKKKAKVE

SEQ ID NO: 1086 - protein, 2091 aa, synthetic construct
MPAAKRVKLDGGDKKYSIGLDIGTNSVGWAVITDEYKVPSKKFKVLGNTDRHSIKKNLIGALLFDSGETAEATRLKRTARRRYTRRKNRICYLQEIFSNEMAKVDDSFFHRLEESFLVEEDKKHERHPIFGNIVDEVAYHEKYPTIYHLRKKLVDSTDKADLRLIYLALAHMIKFRGHFLIEGDLNPDNSDVDKLFIQLVQTYNQLFEENPINASGVDAKAILSARLSKSRRLENLIAQLPGEKKNGLFGNLIALSLGLTPNFKSNFDLAEDAKLQLSKDTYDDDLDNLLAQIGDQYADLFLAAKNLSDAILLSDILRVNTEITKAPLSASMIKRYDEHHQDLTLLKALVRQQLPEKYKEIFFDQSKNGYAGYIDGGASQEEFYKFIKPILEKMDGTEELLVKLNREDLLRKQRTFDNGSIPHQIHLGELHAILRRQEDFYPFLKDNREKIEKILTFRIPYYVGPLARGNSRFAWMTRKSEETITPWNFEEVVDKGASAQSFIERMTNFDKNLPNEKVLPKHSLLYEYFTVYNELTKVKYVTEGMRKPAFLSGEQKKAIVDLLFKTNRKVTVKQLKEDYFKKIECFDSVEISGVEDRFNASLGTYHDLLKIIKDKDFLDNEENEDILEDIVLTLTLFEDREMIEERLKTYAHLFDDKVMKQLKRRRYTGWGRLSRKLINGIRDKQSGKTILDFLKSDGFANRNFMQLIHDDSLTFKEDIQKAQVSGQGDSLHEHIANLAGSPAIKKGILQTVKVVDELVKVMGRHKPENIVIEMARENQTTQKGQKNSRERMKRIEEGIKELGSQILKEHPVENTQLQNEKLYLYYLQNGRDMYVDQELDINRLSDYDVDHIVPQSFLKDDSIDNKVLTRSDKARGKSDNVPSEEVVKKMKNYWRQLLNAKLITQRKFDNLTKAERGGLSELDKAGFIKRQLVETRQITKHVAQILDSRMNTKYDENDKLIREVKVITLKSKLVSDFRKDFQFYKVREINNYHHAHDAYLNAVVGTALIKKYPKLESEFVYGDYKVYDVRKMIAKSEQEIGKATAKYFFYSNIMNFFKTEITLANGEIRKRPLIETNGETGEIVWDKGRDFATVRKVLSMPQVNIVKKTEVQTGGFSKESILPKRNSDKLIARKKDWDPKKYGGFDSPTVAYSVLVVAKVEKGKSKKLKSVKELLGITIMERSSFEKNPIDFLEAKGYKEVKKDLIIKLPKYSLFELENGRKRMLASAGELQKGNELALPSKYVNFLYLASHYEKLKGSPEDNEQKQLFVEQHKHYLDEIIEQISEFSKRVILADANLDKVLSAYNKHRDKPIREQAENIIHLFTLTNLGAPAAFKYFDTTIDRKRYTSTKEVLDATLIHQSITGLYETRIDLSQLGGDGGGSSPAPGGTLNIEDEYRLHETSKEPDVPLGSTWLSDFPQAWAETGGMGLAVRQAPLIIPLKATSTPVSIKQYPMSQEARLGIKPHIQRLLDQGILVPCQSPWNTPLLPVKKPGTNDYRPVQDLREVNKRVEDIHPTVPNPYNLLSGLPPSHQWYTVLDLKDAFFCLRLHPTSQPLFAFEWRDPEMGISGQLTWTRLPQGFKNSPTLFNEALHRDLADFRIQHPDLILLQYVDDLLLAATSEQDCQRGTRALLQTLGNLGYRASAKKAQICQKQVKYLGYLLKEGQRWLTEARKETVMGQPTPKTPRQLREFLGKAGFCRLFIPGFAEMAAPLYPLTKPGTLFNWGPDQQKAYQEIKQALLTAPALGLPDLTKPFELFVDEKQGYAKGVLTQKLGPWRRPVAYLSKKLDPVAAGWPPCLRMVAAIAVLTKDAGKLTMGQPLVILAPHAVEALVKQPPDRWLSNARMTHYQAMLLDTDRVQFGPVVALNPATLLPLPEKEAPHDCLEILAETHGTRPDLTDQPIPDADYTWYTDGSSFLQEGQRRAGAAVTTETEVIWARALPAGTSAQRAELIALTQALKMAEGKKLNVYTDSRYAFATAHVHGEIYRRRGWLTSEGREIKNKNEILALLKALFLPKRLSIIHCPGHQKGNSAEARGNRMADQAAREAAMKAVLETSTLLAGKRTADGSEFEKRTADGSEFESPKKKAKVE

SEQ ID NO: 1087 - protein, 2094 aa, synthetic construct
MPAAKRVKLDGGDKKYSIGLDIGTNSVGWAVITDEYKVPSKKFKVLGNTDRHSIKKNLIGALLFDSGETAEATRLKRTARRRYTRRKNRICYLQEIFSNEMAKVDDSFFHRLEESFLVEEDKKHERHPIFGNIVDEVAYHEKYPTIYHLRKKLVDSTDKADLRLIYLALAHMIKFRGHFLIEGDLNPDNSDVDKLFIQLVQTYNQLFEENPINASGVDAKAILSARLSKSRRLENLIAQLPGEKKNGLFGNLIALSLGLTPNFKSNFDLAEDAKLQLSKDTYDDDLDNLLAQIGDQYADLFLAAKNLSDAILLSDILRVNTEITKAPLSASMIKRYDEHHQDLTLLKALVRQQLPEKYKEIFFDQSKNGYAGYIDGGASQEEFYKFIKPILEKMDGTEELLVKLNREDLLRKQRTFDNGSIPHQIHLGELHAILRRQEDFYPFLKDNREKIEKILTFRIPYYVGPLARGNSRFAWMTRKSEETITPWNFEEVVDKGASAQSFIERMTNFDKNLPNEKVLPKHSLLYEYFTVYNELTKVKYVTEGMRKPAFLSGEQKKAIVDLLFKTNRKVTVKQLKEDYFKKIECFDSVEISGVEDRFNASLGTYHDLLKIIKDKDFLDNEENEDILEDIVLTLTLFEDREMIEERLKTYAHLFDDKVMKQLKRRRYTGWGRLSRKLINGIRDKQSGKTILDFLKSDGFANRNFMQLIHDDSLTFKEDIQKAQVSGQGDSLHEHIANLAGSPAIKKGILQTVKVVDELVKVMGRHKPENIVIEMARENQTTQKGQKNSRERMKRIEEGIKELGSQILKEHPVENTQLQNEKLYLYYLQNGRDMYVDQELDINRLSDYDVDHIVPQSFLKDDSIDNKVLTRSDKARGKSDNVPSEEVVKKMKNYWRQLLNAKLITQRKFDNLTKAERGGLSELDKAGFIKRQLVETRQITKHVAQILDSRMNTKYDENDKLIREVKVITLKSKLVSDFRKDFQFYKVREINNYHHAHDAYLNAVVGTALIKKYPKLESEFVYGDYKVYDVRKMIAKSEQEIGKATAKYFFYSNIMNFFKTEITLANGEIRKRPLIETNGETGEIVWDKGRDFATVRKVLSMPQVNIVKKTEVQTGGFSKESILPKRNSDKLIARKKDWDPKKYGGFDSPTVAYSVLVVAKVEKGKSKKLKSVKELLGITIMERSSFEKNPIDFLEAKGYKEVKKDLIIKLPKYSLFELENGRKRMLASAGELQKGNELALPSKYVNFLYLASHYEKLKGSPEDNEQKQLFVEQHKHYLDEIIEQISEFSKRVILADANLDKVLSAYNKHRDKPIREQAENIIHLFTLTNLGAPAAFKYFDTTIDRKRYTSTKEVLDATLIHQSITGLYETRIDLSQLGGDGGGGGGSSGGSGGTLNIEDEYRLHETSKEPDVPLGSTWLSDFPQAWAETGGMGLAVRQAPLIIPLKATSTPVSIKQYPMSQEARLGIKPHIQRLLDQGILVPCQSPWNTPLLPVKKPGTNDYRPVQDLREVNKRVEDIHPTVPNPYNLLSGLPPSHQWYTVLDLKDAFFCLRLHPTSQPLFAFEWRDPEMGISGQLTWTRLPQGFKNSPTLFNEALHRDLADFRIQHPDLILLQYVDDLLLAATSEQDCQRGTRALLQTLGNLGYRASAKKAQICQKQVKYLGYLLKEGQRWLTEARKETVMGQPTPKTPRQLREFLGKAGFCRLFIPGFAEMAAPLYPLTKPGTLFNWGPDQQKAYQEIKQALLTAPALGLPDLTKPFELFVDEKQGYAKGVLTQKLGPWRRPVAYLSKKLDPVAAGWPPCLRMVAAIAVLTKDAGKLTMGQPLVILAPHAVEALVKQPPDRWLSNARMTHYQAMLLDTDRVQFGPVVALNPATLLPLPEKEAPHDCLEILAETHGTRPDLTDQPIPDADYTWYTDGSSFLQEGQRRAGAAVTTETEVIWARALPAGTSAQRAELIALTQALKMAEGKKLNVYTDSRYAFATAHVHGEIYRRRGWLTSEGREIKNKNEILALLKALFLPKRLSIIHCPGHQKGNSAEARGNRMADQAAREAAMKAVLETSTLLAGKRTADGSEFEKRTADGSEFESPKKKAKVE

SEQ ID NO: 1088 - protein, 2096 aa, synthetic construct
MPAAKRVKLDGGDKKYSIGLDIGTNSVGWAVITDEYKVPSKKFKVLGNTDRHSIKKNLIGALLFDSGETAEATRLKRTARRRYTRRKNRICYLQEIFSNEMAKVDDSFFHRLEESFLVEEDKKHERHPIFGNIVDEVAYHEKYPTIYHLRKKLVDSTDKADLRLIYLALAHMIKFRGHFLIEGDLNPDNSDVDKLFIQLVQTYNQLFEENPINASGVDAKAILSARLSKSRRLENLIAQLPGEKKNGLFGNLIALSLGLTPNFKSNFDLAEDAKLQLSKDTYDDDLDNLLAQIGDQYADLFLAAKNLSDAILLSDILRVNTEITKAPLSASMIKRYDEHHQDLTLLKALVRQQLPEKYKEIFFDQSKNGYAGYIDGGASQEEFYKFIKPILEKMDGTEELLVKLNREDLLRKQRTFDNGSIPHQIHLGELHAILRRQEDFYPFLKDNREKIEKILTFRIPYYVGPLARGNSRFAWMTRKSEETITPWNFEEVVDKGASAQSFIERMTNFDKNLPNEKVLPKHSLLYEYFTVYNELTKVKYVTEGMRKPAFLSGEQKKAIVDLLFKTNRKVTVKQLKEDYFKKIECFDSVEISGVEDRFNASLGTYHDLLKIIKDKDFLDNEENEDILEDIVLTLTLFEDREMIEERLKTYAHLFDDKVMKQLKRRRYTGWGRLSRKLINGIRDKQSGKTILDFLKSDGFANRNFMQLIHDDSLTFKEDIQKAQVSGQGDSLHEHIANLAGSPAIKKGILQTVKVVDELVKVMGRHKPENIVIEMARENQTTQKGQKNSRERMKRIEEGIKELGSQILKEHPVENTQLQNEKLYLYYLQNGRDMYVDQELDINRLSDYDVDHIVPQSFLKDDSIDNKVLTRSDKARGKSDNVPSEEVVKKMKNYWRQLLNAKLITQRKFDNLTKAERGGLSELDKAGFIKRQLVETRQITKHVAQILDSRMNTKYDENDKLIREVKVITLKSKLVSDFRKDFQFYKVREINNYHHAHDAYLNAVVGTALIKKYPKLESEFVYGDYKVYDVRKMIAKSEQEIGKATAKYFFYSNIMNFFKTEITLANGEIRKRPLIETNGETGEIVWDKGRDFATVRKVLSMPQVNIVKKTEVQTGGFSKESILPKRNSDKLIARKKDWDPKKYGGFDSPTVAYSVLVVAKVEKGKSKKLKSVKELLGITIMERSSFEKNPIDFLEAKGYKEVKKDLIIKLPKYSLFELENGRKRMLASAGELQKGNELALPSKYVNFLYLASHYEKLKGSPEDNEQKQLFVEQHKHYLDEIIEQISEFSKRVILADANLDKVLSAYNKHRDKPIREQAENIIHLFTLTNLGAPAAFKYFDTTIDRKRYTSTKEVLDATLIHQSITGLYETRIDLSQLGGDGGGGGEAAAKGSSGGTLNIEDEYRLHETSKEPDVPLGSTWLSDFPQAWAETGGMGLAVRQAPLIIPLKATSTPVSIKQYPMSQEARLGIKPHIQRLLDQGILVPCQSPWNTPLLPVKKPGTNDYRPVQDLREVNKRVEDIHPTVPNPYNLLSGLPPSHQWYTVLDLKDAFFCLRLHPTSQPLFAFEWRDPEMGISGQLTWTRLPQGFKNSPTLFNEALHRDLADFRIQHPDLILLQYVDDLLLAATSEQDCQRGTRALLQTLGNLGYRASAKKAQICQKQVKYLGYLLKEGQRWLTEARKETVMGQPTPKTPRQLREFLGKAGFCRLFIPGFAEMAAPLYPLTKPGTLFNWGPDQQKAYQEIKQALLTAPALGLPDLTKPFELFVDEKQGYAKGVLTQKLGPWRRPVAYLSKKLDPVAAGWPPCLRMVAAIAVLTKDAGKLTMGQPLVILAPHAVEALVKQPPDRWLSNARMTHYQAMLLDTDRVQFGPVVALNPATLLPLPEKEAPHDCLEILAETHGTRPDLTDQPIPDADYTWYTDGSSFLQEGQRRAGAAVTTETEVIWARALPAGTSAQRAELIALTQALKMAEGKKLNVYTDSRYAFATAHVHGEIYRRRGWLTSEGREIKNKNEILALLKALFLPKRLSIIHCPGHQKGNSAEARGNRMADQAAREAAMKAVLETSTLLAGKRTADGSEFEKRTADGSEFESPKKKAKVE

SEQ ID NO: 1089 - protein, 2094 aa, synthetic construct
MPAAKRVKLDGGDKKYSIGLDIGTNSVGWAVITDEYKVPSKKFKVLGNTDRHSIKKNLIGALLFDSGETAEATRLKRTARRRYTRRKNRICYLQEIFSNEMAKVDDSFFHRLEESFLVEEDKKHERHPIFGNIVDEVAYHEKYPTIYHLRKKLVDSTDKADLRLIYLALAHMIKFRGHFLIEGDLNPDNSDVDKLFIQLVQTYNQLFEENPINASGVDAKAILSARLSKSRRLENLIAQLPGEKKNGLFGNLIALSLGLTPNFKSNFDLAEDAKLQLSKDTYDDDLDNLLAQIGDQYADLFLAAKNLSDAILLSDILRVNTEITKAPLSASMIKRYDEHHQDLTLLKALVRQQLPEKYKEIFFDQSKNGYAGYIDGGASQEEFYKFIKPILEKMDGTEELLVKLNREDLLRKQRTFDNGSIPHQIHLGELHAILRRQEDFYPFLKDNREKIEKILTFRIPYYVGPLARGNSRFAWMTRKSEETITPWNFEEVVDKGASAQSFIERMTNFDKNLPNEKVLPKHSLLYEYFTVYNELTKVKYVTEGMRKPAFLSGEQKKAIVDLLFKTNRKVTVKQLKEDYFKKIECFDSVEISGVEDRFNASLGTYHDLLKIIKDKDFLDNEENEDILEDIVLTLTLFEDREMIEERLKTYAHLFDDKVMKQLKRRRYTGWGRLSRKLINGIRDKQSGKTILDFLKSDGFANRNFMQLIHDDSLTFKEDIQKAQVSGQGDSLHEHIANLAGSPAIKKGILQTVKVVDELVKVMGRHKPENIVIEMARENQTTQKGQKNSRERMKRIEEGIKELGSQILKEHPVENTQLQNEKLYLYYLQNGRDMYVDQELDINRLSDYDVDHIVPQSFLKDDSIDNKVLTRSDKARGKSDNVPSEEVVKKMKNYWRQLLNAKLITQRKFDNLTKAERGGLSELDKAGFIKRQLVETRQITKHVAQILDSRMNTKYDENDKLIREVKVITLKSKLVSDFRKDFQFYKVREINNYHHAHDAYLNAVVGTALIKKYPKLESEFVYGDYKVYDVRKMIAKSEQEIGKATAKYFFYSNIMNFFKTEITLANGEIRKRPLIETNGETGEIVWDKGRDFATVRKVLSMPQVNIVKKTEVQTGGFSKESILPKRNSDKLIARKKDWDPKKYGGFDSPTVAYSVLVVAKVEKGKSKKLKSVKELLGITIMERSSFEKNPIDFLEAKGYKEVKKDLIIKLPKYSLFELENGRKRMLASAGELQKGNELALPSKYVNFLYLASHYEKLKGSPEDNEQKQLFVEQHKHYLDEIIEQISEFSKRVILADANLDKVLSAYNKHRDKPIREQAENIIHLFTLTNLGAPAAFKYFDTTIDRKRYTSTKEVLDATLIHQSITGLYETRIDLSQLGGDGGGSSGSSGSSGGTLNIEDEYRLHETSKEPDVPLGSTWLSDFPQAWAETGGMGLAVRQAPLIIPLKATSTPVSIKQYPMSQEARLGIKPHIQRLLDQGILVPCQSPWNTPLLPVKKPGTNDYRPVQDLREVNKRVEDIHPTVPNPYNLLSGLPPSHQWYTVLDLKDAFFCLRLHPTSQPLFAFEWRDPEMGISGQLTWTRLPQGFKNSPTLFNEALHRDLADFRIQHPDLILLQYVDDLLLAATSEQDCQRGTRALLQTLGNLGYRASAKKAQICQKQVKYLGYLLKEGQRWLTEARKETVMGQPTPKTPRQLREFLGKAGFCRLFIPGFAEMAAPLYPLTKPGTLFNWGPDQQKAYQEIKQALLTAPALGLPDLTKPFELFVDEKQGYAKGVLTQKLGPWRRPVAYLSKKLDPVAAGWPPCLRMVAAIAVLTKDAGKLTMGQPLVILAPHAVEALVKQPPDRWLSNARMTHYQAMLLDTDRVQFGPVVALNPATLLPLPEKEAPHDCLEILAETHGTRPDLTDQPIPDADYTWYTDGSSFLQEGQRRAGAAVTTETEVIWARALPAGTSAQRAELIALTQALKMAEGKKLNVYTDSRYAFATAHVHGEIYRRRGWLTSEGREIKNKNEILALLKALFLPKRLSIIHCPGHQKGNSAEARGNRMADQAAREAAMKAVLETSTLLAGKRTADGSEFEKRTADGSEFESPKKKAKVE

SEQ ID NO: 1090 - protein, 2096 aa, synthetic construct
MPAAKRVKLDGGDKKYSIGLDIGTNSVGWAVITDEYKVPSKKFKVLGNTDRHSIKKNLIGALLFDSGETAEATRLKRTARRRYTRRKNRICYLQEIFSNEMAKVDDSFFHRLEESFLVEEDKKHERHPIFGNIVDEVAYHEKYPTIYHLRKKLVDSTDKADLRLIYLALAHMIKFRGHFLIEGDLNPDNSDVDKLFIQLVQTYNQLFEENPINASGVDAKAILSARLSKSRRLENLIAQLPGEKKNGLFGNLIALSLGLTPNFKSNFDLAEDAKLQLSKDTYDDDLDNLLAQIGDQYADLFLAAKNLSDAILLSDILRVNTEITKAPLSASMIKRYDEHHQDLTLLKALVRQQLPEKYKEIFFDQSKNGYAGYIDGGASQEEFYKFIKPILEKMDGTEELLVKLNREDLLRKQRTFDNGSIPHQIHLGELHAILRRQEDFYPFLKDNREKIEKILTFRIPYYVGPLARGNSRFAWMTRKSEETITPWNFEEVVDKGASAQSFIERMTNFDKNLPNEKVLPKHSLLYEYFTVYNELTKVKYVTEGMRKPAFLSGEQKKAIVDLLFKTNRKVTVKQLKEDYFKKIECFDSVEISGVEDRFNASLGTYHDLLKIIKDKDFLDNEENEDILEDIVLTLTLFEDREMIEERLKTYAHLFDDKVMKQLKRRRYTGWGRLSRKLINGIRDKQSGKTILDFLKSDGFANRNFMQLIHDDSLTFKEDIQKAQVSGQGDSLHEHIANLAGSPAIKKGILQTVKVVDELVKVMGRHKPENIVIEMARENQTTQKGQKNSRERMKRIEEGIKELGSQILKEHPVENTQLQNEKLYLYYLQNGRDMYVDQELDINRLSDYDVDHIVPQSFLKDDSIDNKVLTRSDKARGKSDNVPSEEVVKKMKNYWRQLLNAKLITQRKFDNLTKAERGGLSELDKAGFIKRQLVETRQITKHVAQILDSRMNTKYDENDKLIREVKVITLKSKLVSDFRKDFQFYKVREINNYHHAHDAYLNAVVGTALIKKYPKLESEFVYGDYKVYDVRKMIAKSEQEIGKATAKYFFYSNIMNFFKTEITLANGEIRKRPLIETNGETGEIVWDKGRDFATVRKVLSMPQVNIVKKTEVQTGGFSKESILPKRNSDKLIARKKDWDPKKYGGFDSPTVAYSVLVVAKVEKGKSKKLKSVKELLGITIMERSSFEKNPIDFLEAKGYKEVKKDLIIKLPKYSLFELENGRKRMLASAGELQKGNELALPSKYVNFLYLASHYEKLKGSPEDNEQKQLFVEQHKHYLDEIIEQISEFSKRVILADANLDKVLSAYNKHRDKPIREQAENIIHLFTLTNLGAPAAFKYFDTTIDRKRYTSTKEVLDATLIHQSITGLYETRIDLSQLGGDGGGGSPAPEAAAKGGTLNIEDEYRLHETSKEPDVPLGSTWLSDFPQAWAETGGMGLAVRQAPLIIPLKATSTPVSIKQYPMSQEARLGIKPHIQRLLDQGILVPCQSPWNTPLLPVKKPGTNDYRPVQDLREVNKRVEDIHPTVPNPYNLLSGLPPSHQWYTVLDLKDAFFCLRLHPTSQPLFAFEWRDPEMGISGQLTWTRLPQGFKNSPTLFNEALHRDLADFRIQHPDLILLQYVDDLLLAATSEQDCQRGTRALLQTLGNLGYRASAKKAQICQKQVKYLGYLLKEGQRWLTEARKETVMGQPTPKTPRQLREFLGKAGFCRLFIPGFAEMAAPLYPLTKPGTLFNWGPDQQKAYQEIKQALLTAPALGLPDLTKPFELFVDEKQGYAKGVLTQKLGPWRRPVAYLSKKLDPVAAGWPPCLRMVAAIAVLTKDAGKLTMGQPLVILAPHAVEALVKQPPDRWLSNARMTHYQAMLLDTDRVQFGPVVALNPATLLPLPEKEAPHDCLEILAETHGTRPDLTDQPIPDADYTWYTDGSSFLQEGQRRAGAAVTTETEVIWARALPAGTSAQRAELIALTQALKMAEGKKLNVYTDSRYAFATAHVHGEIYRRRGWLTSEGREIKNKNEILALLKALFLPKRLSIIHCPGHQKGNSAEARGNRMADQAAREAAMKAVLETSTLLAGKRTADGSEFEKRTADGSEFESPKKKAKVE

SEQ ID NO: 1091 - protein, 2096 aa, synthetic construct
MPAAKRVKLDGGDKKYSIGLDIGTNSVGWAVITDEYKVPSKKFKVLGNTDRHSIKKNLIGALLFDSGETAEATRLKRTARRRYTRRKNRICYLQEIFSNEMAKVDDSFFHRLEESFLVEEDKKHERHPIFGNIVDEVAYHEKYPTIYHLRKKLVDSTDKADLRLIYLALAHMIKFRGHFLIEGDLNPDNSDVDKLFIQLVQTYNQLFEENPINASGVDAKAILSARLSKSRRLENLIAQLPGEKKNGLFGNLIALSLGLTPNFKSNFDLAEDAKLQLSKDTYDDDLDNLLAQIGDQYADLFLAAKNLSDAILLSDILRVNTEITKAPLSASMIKRYDEHHQDLTLLKALVRQQLPEKYKEIFFDQSKNGYAGYIDGGASQEEFYKFIKPILEKMDGTEELLVKLNREDLLRKQRTFDNGSIPHQIHLGELHAILRRQEDFYPFLKDNREKIEKILTFRIPYYVGPLARGNSRFAWMTRKSEETITPWNFEEVVDKGASAQSFIERMTNFDKNLPNEKVLPKHSLLYEYFTVYNELTKVKYVTEGMRKPAFLSGEQKKAIVDLLFKTNRKVTVKQLKEDYFKKIECFDSVEISGVEDRFNASLGTYHDLLKIIKDKDFLDNEENEDILEDIVLTLTLFEDREMIEERLKTYAHLFDDKVMKQLKRRRYTGWGRLSRKLINGIRDKQSGKTILDFLKSDGFANRNFMQLIHDDSLTFKEDIQKAQVSGQGDSLHEHIANLAGSPAIKKGILQTVKVVDELVKVMGRHKPENIVIEMARENQTTQKGQKNSRERMKRIEEGIKELGSQILKEHPVENTQLQNEKLYLYYLQNGRDMYVDQELDINRLSDYDVDHIVPQSFLKDDSIDNKVLTRSDKARGKSDNVPSEEVVKKMKNYWRQLLNAKLITQRKFDNLTKAERGGLSELDKAGFIKRQLVETRQITKHVAQILDSRMNTKYDENDKLIREVKVITLKSKLVSDFRKDFQFYKVREINNYHHAHDAYLNAVVGTALIKKYPKLESEFVYGDYKVYDVRKMIAKSEQEIGKATAKYFFYSNIMNFFKTEITLANGEIRKRPLIETNGETGEIVWDKGRDFATVRKVLSMPQVNIVKKTEVQTGGFSKESILPKRNSDKLIARKKDWDPKKYGGFDSPTVAYSVLVVAKVEKGKSKKLKSVKELLGITIMERSSFEKNPIDFLEAKGYKEVKKDLIIKLPKYSLFELENGRKRMLASAGELQKGNELALPSKYVNFLYLASHYEKLKGSPEDNEQKQLFVEQHKHYLDEIIEQISEFSKRVILADANLDKVLSAYNKHRDKPIREQAENIIHLFTLTNLGAPAAFKYFDTTIDRKRYTSTKEVLDATLIHQSITGLYETRIDLSQLGGDGGEAAAKGGGGGSGGTLNIEDEYRLHETSKEPDVPLGSTWLSDFPQAWAETGGMGLAVRQAPLIIPLKATSTPVSIKQYPMSQEARLGIKPHIQRLLDQGILVPCQSPWNTPLLPVKKPGTNDYRPVQDLREVNKRVEDIHPTVPNPYNLLSGLPPSHQWYTVLDLKDAFFCLRLHPTSQPLFAFEWRDPEMGISGQLTWTRLPQGFKNSPTLFNEALHRDLADFRIQHPDLILLQYVDDLLLAATSEQDCQRGTRALLQTLGNLGYRASAKKAQICQKQVKYLGYLLKEGQRWLTEARKETVMGQPTPKTPRQLREFLGKAGFCRLFIPGFAEMAAPLYPLTKPGTLFNWGPDQQKAYQEIKQALLTAPALGLPDLTKPFELFVDEKQGYAKGVLTQKLGPWRRPVAYLSKKLDPVAAGWPPCLRMVAAIAVLTKDAGKLTMGQPLVILAPHAVEALVKQPPDRWLSNARMTHYQAMLLDTDRVQFGPVVALNPATLLPLPEKEAPHDCLEILAETHGTRPDLTDQPIPDADYTWYTDGSSFLQEGQRRAGAAVTTETEVIWARALPAGTSAQRAELIALTQALKMAEGKKLNVYTDSRYAFATAHVHGEIYRRRGWLTSEGREIKNKNEILALLKALFLPKRLSIIHCPGHQKGNSAEARGNRMADQAAREAAMKAVLETSTLLAGKRTADGSEFEKRTADGSEFESPKKKAKVE

SEQ ID NO: 1092 - protein, 2109 aa, synthetic construct
MPAAKRVKLDGGDKKYSIGLDIGTNSVGWAVITDEYKVPSKKFKVLGNTDRHSIKKNLIGALLFDSGETAEATRLKRTARRRYTRRKNRICYLQEIFSNEMAKVDDSFFHRLEESFLVEEDKKHERHPIFGNIVDEVAYHEKYPTIYHLRKKLVDSTDKADLRLIYLALAHMIKFRGHFLIEGDLNPDNSDVDKLFIQLVQTYNQLFEENPINASGVDAKAILSARLSKSRRLENLIAQLPGEKKNGLFGNLIALSLGLTPNFKSNFDLAEDAKLQLSKDTYDDDLDNLLAQIGDQYADLFLAAKNLSDAILLSDILRVNTEITKAPLSASMIKRYDEHHQDLTLLKALVRQQLPEKYKEIFFDQSKNGYAGYIDGGASQEEFYKFIKPILEKMDGTEELLVKLNREDLLRKQRTFDNGSIPHQIHLGELHAILRRQEDFYPFLKDNREKIEKILTFRIPYYVGPLARGNSRFAWMTRKSEETITPWNFEEVVDKGASAQSFIERMTNFDKNLPNEKVLPKHSLLYEYFTVYNELTKVKYVTEGMRKPAFLSGEQKKAIVDLLFKTNRKVTVKQLKEDYFKKIECFDSVEISGVEDRFNASLGTYHDLLKIIKDKDFLDNEENEDILEDIVLTLTLFEDREMIEERLKTYAHLFDDKVMKQLKRRRYTGWGRLSRKLINGIRDKQSGKTILDFLKSDGFANRNFMQLIHDDSLTFKEDIQKAQVSGQGDSLHEHIANLAGSPAIKKGILQTVKVVDELVKVMGRHKPENIVIEMARENQTTQKGQKNSRERMKRIEEGIKELGSQILKEHPVENTQLQNEKLYLYYLQNGRDMYVDQELDINRLSDYDVDHIVPQSFLKDDSIDNKVLTRSDKARGKSDNVPSEEVVKKMKNYWRQLLNAKLITQRKFDNLTKAERGGLSELDKAGFIKRQLVETRQITKHVAQILDSRMNTKYDENDKLIREVKVITLKSKLVSDFRKDFQFYKVREINNYHHAHDAYLNAVVGTALIKKYPKLESEFVYGDYKVYDVRKMIAKSEQEIGKATAKYFFYSNIMNFFKTEITLANGEIRKRPLIETNGETGEIVWDKGRDFATVRKVLSMPQVNIVKKTEVQTGGFSKESILPKRNSDKLIARKKDWDPKKYGGFDSPTVAYSVLVVAKVEKGKSKKLKSVKELLGITIMERSSFEKNPIDFLEAKGYKEVKKDLIIKLPKYSLFELENGRKRMLASAGELQKGNELALPSKYVNFLYLASHYEKLKGSPEDNEQKQLFVEQHKHYLDEIIEQISEFSKRVILADANLDKVLSAYNKHRDKPIREQAENIIHLFTLTNLGAPAAFKYFDTTIDRKRYTSTKEVLDATLIHQSITGLYETRIDLSQLGGDGGSGGSSGGSSGSETPGTSESATPESSGGSSGGSSGGVPWILKKPLELTIKLDLEEQQGTLLNNSILSKKGKEELKQLFEKYSALWQSWENQVGHRRIRPHKIATGTVKPTPQKQYHINPKAKPDIQIVINDLLKQGVLIQKESTMNTPVYPVPKPNGRWRMVLDYRAVNKVTPLIAVQNQHSYGILGSLFKGRYKTTIDLSNGFWAHPIVPEDYWITAFTWQGKQYCWTVLPQGFLNSPGLFNGDVVDLLQGIPNVEVYVDDVYISHDSEKEHLEYLDILFNRLKEAGYIISLKKSNIANSIVDFLGFQITNEGRGLTDTFKEKLENITAPTTLKQLQSILGLLNFARNFIPDFTELIAPLYALIPKSPKNYVPWQIEHSTTLETLITKLNGAEYLQGRKGDKTLIMKVNASYTTGYIRYYNEGEKKPISYVSIVFSKTELKFTELEKLLTTVHKGLLKALDLSMGQNIHVYSPIVSMQNIQKTPQTAKKALASRWLSWLSYLEDPRIRFFYDPQMPALKDLPAVDTGKDNKKHPSNFQHIFYTDGSAITSPTKEGHLNAGMGIVYFINKDGNLQKQQEWSISLGNHTAQFAEIAAFEFALKKCLPLGGNILVVTDSNYVAKAYNEELDVWASNGFVNNRKKPLKHISKWKSVADLKRLRPDVVVTHEPGHQKLDSSPHAYGNNLADQLATQASFKVHAGKRTADGSEFEKRTADGSEFESPKKKAKVE

SEQ ID NO: 1093 - protein, 2122 aa, synthetic construct
MPAAKRVKLDGGDKKYSIGLDIGTNSVGWAVITDEYKVPSKKFKVLGNTDRHSIKKNLIGALLFDSGETAEATRLKRTARRRYTRRKNRICYLQEIFSNEMAKVDDSFFHRLEESFLVEEDKKHERHPIFGNIVDEVAYHEKYPTIYHLRKKLVDSTDKADLRLIYLALAHMIKFRGHFLIEGDLNPDNSDVDKLFIQLVQTYNQLFEENPINASGVDAKAILSARLSKSRRLENLIAQLPGEKKNGLFGNLIALSLGLTPNFKSNFDLAEDAKLQLSKDTYDDDLDNLLAQIGDQYADLFLAAKNLSDAILLSDILRVNTEITKAPLSASMIKRYDEHHQDLTLLKALVRQQLPEKYKEIFFDQSKNGYAGYIDGGASQEEFYKFIKPILEKMDGTEELLVKLNREDLLRKQRTFDNGSIPHQIHLGELHAILRRQEDFYPFLKDNREKIEKILTFRIPYYVGPLARGNSRFAWMTRKSEETITPWNFEEVVDKGASAQSFIERMTNFDKNLPNEKVLPKHSLLYEYFTVYNELTKVKYVTEGMRKPAFLSGEQKKAIVDLLFKTNRKVTVKQLKEDYFKKIECFDSVEISGVEDRFNASLGTYHDLLKIIKDKDFLDNEENEDILEDIVLTLTLFEDREMIEERLKTYAHLFDDKVMKQLKRRRYTGWGRLSRKLINGIRDKQSGKTILDFLKSDGFANRNFMQLIHDDSLTFKEDIQKAQVSGQGDSLHEHIANLAGSPAIKKGILQTVKVVDELVKVMGRHKPENIVIEMARENQTTQKGQKNSRERMKRIEEGIKELGSQILKEHPVENTQLQNEKLYLYYLQNGRDMYVDQELDINRLSDYDVDHIVPQSFLKDDSIDNKVLTRSDKARGKSDNVPSEEVVKKMKNYWRQLLNAKLITQRKFDNLTKAERGGLSELDKAGFIKRQLVETRQITKHVAQILDSRMNTKYDENDKLIREVKVITLKSKLVSDFRKDFQFYKVREINNYHHAHDAYLNAVVGTALIKKYPKLESEFVYGDYKVYDVRKMIAKSEQEIGKATAKYFFYSNIMNFFKTEITLANGEIRKRPLIETNGETGEIVWDKGRDFATVRKVLSMPQVNIVKKTEVQTGGFSKESILPKRNSDKLIARKKDWDPKKYGGFDSPTVAYSVLVVAKVEKGKSKKLKSVKELLGITIMERSSFEKNPIDFLEAKGYKEVKKDLIIKLPKYSLFELENGRKRMLASAGELQKGNELALPSKYVNFLYLASHYEKLKGSPEDNEQKQLFVEQHKHYLDEIIEQISEFSKRVILADANLDKVLSAYNKHRDKPIREQAENIIHLFTLTNLGAPAAFKYFDTTIDRKRYTSTKEVLDATLIHQSITGLYETRIDLSQLGGDGGAEAAAKEAAAKEAAAKEAAAKALEAEAAAKEAAAKEAAAKEAAAKAGGVPWILKKPLELTIKLDLEEQQGTLLNNSILSKKGKEELKQLFEKYSALWQSWENQVGHRRIRPHKIATGTVKPTPQKQYHINPKAKPDIQIVINDLLKQGVLIQKESTMNTPVYPVPKPNGRWRMVLDYRAVNKVTPLIAVQNQHSYGILGSLFKGRYKTTIDLSNGFWAHPIVPEDYWITAFTWQGKQYCWTVLPQGFLNSPGLFNGDVVDLLQGIPNVEVYVDDVYISHDSEKEHLEYLDILFNRLKEAGYIISLKKSNIANSIVDFLGFQITNEGRGLTDTFKEKLENITAPTTLKQLQSILGLLNFARNFIPDFTELIAPLYALIPKSPKNYVPWQIEHSTTLETLITKLNGAEYLQGRKGDKTLIMKVNASYTTGYIRYYNEGEKKPISYVSIVFSKTELKFTELEKLLTTVHKGLLKALDLSMGQNIHVYSPIVSMQNIQKTPQTAKKALASRWLSWLSYLEDPRIRFFYDPQMPALKDLPAVDTGKDNKKHPSNFQHIFYTDGSAITSPTKEGHLNAGMGIVYFINKDGNLQKQQEWSISLGNHTAQFAEIAAFEFALKKCLPLGGNILVVTDSNYVAKAYNEELDVWASNGFVNNRKKPLKHISKWKSVADLKRLRPDVVVTHEPGHQKLDSSPHAYGNNLADQLATQASFKVHAGKRTADGSEFEKRTADGSEFESPKKKAKVE

SEQ ID NO: 1094 - protein, 2106 aa, synthetic construct
MPAAKRVKLDGGDKKYSIGLDIGTNSVGWAVITDEYKVPSKKFKVLGNTDRHSIKKNLIGALLFDSGETAEATRLKRTARRRYTRRKNRICYLQEIFSNEMAKVDDSFFHRLEESFLVEEDKKHERHPIFGNIVDEVAYHEKYPTIYHLRKKLVDSTDKADLRLIYLALAHMIKFRGHFLIEGDLNPDNSDVDKLFIQLVQTYNQLFEENPINASGVDAKAILSARLSKSRRLENLIAQLPGEKKNGLFGNLIALSLGLTPNFKSNFDLAEDAKLQLSKDTYDDDLDNLLAQIGDQYADLFLAAKNLSDAILLSDILRVNTEITKAPLSASMIKRYDEHHQDLTLLKALVRQQLPEKYKEIFFDQSKNGYAGYIDGGASQEEFYKFIKPILEKMDGTEELLVKLNREDLLRKQRTFDNGSIPHQIHLGELHAILRRQEDFYPFLKDNREKIEKILTFRIPYYVGPLARGNSRFAWMTRKSEETITPWNFEEVVDKGASAQSFIERMTNFDKNLPNEKVLPKHSLLYEYFTVYNELTKVKYVTEGMRKPAFLSGEQKKAIVDLLFKTNRKVTVKQLKEDYFKKIECFDSVEISGVEDRFNASLGTYHDLLKIIKDKDFLDNEENEDILEDIVLTLTLFEDREMIEERLKTYAHLFDDKVMKQLKRRRYTGWGRLSRKLINGIRDKQSGKTILDFLKSDGFANRNFMQLIHDDSLTFKEDIQKAQVSGQGDSLHEHIANLAGSPAIKKGILQTVKVVDELVKVMGRHKPENIVIEMARENQTTQKGQKNSRERMKRIEEGIKELGSQILKEHPVENTQLQNEKLYLYYLQNGRDMYVDQELDINRLSDYDVDHIVPQSFLKDDSIDNKVLTRSDKARGKSDNVPSEEVVKKMKNYWRQLLNAKLITQRKFDNLTKAERGGLSELDKAGFIKRQLVETRQITKHVAQILDSRMNTKYDENDKLIREVKVITLKSKLVSDFRKDFQFYKVREINNYHHAHDAYLNAVVGTALIKKYPKLESEFVYGDYKVYDVRKMIAKSEQEIGKATAKYFFYSNIMNFFKTEITLANGEIRKRPLIETNGETGEIVWDKGRDFATVRKVLSMPQVNIVKKTEVQTGGFSKESILPKRNSDKLIARKKDWDPKKYGGFDSPTVAYSVLVVAKVEKGKSKKLKSVKELLGITIMERSSFEKNPIDFLEAKGYKEVKKDLIIKLPKYSLFELENGRKRMLASAGELQKGNELALPSKYVNFLYLASHYEKLKGSPEDNEQKQLFVEQHKHYLDEIIEQISEFSKRVILADANLDKVLSAYNKHRDKPIREQAENIIHLFTLTNLGAPAAFKYFDTTIDRKRYTSTKEVLDATLIHQSITGLYETRIDLSQLGGDGGEAAAKEAAAKEAAAKEAAAKEAAAKEAAAKGGVPWILKKPLELTIKLDLEEQQGTLLNNSILSKKGKEELKQLFEKYSALWQSWENQVGHRRIRPHKIATGTVKPTPQKQYHINPKAKPDIQIVINDLLKQGVLIQKESTMNTPVYPVPKPNGRWRMVLDYRAVNKVTPLIAVQNQHSYGILGSLFKGRYKTTIDLSNGFWAHPIVPEDYWITAFTWQGKQYCWTVLPQGFLNSPGLFNGDVVDLLQGIPNVEVYVDDVYISHDSEKEHLEYLDILFNRLKEAGYIISLKKSNIANSIVDFLGFQITNEGRGLTDTFKEKLENITAPTTLKQLQSILGLLNFARNFIPDFTELIAPLYALIPKSPKNYVPWQIEHSTTLETLITKLNGAEYLQGRKGDKTLIMKVNASYTTGYIRYYNEGEKKPISYVSIVFSKTELKFTELEKLLTTVHKGLLKALDLSMGQNIHVYSPIVSMQNIQKTPQTAKKALASRWLSWLSYLEDPRIRFFYDPQMPALKDLPAVDTGKDNKKHPSNFQHIFYTDGSAITSPTKEGHLNAGMGIVYFINKDGNLQKQQEWSISLGNHTAQFAEIAAFEFALKKCLPLGGNILVVTDSNYVAKAYNEELDVWASNGFVNNRKKPLKHISKWKSVADLKRLRPDVVVTHEPGHQKLDSSPHAYGNNLADQLATQASFKVHAGKRTADGSEFEKRTADGSEFESPKKKAKVE

SEQ ID NO: 1095 - protein, 2094 aa, synthetic construct
MPAAKRVKLDGGDKKYSIGLDIGTNSVGWAVITDEYKVPSKKFKVLGNTDRHSIKKNLIGALLFDSGETAEATRLKRTARRRYTRRKNRICYLQEIFSNEMAKVDDSFFHRLEESFLVEEDKKHERHPIFGNIVDEVAYHEKYPTIYHLRKKLVDSTDKADLRLIYLALAHMIKFRGHFLIEGDLNPDNSDVDKLFIQLVQTYNQLFEENPINASGVDAKAILSARLSKSRRLENLIAQLPGEKKNGLFGNLIALSLGLTPNFKSNFDLAEDAKLQLSKDTYDDDLDNLLAQIGDQYADLFLAAKNLSDAILLSDILRVNTEITKAPLSASMIKRYDEHHQDLTLLKALVRQQLPEKYKEIFFDQSKNGYAGYIDGGASQEEFYKFIKPILEKMDGTEELLVKLNREDLLRKQRTFDNGSIPHQIHLGELHAILRRQEDFYPFLKDNREKIEKILTFRIPYYVGPLARGNSRFAWMTRKSEETITPWNFEEVVDKGASAQSFIERMTNFDKNLPNEKVLPKHSLLYEYFTVYNELTKVKYVTEGMRKPAFLSGEQKKAIVDLLFKTNRKVTVKQLKEDYFKKIECFDSVEISGVEDRFNASLGTYHDLLKIIKDKDFLDNEENEDILEDIVLTLTLFEDREMIEERLKTYAHLFDDKVMKQLKRRRYTGWGRLSRKLINGIRDKQSGKTILDFLKSDGFANRNFMQLIHDDSLTFKEDIQKAQVSGQGDSLHEHIANLAGSPAIKKGILQTVKVVDELVKVMGRHKPENIVIEMARENQTTQKGQKNSRERMKRIEEGIKELGSQILKEHPVENTQLQNEKLYLYYLQNGRDMYVDQELDINRLSDYDVDHIVPQSFLKDDSIDNKVLTRSDKARGKSDNVPSEEVVKKMKNYWRQLLNAKLITQRKFDNLTKAERGGLSELDKAGFIKRQLVETRQITKHVAQILDSRMNTKYDENDKLIREVKVITLKSKLVSDFRKDFQFYKVREINNYHHAHDAYLNAVVGTALIKKYPKLESEFVYGDYKVYDVRKMIAKSEQEIGKATAKYFFYSNIMNFFKTEITLANGEIRKRPLIETNGETGEIVWDKGRDFATVRKVLSMPQVNIVKKTEVQTGGFSKESILPKRNSDKLIARKKDWDPKKYGGFDSPTVAYSVLVVAKVEKGKSKKLKSVKELLGITIMERSSFEKNPIDFLEAKGYKEVKKDLIIKLPKYSLFELENGRKRMLASAGELQKGNELALPSKYVNFLYLASHYEKLKGSPEDNEQKQLFVEQHKHYLDEIIEQISEFSKRVILADANLDKVLSAYNKHRDKPIREQAENIIHLFTLTNLGAPAAFKYFDTTIDRKRYTSTKEVLDATLIHQSITGLYETRIDLSQLGGDGGGSSGSSGSSGSSGSSGSSGGVPWILKKPLELTIKLDLEEQQGTLLNNSILSKKGKEELKQLFEKYSALWQSWENQVGHRRIRPHKIATGTVKPTPQKQYHINPKAKPDIQIVINDLLKQGVLIQKESTMNTPVYPVPKPNGRWRMVLDYRAVNKVTPLIAVQNQHSYGILGSLFKGRYKTTIDLSNGFWAHPIVPEDYWITAFTWQGKQYCWTVLPQGFLNSPGLFNGDVVDLLQGIPNVEVYVDDVYISHDSEKEHLEYLDILFNRLKEAGYIISLKKSNIANSIVDFLGFQITNEGRGLTDTFKEKLENITAPTTLKQLQSILGLLNFARNFIPDFTELIAPLYALIPKSPKNYVPWQIEHSTTLETLITKLNGAEYLQGRKGDKTLIMKVNASYTTGYIRYYNEGEKKPISYVSIVFSKTELKFTELEKLLTTVHKGLLKALDLSMGQNIHVYSPIVSMQNIQKTPQTAKKALASRWLSWLSYLEDPRIRFFYDPQMPALKDLPAVDTGKDNKKHPSNFQHIFYTDGSAITSPTKEGHLNAGMGIVYFINKDGNLQKQQEWSISLGNHTAQFAEIAAFEFALKKCLPLGGNILVVTDSNYVAKAYNEELDVWASNGFVNNRKKPLKHISKWKSVADLKRLRPDVVVTHEPGHQKLDSSPHAYGNNLADQLATQASFKVHAGKRTADGSEFEKRTADGSEFESPKKKAKVE

SEQ ID NO: 1096 - protein, 2087 aa, synthetic construct
MPAAKRVKLDGGDKKYSIGLDIGTNSVGWAVITDEYKVPSKKFKVLGNTDRHSIKKNLIGALLFDSGETAEATRLKRTARRRYTRRKNRICYLQEIFSNEMAKVDDSFFHRLEESFLVEEDKKHERHPIFGNIVDEVAYHEKYPTIYHLRKKLVDSTDKADLRLIYLALAHMIKFRGHFLIEGDLNPDNSDVDKLFIQLVQTYNQLFEENPINASGVDAKAILSARLSKSRRLENLIAQLPGEKKNGLFGNLIALSLGLTPNFKSNFDLAEDAKLQLSKDTYDDDLDNLLAQIGDQYADLFLAAKNLSDAILLSDILRVNTEITKAPLSASMIKRYDEHHQDLTLLKALVRQQLPEKYKEIFFDQSKNGYAGYIDGGASQEEFYKFIKPILEKMDGTEELLVKLNREDLLRKQRTFDNGSIPHQIHLGELHAILRRQEDFYPFLKDNREKIEKILTFRIPYYVGPLARGNSRFAWMTRKSEETITPWNFEEVVDKGASAQSFIERMTNFDKNLPNEKVLPKHSLLYEYFTVYNELTKVKYVTEGMRKPAFLSGEQKKAIVDLLFKTNRKVTVKQLKEDYFKKIECFDSVEISGVEDRFNASLGTYHDLLKIIKDKDFLDNEENEDILEDIVLTLTLFEDREMIEERLKTYAHLFDDKVMKQLKRRRYTGWGRLSRKLINGIRDKQSGKTILDFLKSDGFANRNFMQLIHDDSLTFKEDIQKAQVSGQGDSLHEHIANLAGSPAIKKGILQTVKVVDELVKVMGRHKPENIVIEMARENQTTQKGQKNSRERMKRIEEGIKELGSQILKEHPVENTQLQNEKLYLYYLQNGRDMYVDQELDINRLSDYDVDHIVPQSFLKDDSIDNKVLTRSDKARGKSDNVPSEEVVKKMKNYWRQLLNAKLITQRKFDNLTKAERGGLSELDKAGFIKRQLVETRQITKHVAQILDSRMNTKYDENDKLIREVKVITLKSKLVSDFRKDFQFYKVREINNYHHAHDAYLNAVVGTALIKKYPKLESEFVYGDYKVYDVRKMIAKSEQEIGKATAKYFFYSNIMNFFKTEITLANGEIRKRPLIETNGETGEIVWDKGRDFATVRKVLSMPQVNIVKKTEVQTGGFSKESILPKRNSDKLIARKKDWDPKKYGGFDSPTVAYSVLVVAKVEKGKSKKLKSVKELLGITIMERSSFEKNPIDFLEAKGYKEVKKDLIIKLPKYSLFELENGRKRMLASAGELQKGNELALPSKYVNFLYLASHYEKLKGSPEDNEQKQLFVEQHKHYLDEIIEQISEFSKRVILADANLDKVLSAYNKHRDKPIREQAENIIHLFTLTNLGAPAAFKYFDTTIDRKRYTSTKEVLDATLIHQSITGLYETRIDLSQLGGDGGPAPGGGEAAAKGGVPWILKKPLELTIKLDLEEQQGTLLNNSILSKKGKEELKQLFEKYSALWQSWENQVGHRRIRPHKIATGTVKPTPQKQYHINPKAKPDIQIVINDLLKQGVLIQKESTMNTPVYPVPKPNGRWRMVLDYRAVNKVTPLIAVQNQHSYGILGSLFKGRYKTTIDLSNGFWAHPIVPEDYWITAFTWQGKQYCWTVLPQGFLNSPGLFNGDVVDLLQGIPNVEVYVDDVYISHDSEKEHLEYLDILFNRLKEAGYIISLKKSNIANSIVDFLGFQITNEGRGLTDTFKEKLENITAPTTLKQLQSILGLLNFARNFIPDFTELIAPLYALIPKSPKNYVPWQIEHSTTLETLITKLNGAEYLQGRKGDKTLIMKVNASYTTGYIRYYNEGEKKPISYVSIVFSKTELKFTELEKLLTTVHKGLLKALDLSMGQNIHVYSPIVSMQNIQKTPQTAKKALASRWLSWLSYLEDPRIRFFYDPQMPALKDLPAVDTGKDNKKHPSNFQHIFYTDGSAITSPTKEGHLNAGMGIVYFINKDGNLQKQQEWSISLGNHTAQFAEIAAFEFALKKCLPLGGNILVVTDSNYVAKAYNEELDVWASNGFVNNRKKPLKHISKWKSVADLKRLRPDVVVTHEPGHQKLDSSPHAYGNNLADQLATQASFKVHAGKRTADGSEFEKRTADGSEFESPKKKAKVE

SEQ ID NO: 1097 - protein, 2087 aa, synthetic construct
MPAAKRVKLDGGDKKYSIGLDIGTNSVGWAVITDEYKVPSKKFKVLGNTDRHSIKKNLIGALLFDSGETAEATRLKRTARRRYTRRKNRICYLQEIFSNEMAKVDDSFFHRLEESFLVEEDKKHERHPIFGNIVDEVAYHEKYPTIYHLRKKLVDSTDKADLRLIYLALAHMIKFRGHFLIEGDLNPDNSDVDKLFIQLVQTYNQLFEENPINASGVDAKAILSARLSKSRRLENLIAQLPGEKKNGLFGNLIALSLGLTPNFKSNFDLAEDAKLQLSKDTYDDDLDNLLAQIGDQYADLFLAAKNLSDAILLSDILRVNTEITKAPLSASMIKRYDEHHQDLTLLKALVRQQLPEKYKEIFFDQSKNGYAGYIDGGASQEEFYKFIKPILEKMDGTEELLVKLNREDLLRKQRTFDNGSIPHQIHLGELHAILRRQEDFYPFLKDNREKIEKILTFRIPYYVGPLARGNSRFAWMTRKSEETITPWNFEEVVDKGASAQSFIERMTNFDKNLPNEKVLPKHSLLYEYFTVYNELTKVKYVTEGMRKPAFLSGEQKKAIVDLLFKTNRKVTVKQLKEDYFKKIECFDSVEISGVEDRFNASLGTYHDLLKIIKDKDFLDNEENEDILEDIVLTLTLFEDREMIEERLKTYAHLFDDKVMKQLKRRRYTGWGRLSRKLINGIRDKQSGKTILDFLKSDGFANRNFMQLIHDDSLTFKEDIQKAQVSGQGDSLHEHIANLAGSPAIKKGILQTVKVVDELVKVMGRHKPENIVIEMARENQTTQKGQKNSRERMKRIEEGIKELGSQILKEHPVENTQLQNEKLYLYYLQNGRDMYVDQELDINRLSDYDVDHIVPQSFLKDDSIDNKVLTRSDKARGKSDNVPSEEVVKKMKNYWRQLLNAKLITQRKFDNLTKAERGGLSELDKAGFIKRQLVETRQITKHVAQILDSRMNTKYDENDKLIREVKVITLKSKLVSDFRKDFQFYKVREINNYHHAHDAYLNAVVGTALIKKYPKLESEFVYGDYKVYDVRKMIAKSEQEIGKATAKYFFYSNIMNFFKTEITLANGEIRKRPLIETNGETGEIVWDKGRDFATVRKVLSMPQVNIVKKTEVQTGGFSKESILPKRNSDKLIARKKDWDPKKYGGFDSPTVAYSVLVVAKVEKGKSKKLKSVKELLGITIMERSSFEKNPIDFLEAKGYKEVKKDLIIKLPKYSLFELENGRKRMLASAGELQKGNELALPSKYVNFLYLASHYEKLKGSPEDNEQKQLFVEQHKHYLDEIIEQISEFSKRVILADANLDKVLSAYNKHRDKPIREQAENIIHLFTLTNLGAPAAFKYFDTTIDRKRYTSTKEVLDATLIHQSITGLYETRIDLSQLGGDGGGGSEAAAKPAPGGVPWILKKPLELTIKLDLEEQQGTLLNNSILSKKGKEELKQLFEKYSALWQSWENQVGHRRIRPHKIATGTVKPTPQKQYHINPKAKPDIQIVINDLLKQGVLIQKESTMNTPVYPVPKPNGRWRMVLDYRAVNKVTPLIAVQNQHSYGILGSLFKGRYKTTIDLSNGFWAHPIVPEDYWITAFTWQGKQYCWTVLPQGFLNSPGLFNGDVVDLLQGIPNVEVYVDDVYISHDSEKEHLEYLDILFNRLKEAGYIISLKKSNIANSIVDFLGFQITNEGRGLTDTFKEKLENITAPTTLKQLQSILGLLNFARNFIPDFTELIAPLYALIPKSPKNYVPWQIEHSTTLETLITKLNGAEYLQGRKGDKTLIMKVNASYTTGYIRYYNEGEKKPISYVSIVFSKTELKFTELEKLLTTVHKGLLKALDLSMGQNIHVYSPIVSMQNIQKTPQTAKKALASRWLSWLSYLEDPRIRFFYDPQMPALKDLPAVDTGKDNKKHPSNFQHIFYTDGSAITSPTKEGHLNAGMGIVYFINKDGNLQKQQEWSISLGNHTAQFAEIAAFEFALKKCLPLGGNILVVTDSNYVAKAYNEELDVWASNGFVNNRKKPLKHISKWKSVADLKRLRPDVVVTHEPGHQKLDSSPHAYGNNLADQLATQASFKVHAGKRTADGSEFEKRTADGSEFESPKKKAKVE

SEQ ID NO: 1098 - protein, 2085 aa, synthetic construct
MPAAKRVKLDGGDKKYSIGLDIGTNSVGWAVITDEYKVPSKKFKVLGNTDRHSIKKNLIGALLFDSGETAEATRLKRTARRRYTRRKNRICYLQEIFSNEMAKVDDSFFHRLEESFLVEEDKKHERHPIFGNIVDEVAYHEKYPTIYHLRKKLVDSTDKADLRLIYLALAHMIKFRGHFLIEGDLNPDNSDVDKLFIQLVQTYNQLFEENPINASGVDAKAILSARLSKSRRLENLIAQLPGEKKNGLFGNLIALSLGLTPNFKSNFDLAEDAKLQLSKDTYDDDLDNLLAQIGDQYADLFLAAKNLSDAILLSDILRVNTEITKAPLSASMIKRYDEHHQDLTLLKALVRQQLPEKYKEIFFDQSKNGYAGYIDGGASQEEFYKFIKPILEKMDGTEELLVKLNREDLLRKQRTFDNGSIPHQIHLGELHAILRRQEDFYPFLKDNREKIEKILTFRIPYYVGPLARGNSRFAWMTRKSEETITPWNFEEVVDKGASAQSFIERMTNFDKNLPNEKVLPKHSLLYEYFTVYNELTKVKYVTEGMRKPAFLSGEQKKAIVDLLFKTNRKVTVKQLKEDYFKKIECFDSVEISGVEDRFNASLGTYHDLLKIIKDKDFLDNEENEDILEDIVLTLTLFEDREMIEERLKTYAHLFDDKVMKQLKRRRYTGWGRLSRKLINGIRDKQSGKTILDFLKSDGFANRNFMQLIHDDSLTFKEDIQKAQVSGQGDSLHEHIANLAGSPAIKKGILQTVKVVDELVKVMGRHKPENIVIEMARENQTTQKGQKNSRERMKRIEEGIKELGSQILKEHPVENTQLQNEKLYLYYLQNGRDMYVDQELDINRLSDYDVDHIVPQSFLKDDSIDNKVLTRSDKARGKSDNVPSEEVVKKMKNYWRQLLNAKLITQRKFDNLTKAERGGLSELDKAGFIKRQLVETRQITKHVAQILDSRMNTKYDENDKLIREVKVITLKSKLVSDFRKDFQFYKVREINNYHHAHDAYLNAVVGTALIKKYPKLESEFVYGDYKVYDVRKMIAKSEQEIGKATAKYFFYSNIMNFFKTEITLANGEIRKRPLIETNGETGEIVWDKGRDFATVRKVLSMPQVNIVKKTEVQTGGFSKESILPKRNSDKLIARKKDWDPKKYGGFDSPTVAYSVLVVAKVEKGKSKKLKSVKELLGITIMERSSFEKNPIDFLEAKGYKEVKKDLIIKLPKYSLFELENGRKRMLASAGELQKGNELALPSKYVNFLYLASHYEKLKGSPEDNEQKQLFVEQHKHYLDEIIEQISEFSKRVILADANLDKVLSAYNKHRDKPIREQAENIIHLFTLTNLGAPAAFKYFDTTIDRKRYTSTKEVLDATLIHQSITGLYETRIDLSQLGGDGGPAPGGSGGGGGVPWILKKPLELTIKLDLEEQQGTLLNNSILSKKGKEELKQLFEKYSALWQSWENQVGHRRIRPHKIATGTVKPTPQKQYHINPKAKPDIQIVINDLLKQGVLIQKESTMNTPVYPVPKPNGRWRMVLDYRAVNKVTPLIAVQNQHSYGILGSLFKGRYKTTIDLSNGFWAHPIVPEDYWITAFTWQGKQYCWTVLPQGFLNSPGLFNGDVVDLLQGIPNVEVYVDDVYISHDSEKEHLEYLDILFNRLKEAGYIISLKKSNIANSIVDFLGFQITNEGRGLTDTFKEKLENITAPTTLKQLQSILGLLNFARNFIPDFTELIAPLYALIPKSPKNYVPWQIEHSTTLETLITKLNGAEYLQGRKGDKTLIMKVNASYTTGYIRYYNEGEKKPISYVSIVFSKTELKFTELEKLLTTVHKGLLKALDLSMGQNIHVYSPIVSMQNIQKTPQTAKKALASRWLSWLSYLEDPRIRFFYDPQMPALKDLPAVDTGKDNKKHPSNFQHIFYTDGSAITSPTKEGHLNAGMGIVYFINKDGNLQKQQEWSISLGNHTAQFAEIAAFEFALKKCLPLGGNILVVTDSNYVAKAYNEELDVWASNGFVNNRKKPLKHISKWKSVADLKRLRPDVVVTHEPGHQKLDSSPHAYGNNLADQLATQASFKVHAGKRTADGSEFEKRTADGSEFESPKKKAKVE

SEQ ID NO: 1099 - protein, 2087 aa, synthetic construct
MPAAKRVKLDGGDKKYSIGLDIGTNSVGWAVITDEYKVPSKKFKVLGNTDRHSIKKNLIGALLFDSGETAEATRLKRTARRRYTRRKNRICYLQEIFSNEMAKVDDSFFHRLEESFLVEEDKKHERHPIFGNIVDEVAYHEKYPTIYHLRKKLVDSTDKADLRLIYLALAHMIKFRGHFLIEGDLNPDNSDVDKLFIQLVQTYNQLFEENPINASGVDAKAILSARLSKSRRLENLIAQLPGEKKNGLFGNLIALSLGLTPNFKSNFDLAEDAKLQLSKDTYDDDLDNLLAQIGDQYADLFLAAKNLSDAILLSDILRVNTEITKAPLSASMIKRYDEHHQDLTLLKALVRQQLPEKYKEIFFDQSKNGYAGYIDGGASQEEFYKFIKPILEKMDGTEELLVKLNREDLLRKQRTFDNGSIPHQIHLGELHAILRRQEDFYPFLKDNREKIEKILTFRIPYYVGPLARGNSRFAWMTRKSEETITPWNFEEVVDKGASAQSFIERMTNFDKNLPNEKVLPKHSLLYEYFTVYNELTKVKYVTEGMRKPAFLSGEQKKAIVDLLFKTNRKVTVKQLKEDYFKKIECFDSVEISGVEDRFNASLGTYHDLLKIIKDKDFLDNEENEDILEDIVLTLTLFEDREMIEERLKTYAHLFDDKVMKQLKRRRYTGWGRLSRKLINGIRDKQSGKTILDFLKSDGFANRNFMQLIHDDSLTFKEDIQKAQVSGQGDSLHEHIANLAGSPAIKKGILQTVKVVDELVKVMGRHKPENIVIEMARENQTTQKGQKNSRERMKRIEEGIKELGSQILKEHPVENTQLQNEKLYLYYLQNGRDMYVDQELDINRLSDYDVDHIVPQSFLKDDSIDNKVLTRSDKARGKSDNVPSEEVVKKMKNYWRQLLNAKLITQRKFDNLTKAERGGLSELDKAGFIKRQLVETRQITKHVAQILDSRMNTKYDENDKLIREVKVITLKSKLVSDFRKDFQFYKVREINNYHHAHDAYLNAVVGTALIKKYPKLESEFVYGDYKVYDVRKMIAKSEQEIGKATAKYFFYSNIMNFFKTEITLANGEIRKRPLIETNGETGEIVWDKGRDFATVRKVLSMPQVNIVKKTEVQTGGFSKESILPKRNSDKLIARKKDWDPKKYGGFDSPTVAYSVLVVAKVEKGKSKKLKSVKELLGITIMERSSFEKNPIDFLEAKGYKEVKKDLIIKLPKYSLFELENGRKRMLASAGELQKGNELALPSKYVNFLYLASHYEKLKGSPEDNEQKQLFVEQHKHYLDEIIEQISEFSKRVILADANLDKVLSAYNKHRDKPIREQAENIIHLFTLTNLGAPAAFKYFDTTIDRKRYTSTKEVLDATLIHQSITGLYETRIDLSQLGGDGGGGSPAPEAAAKGGVPWILKKPLELTIKLDLEEQQGTLLNNSILSKKGKEELKQLFEKYSALWQSWENQVGHRRIRPHKIATGTVKPTPQKQYHINPKAKPDIQIVINDLLKQGVLIQKESTMNTPVYPVPKPNGRWRMVLDYRAVNKVTPLIAVQNQHSYGILGSLFKGRYKTTIDLSNGFWAHPIVPEDYWITAFTWQGKQYCWTVLPQGFLNSPGLFNGDVVDLLQGIPNVEVYVDDVYISHDSEKEHLEYLDILFNRLKEAGYIISLKKSNIANSIVDFLGFQITNEGRGLTDTFKEKLENITAPTTLKQLQSILGLLNFARNFIPDFTELIAPLYALIPKSPKNYVPWQIEHSTTLETLITKLNGAEYLQGRKGDKTLIMKVNASYTTGYIRYYNEGEKKPISYVSIVFSKTELKFTELEKLLTTVHKGLLKALDLSMGQNIHVYSPIVSMQNIQKTPQTAKKALASRWLSWLSYLEDPRIRFFYDPQMPALKDLPAVDTGKDNKKHPSNFQHIFYTDGSAITSPTKEGHLNAGMGIVYFINKDGNLQKQQEWSISLGNHTAQFAEIAAFEFALKKCLPLGGNILVVTDSNYVAKAYNEELDVWASNGFVNNRKKPLKHISKWKSVADLKRLRPDVVVTHEPGHQKLDSSPHAYGNNLADQLATQASFKVHAGKRTADGSEFEKRTADGSEFESPKKKAKVE

SEQ ID NO: 1100 - protein, 2087 aa, synthetic construct
MPAAKRVKLDGGDKKYSIGLDIGTNSVGWAVITDEYKVPSKKFKVLGNTDRHSIKKNLIGALLFDSGETAEATRLKRTARRRYTRRKNRICYLQEIFSNEMAKVDDSFFHRLEESFLVEEDKKHERHPIFGNIVDEVAYHEKYPTIYHLRKKLVDSTDKADLRLIYLALAHMIKFRGHFLIEGDLNPDNSDVDKLFIQLVQTYNQLFEENPINASGVDAKAILSARLSKSRRLENLIAQLPGEKKNGLFGNLIALSLGLTPNFKSNFDLAEDAKLQLSKDTYDDDLDNLLAQIGDQYADLFLAAKNLSDAILLSDILRVNTEITKAPLSASMIKRYDEHHQDLTLLKALVRQQLPEKYKEIFFDQSKNGYAGYIDGGASQEEFYKFIKPILEKMDGTEELLVKLNREDLLRKQRTFDNGSIPHQIHLGELHAILRRQEDFYPFLKDNREKIEKILTFRIPYYVGPLARGNSRFAWMTRKSEETITPWNFEEVVDKGASAQSFIERMTNFDKNLPNEKVLPKHSLLYEYFTVYNELTKVKYVTEGMRKPAFLSGEQKKAIVDLLFKTNRKVTVKQLKEDYFKKIECFDSVEISGVEDRFNASLGTYHDLLKIIKDKDFLDNEENEDILEDIVLTLTLFEDREMIEERLKTYAHLFDDKVMKQLKRRRYTGWGRLSRKLINGIRDKQSGKTILDFLKSDGFANRNFMQLIHDDSLTFKEDIQKAQVSGQGDSLHEHIANLAGSPAIKKGILQTVKVVDELVKVMGRHKPENIVIEMARENQTTQKGQKNSRERMKRIEEGIKELGSQILKEHPVENTQLQNEKLYLYYLQNGRDMYVDQELDINRLSDYDVDHIVPQSFLKDDSIDNKVLTRSDKARGKSDNVPSEEVVKKMKNYWRQLLNAKLITQRKFDNLTKAERGGLSELDKAGFIKRQLVETRQITKHVAQILDSRMNTKYDENDKLIREVKVITLKSKLVSDFRKDFQFYKVREINNYHHAHDAYLNAVVGTALIKKYPKLESEFVYGDYKVYDVRKMIAKSEQEIGKATAKYFFYSNIMNFFKTEITLANGEIRKRPLIETNGETGEIVWDKGRDFATVRKVLSMPQVNIVKKTEVQTGGFSKESILPKRNSDKLIARKKDWDPKKYGGFDSPTVAYSVLVVAKVEKGKSKKLKSVKELLGITIMERSSFEKNPIDFLEAKGYKEVKKDLIIKLPKYSLFELENGRKRMLASAGELQKGNELALPSKYVNFLYLASHYEKLKGSPEDNEQKQLFVEQHKHYLDEIIEQISEFSKRVILADANLDKVLSAYNKHRDKPIREQAENIIHLFTLTNLGAPAAFKYFDTTIDRKRYTSTKEVLDATLIHQSITGLYETRIDLSQLGGDGGGSSEAAAKGGGGGVPWILKKPLELTIKLDLEEQQGTLLNNSILSKKGKEELKQLFEKYSALWQSWENQVGHRRIRPHKIATGTVKPTPQKQYHINPKAKPDIQIVINDLLKQGVLIQKESTMNTPVYPVPKPNGRWRMVLDYRAVNKVTPLIAVQNQHSYGILGSLFKGRYKTTIDLSNGFWAHPIVPEDYWITAFTWQGKQYCWTVLPQGFLNSPGLFNGDVVDLLQGIPNVEVYVDDVYISHDSEKEHLEYLDILFNRLKEAGYIISLKKSNIANSIVDFLGFQITNEGRGLTDTFKEKLENITAPTTLKQLQSILGLLNFARNFIPDFTELIAPLYALIPKSPKNYVPWQIEHSTTLETLITKLNGAEYLQGRKGDKTLIMKVNASYTTGYIRYYNEGEKKPISYVSIVFSKTELKFTELEKLLTTVHKGLLKALDLSMGQNIHVYSPIVSMQNIQKTPQTAKKALASRWLSWLSYLEDPRIRFFYDPQMPALKDLPAVDTGKDNKKHPSNFQHIFYTDGSAITSPTKEGHLNAGMGIVYFINKDGNLQKQQEWSISLGNHTAQFAEIAAFEFALKKCLPLGGNILVVTDSNYVAKAYNEELDVWASNGFVNNRKKPLKHISKWKSVADLKRLRPDVVVTHEPGHQKLDSSPHAYGNNLADQLATQASFKVHAGKRTADGSEFEKRTADGSEFESPKKKAKVE

SEQ ID NO: 1101 - protein, 2091 aa, synthetic construct
MPAAKRVKLDGGDKKYSIGLDIGTNSVGWAVITDEYKVPSKKFKVLGNTDRHSIKKNLIGALLFDSGETAEATRLKRTARRRYTRRKNRICYLQEIFSNEMAKVDDSFFHRLEESFLVEEDKKHERHPIFGNIVDEVAYHEKYPTIYHLRKKLVDSTDKADLRLIYLALAHMIKFRGHFLIEGDLNPDNSDVDKLFIQLVQTYNQLFEENPINASGVDAKAILSARLSKSRRLENLIAQLPGEKKNGLFGNLIALSLGLTPNFKSNFDLAEDAKLQLSKDTYDDDLDNLLAQIGDQYADLFLAAKNLSDAILLSDILRVNTEITKAPLSASMIKRYDEHHQDLTLLKALVRQQLPEKYKEIFFDQSKNGYAGYIDGGASQEEFYKFIKPILEKMDGTEELLVKLNREDLLRKQRTFDNGSIPHQIHLGELHAILRRQEDFYPFLKDNREKIEKILTFRIPYYVGPLARGNSRFAWMTRKSEETITPWNFEEVVDKGASAQSFIERMTNFDKNLPNEKVLPKHSLLYEYFTVYNELTKVKYVTEGMRKPAFLSGEQKKAIVDLLFKTNRKVTVKQLKEDYFKKIECFDSVEISGVEDRFNASLGTYHDLLKIIKDKDFLDNEENEDILEDIVLTLTLFEDREMIEERLKTYAHLFDDKVMKQLKRRRYTGWGRLSRKLINGIRDKQSGKTILDFLKSDGFANRNFMQLIHDDSLTFKEDIQKAQVSGQGDSLHEHIANLAGSPAIKKGILQTVKVVDELVKVMGRHKPENIVIEMARENQTTQKGQKNSRERMKRIEEGIKELGSQILKEHPVENTQLQNEKLYLYYLQNGRDMYVDQELDINRLSDYDVDHIVPQSFLKDDSIDNKVLTRSDKARGKSDNVPSEEVVKKMKNYWRQLLNAKLITQRKFDNLTKAERGGLSELDKAGFIKRQLVETRQITKHVAQILDSRMNTKYDENDKLIREVKVITLKSKLVSDFRKDFQFYKVREINNYHHAHDAYLNAVVGTALIKKYPKLESEFVYGDYKVYDVRKMIAKSEQEIGKATAKYFFYSNIMNFFKTEITLANGEIRKRPLIETNGETGEIVWDKGRDFATVRKVLSMPQVNIVKKTEVQTGGFSKESILPKRNSDKLIARKKDWDPKKYGGFDSPTVAYSVLVVAKVEKGKSKKLKSVKELLGITIMERSSFEKNPIDFLEAKGYKEVKKDLIIKLPKYSLFELENGRKRMLASAGELQKGNELALPSKYVNFLYLASHYEKLKGSPEDNEQKQLFVEQHKHYLDEIIEQISEFSKRVILADANLDKVLSAYNKHRDKPIREQAENIIHLFTLTNLGAPAAFKYFDTTIDRKRYTSTKEVLDATLIHQSITGLYETRIDLSQLGGDGGGSSGSSGSSGSSGSSGGVPWILKKPLELTIKLDLEEQQGTLLNNSILSKKGKEELKQLFEKYSALWQSWENQVGHRRIRPHKIATGTVKPTPQKQYHINPKAKPDIQIVINDLLKQGVLIQKESTMNTPVYPVPKPNGRWRMVLDYRAVNKVTPLIAVQNQHSYGILGSLFKGRYKTTIDLSNGFWAHPIVPEDYWITAFTWQGKQYCWTVLPQGFLNSPGLFNGDVVDLLQGIPNVEVYVDDVYISHDSEKEHLEYLDILFNRLKEAGYIISLKKSNIANSIVDFLGFQITNEGRGLTDTFKEKLENITAPTTLKQLQSILGLLNFARNFIPDFTELIAPLYALIPKSPKNYVPWQIEHSTTLETLITKLNGAEYLQGRKGDKTLIMKVNASYTTGYIRYYNEGEKKPISYVSIVFSKTELKFTELEKLLTTVHKGLLKALDLSMGQNIHVYSPIVSMQNIQKTPQTAKKALASRWLSWLSYLEDPRIRFFYDPQMPALKDLPAVDTGKDNKKHPSNFQHIFYTDGSAITSPTKEGHLNAGMGIVYFINKDGNLQKQQEWSISLGNHTAQFAEIAAFEFALKKCLPLGGNILVVTDSNYVAKAYNEELDVWASNGFVNNRKKPLKHISKWKSVADLKRLRPDVVVTHEPGHQKLDSSPHAYGNNLADQLATQASFKVHAGKRTADGSEFEKRTADGSEFESPKKKAKVE

SEQ ID NO: 1102 - protein, 2081 aa, synthetic construct
MPAAKRVKLDGGDKKYSIGLDIGTNSVGWAVITDEYKVPSKKFKVLGNTDRHSIKKNLIGALLFDSGETAEATRLKRTARRRYTRRKNRICYLQEIFSNEMAKVDDSFFHRLEESFLVEEDKKHERHPIFGNIVDEVAYHEKYPTIYHLRKKLVDSTDKADLRLIYLALAHMIKFRGHFLIEGDLNPDNSDVDKLFIQLVQTYNQLFEENPINASGVDAKAILSARLSKSRRLENLIAQLPGEKKNGLFGNLIALSLGLTPNFKSNFDLAEDAKLQLSKDTYDDDLDNLLAQIGDQYADLFLAAKNLSDAILLSDILRVNTEITKAPLSASMIKRYDEHHQDLTLLKALVRQQLPEKYKEIFFDQSKNGYAGYIDGGASQEEFYKFIKPILEKMDGTEELLVKLNREDLLRKQRTFDNGSIPHQIHLGELHAILRRQEDFYPFLKDNREKIEKILTFRIPYYVGPLARGNSRFAWMTRKSEETITPWNFEEVVDKGASAQSFIERMTNFDKNLPNEKVLPKHSLLYEYFTVYNELTKVKYVTEGMRKPAFLSGEQKKAIVDLLFKTNRKVTVKQLKEDYFKKIECFDSVEISGVEDRFNASLGTYHDLLKIIKDKDFLDNEENEDILEDIVLTLTLFEDREMIEERLKTYAHLFDDKVMKQLKRRRYTGWGRLSRKLINGIRDKQSGKTILDFLKSDGFANRNFMQLIHDDSLTFKEDIQKAQVSGQGDSLHEHIANLAGSPAIKKGILQTVKVVDELVKVMGRHKPENIVIEMARENQTTQKGQKNSRERMKRIEEGIKELGSQILKEHPVENTQLQNEKLYLYYLQNGRDMYVDQELDINRLSDYDVDHIVPQSFLKDDSIDNKVLTRSDKARGKSDNVPSEEVVKKMKNYWRQLLNAKLITQRKFDNLTKAERGGLSELDKAGFIKRQLVETRQITKHVAQILDSRMNTKYDENDKLIREVKVITLKSKLVSDFRKDFQFYKVREINNYHHAHDAYLNAVVGTALIKKYPKLESEFVYGDYKVYDVRKMIAKSEQEIGKATAKYFFYSNIMNFFKTEITLANGEIRKRPLIETNGETGEIVWDKGRDFATVRKVLSMPQVNIVKKTEVQTGGFSKESILPKRNSDKLIARKKDWDPKKYGGFDSPTVAYSVLVVAKVEKGKSKKLKSVKELLGITIMERSSFEKNPIDFLEAKGYKEVKKDLIIKLPKYSLFELENGRKRMLASAGELQKGNELALPSKYVNFLYLASHYEKLKGSPEDNEQKQLFVEQHKHYLDEIIEQISEFSKRVILADANLDKVLSAYNKHRDKPIREQAENIIHLFTLTNLGAPAAFKYFDTTIDRKRYTSTKEVLDATLIHQSITGLYETRIDLSQLGGDGGPAPAPGGVPWILKKPLELTIKLDLEEQQGTLLNNSILSKKGKEELKQLFEKYSALWQSWENQVGHRRIRPHKIATGTVKPTPQKQYHINPKAKPDIQIVINDLLKQGVLIQKESTMNTPVYPVPKPNGRWRMVLDYRAVNKVTPLIAVQNQHSYGILGSLFKGRYKTTIDLSNGFWAHPIVPEDYWITAFTWQGKQYCWTVLPQGFLNSPGLFNGDVVDLLQGIPNVEVYVDDVYISHDSEKEHLEYLDILFNRLKEAGYIISLKKSNIANSIVDFLGFQITNEGRGLTDTFKEKLENITAPTTLKQLQSILGLLNFARNFIPDFTELIAPLYALIPKSPKNYVPWQIEHSTTLETLITKLNGAEYLQGRKGDKTLIMKVNASYTTGYIRYYNEGEKKPISYVSIVFSKTELKFTELEKLLTTVHKGLLKALDLSMGQNIHVYSPIVSMQNIQKTPQTAKKALASRWLSWLSYLEDPRIRFFYDPQMPALKDLPAVDTGKDNKKHPSNFQHIFYTDGSAITSPTKEGHLNAGMGIVYFINKDGNLQKQQEWSISLGNHTAQFAEIAAFEFALKKCLPLGGNILVVTDSNYVAKAYNEELDVWASNGFVNNRKKPLKHISKWKSVADLKRLRPDVVVTHEPGHQKLDSSPHAYGNNLADQLATQASFKVHAGKRTADGSEFEKRTADGSEFESPKKKAKVE

SEQ ID NO: 1103 - protein, 2085 aa, synthetic construct
MPAAKRVKLDGGDKKYSIGLDIGTNSVGWAVITDEYKVPSKKFKVLGNTDRHSIKKNLIGALLFDSGETAEATRLKRTARRRYTRRKNRICYLQEIFSNEMAKVDDSFFHRLEESFLVEEDKKHERHPIFGNIVDEVAYHEKYPTIYHLRKKLVDSTDKADLRLIYLALAHMIKFRGHFLIEGDLNPDNSDVDKLFIQLVQTYNQLFEENPINASGVDAKAILSARLSKSRRLENLIAQLPGEKKNGLFGNLIALSLGLTPNFKSNFDLAEDAKLQLSKDTYDDDLDNLLAQIGDQYADLFLAAKNLSDAILLSDILRVNTEITKAPLSASMIKRYDEHHQDLTLLKALVRQQLPEKYKEIFFDQSKNGYAGYIDGGASQEEFYKFIKPILEKMDGTEELLVKLNREDLLRKQRTFDNGSIPHQIHLGELHAILRRQEDFYPFLKDNREKIEKILTFRIPYYVGPLARGNSRFAWMTRKSEETITPWNFEEVVDKGASAQSFIERMTNFDKNLPNEKVLPKHSLLYEYFTVYNELTKVKYVTEGMRKPAFLSGEQKKAIVDLLFKTNRKVTVKQLKEDYFKKIECFDSVEISGVEDRFNASLGTYHDLLKIIKDKDFLDNEENEDILEDIVLTLTLFEDREMIEERLKTYAHLFDDKVMKQLKRRRYTGWGRLSRKLINGIRDKQSGKTILDFLKSDGFANRNFMQLIHDDSLTFKEDIQKAQVSGQGDSLHEHIANLAGSPAIKKGILQTVKVVDELVKVMGRHKPENIVIEMARENQTTQKGQKNSRERMKRIEEGIKELGSQILKEHPVENTQLQNEKLYLYYLQNGRDMYVDQELDINRLSDYDVDHIVPQSFLKDDSIDNKVLTRSDKARGKSDNVPSEEVVKKMKNYWRQLLNAKLITQRKFDNLTKAERGGLSELDKAGFIKRQLVETRQITKHVAQILDSRMNTKYDENDKLIREVKVITLKSKLVSDFRKDFQFYKVREINNYHHAHDAYLNAVVGTALIKKYPKLESEFVYGDYKVYDVRKMIAKSEQEIGKATAKYFFYSNIMNFFKTEITLANGEIRKRPLIETNGETGEIVWDKGRDFATVRKVLSMPQVNIVKKTEVQTGGFSKESILPKRNSDKLIARKKDWDPKKYGGFDSPTVAYSVLVVAKVEKGKSKKLKSVKELLGITIMERSSFEKNPIDFLEAKGYKEVKKDLIIKLPKYSLFELENGRKRMLASAGELQKGNELALPSKYVNFLYLASHYEKLKGSPEDNEQKQLFVEQHKHYLDEIIEQISEFSKRVILADANLDKVLSAYNKHRDKPIREQAENIIHLFTLTNLGAPAAFKYFDTTIDRKRYTSTKEVLDATLIHQSITGLYETRIDLSQLGGDGGGSSGSSGSSGGVPWILKKPLELTIKLDLEEQQGTLLNNSILSKKGKEELKQLFEKYSALWQSWENQVGHRRIRPHKIATGTVKPTPQKQYHINPKAKPDIQIVINDLLKQGVLIQKESTMNTPVYPVPKPNGRWRMVLDYRAVNKVTPLIAVQNQHSYGILGSLFKGRYKTTIDLSNGFWAHPIVPEDYWITAFTWQGKQYCWTVLPQGFLNSPGLFNGDVVDLLQGIPNVEVYVDDVYISHDSEKEHLEYLDILFNRLKEAGYIISLKKSNIANSIVDFLGFQITNEGRGLTDTFKEKLENITAPTTLKQLQSILGLLNFARNFIPDFTELIAPLYALIPKSPKNYVPWQIEHSTTLETLITKLNGAEYLQGRKGDKTLIMKVNASYTTGYIRYYNEGEKKPISYVSIVFSKTELKFTELEKLLTTVHKGLLKALDLSMGQNIHVYSPIVSMQNIQKTPQTAKKALASRWLSWLSYLEDPRIRFFYDPQMPALKDLPAVDTGKDNKKHPSNFQHIFYTDGSAITSPTKEGHLNAGMGIVYFINKDGNLQKQQEWSISLGNHTAQFAEIAAFEFALKKCLPLGGNILVVTDSNYVAKAYNEELDVWASNGFVNNRKKPLKHISKWKSVADLKRLRPDVVVTHEPGHQKLDSSPHAYGNNLADQLATQASFKVHAGKRTADGSEFEKRTADGSEFESPKKKAKVE

SEQ ID NO: 1104 - protein, 2087 aa, synthetic construct
MPAAKRVKLDGGDKKYSIGLDIGTNSVGWAVITDEYKVPSKKFKVLGNTDRHSIKKNLIGALLFDSGETAEATRLKRTARRRYTRRKNRICYLQEIFSNEMAKVDDSFFHRLEESFLVEEDKKHERHPIFGNIVDEVAYHEKYPTIYHLRKKLVDSTDKADLRLIYLALAHMIKFRGHFLIEGDLNPDNSDVDKLFIQLVQTYNQLFEENPINASGVDAKAILSARLSKSRRLENLIAQLPGEKKNGLFGNLIALSLGLTPNFKSNFDLAEDAKLQLSKDTYDDDLDNLLAQIGDQYADLFLAAKNLSDAILLSDILRVNTEITKAPLSASMIKRYDEHHQDLTLLKALVRQQLPEKYKEIFFDQSKNGYAGYIDGGASQEEFYKFIKPILEKMDGTEELLVKLNREDLLRKQRTFDNGSIPHQIHLGELHAILRRQEDFYPFLKDNREKIEKILTFRIPYYVGPLARGNSRFAWMTRKSEETITPWNFEEVVDKGASAQSFIERMTNFDKNLPNEKVLPKHSLLYEYFTVYNELTKVKYVTEGMRKPAFLSGEQKKAIVDLLFKTNRKVTVKQLKEDYFKKIECFDSVEISGVEDRFNASLGTYHDLLKIIKDKDFLDNEENEDILEDIVLTLTLFEDREMIEERLKTYAHLFDDKVMKQLKRRRYTGWGRLSRKLINGIRDKQSGKTILDFLKSDGFANRNFMQLIHDDSLTFKEDIQKAQVSGQGDSLHEHIANLAGSPAIKKGILQTVKVVDELVKVMGRHKPENIVIEMARENQTTQKGQKNSRERMKRIEEGIKELGSQILKEHPVENTQLQNEKLYLYYLQNGRDMYVDQELDINRLSDYDVDHIVPQSFLKDDSIDNKVLTRSDKARGKSDNVPSEEVVKKMKNYWRQLLNAKLITQRKFDNLTKAERGGLSELDKAGFIKRQLVETRQITKHVAQILDSRMNTKYDENDKLIREVKVITLKSKLVSDFRKDFQFYKVREINNYHHAHDAYLNAVVGTALIKKYPKLESEFVYGDYKVYDVRKMIAKSEQEIGKATAKYFFYSNIMNFFKTEITLANGEIRKRPLIETNGETGEIVWDKGRDFATVRKVLSMPQVNIVKKTEVQTGGFSKESILPKRNSDKLIARKKDWDPKKYGGFDSPTVAYSVLVVAKVEKGKSKKLKSVKELLGITIMERSSFEKNPIDFLEAKGYKEVKKDLIIKLPKYSLFELENGRKRMLASAGELQKGNELALPSKYVNFLYLASHYEKLKGSPEDNEQKQLFVEQHKHYLDEIIEQISEFSKRVILADANLDKVLSAYNKHRDKPIREQAENIIHLFTLTNLGAPAAFKYFDTTIDRKRYTSTKEVLDATLIHQSITGLYETRIDLSQLGGDGGPAPGSSEAAAKGGVPWILKKPLELTIKLDLEEQQGTLLNNSILSKKGKEELKQLFEKYSALWQSWENQVGHRRIRPHKIATGTVKPTPQKQYHINPKAKPDIQIVINDLLKQGVLIQKESTMNTPVYPVPKPNGRWRMVLDYRAVNKVTPLIAVQNQHSYGILGSLFKGRYKTTIDLSNGFWAHPIVPEDYWITAFTWQGKQYCWTVLPQGFLNSPGLFNGDVVDLLQGIPNVEVYVDDVYISHDSEKEHLEYLDILFNRLKEAGYIISLKKSNIANSIVDFLGFQITNEGRGLTDTFKEKLENITAPTTLKQLQSILGLLNFARNFIPDFTELIAPLYALIPKSPKNYVPWQIEHSTTLETLITKLNGAEYLQGRKGDKTLIMKVNASYTTGYIRYYNEGEKKPISYVSIVFSKTELKFTELEKLLTTVHKGLLKALDLSMGQNIHVYSPIVSMQNIQKTPQTAKKALASRWLSWLSYLEDPRIRFFYDPQMPALKDLPAVDTGKDNKKHPSNFQHIFYTDGSAITSPTKEGHLNAGMGIVYFINKDGNLQKQQEWSISLGNHTAQFAEIAAFEFALKKCLPLGGNILVVTDSNYVAKAYNEELDVWASNGFVNNRKKPLKHISKWKSVADLKRLRPDVVVTHEPGHQKLDSSPHAYGNNLADQLATQASFKVHAGKRTADGSEFEKRTADGSEFESPKKKAKVE

SEQ ID NO: 1105 - protein, 2087 aa, synthetic construct
MPAAKRVKLDGGDKKYSIGLDIGTNSVGWAVITDEYKVPSKKFKVLGNTDRHSIKKNLIGALLFDSGETAEATRLKRTARRRYTRRKNRICYLQEIFSNEMAKVDDSFFHRLEESFLVEEDKKHERHPIFGNIVDEVAYHEKYPTIYHLRKKLVDSTDKADLRLIYLALAHMIKFRGHFLIEGDLNPDNSDVDKLFIQLVQTYNQLFEENPINASGVDAKAILSARLSKSRRLENLIAQLPGEKKNGLFGNLIALSLGLTPNFKSNFDLAEDAKLQLSKDTYDDDLDNLLAQIGDQYADLFLAAKNLSDAILLSDILRVNTEITKAPLSASMIKRYDEHHQDLTLLKALVRQQLPEKYKEIFFDQSKNGYAGYIDGGASQEEFYKFIKPILEKMDGTEELLVKLNREDLLRKQRTFDNGSIPHQIHLGELHAILRRQEDFYPFLKDNREKIEKILTFRIPYYVGPLARGNSRFAWMTRKSEETITPWNFEEVVDKGASAQSFIERMTNFDKNLPNEKVLPKHSLLYEYFTVYNELTKVKYVTEGMRKPAFLSGEQKKAIVDLLFKTNRKVTVKQLKEDYFKKIECFDSVEISGVEDRFNASLGTYHDLLKIIKDKDFLDNEENEDILEDIVLTLTLFEDREMIEERLKTYAHLFDDKVMKQLKRRRYTGWGRLSRKLINGIRDKQSGKTILDFLKSDGFANRNFMQLIHDDSLTFKEDIQKAQVSGQGDSLHEHIANLAGSPAIKKGILQTVKVVDELVKVMGRHKPENIVIEMARENQTTQKGQKNSRERMKRIEEGIKELGSQILKEHPVENTQLQNEKLYLYYLQNGRDMYVDQELDINRLSDYDVDHIVPQSFLKDDSIDNKVLTRSDKARGKSDNVPSEEVVKKMKNYWRQLLNAKLITQRKFDNLTKAERGGLSELDKAGFIKRQLVETRQITKHVAQILDSRMNTKYDENDKLIREVKVITLKSKLVSDFRKDFQFYKVREINNYHHAHDAYLNAVVGTALIKKYPKLESEFVYGDYKVYDVRKMIAKSEQEIGKATAKYFFYSNIMNFFKTEITLANGEIRKRPLIETNGETGEIVWDKGRDFATVRKVLSMPQVNIVKKTEVQTGGFSKESILPKRNSDKLIARKKDWDPKKYGGFDSPTVAYSVLVVAKVEKGKSKKLKSVKELLGITIMERSSFEKNPIDFLEAKGYKEVKKDLIIKLPKYSLFELENGRKRMLASAGELQKGNELALPSKYVNFLYLASHYEKLKGSPEDNEQKQLFVEQHKHYLDEIIEQISEFSKRVILADANLDKVLSAYNKHRDKPIREQAENIIHLFTLTNLGAPAAFKYFDTTIDRKRYTSTKEVLDATLIHQSITGLYETRIDLSQLGGDGGEAAAKPAPGGGGGVPWILKKPLELTIKLDLEEQQGTLLNNSILSKKGKEELKQLFEKYSALWQSWENQVGHRRIRPHKIATGTVKPTPQKQYHINPKAKPDIQIVINDLLKQGVLIQKESTMNTPVYPVPKPNGRWRMVLDYRAVNKVTPLIAVQNQHSYGILGSLFKGRYKTTIDLSNGFWAHPIVPEDYWITAFTWQGKQYCWTVLPQGFLNSPGLFNGDVVDLLQGIPNVEVYVDDVYISHDSEKEHLEYLDILFNRLKEAGYIISLKKSNIANSIVDFLGFQITNEGRGLTDTFKEKLENITAPTTLKQLQSILGLLNFARNFIPDFTELIAPLYALIPKSPKNYVPWQIEHSTTLETLITKLNGAEYLQGRKGDKTLIMKVNASYTTGYIRYYNEGEKKPISYVSIVFSKTELKFTELEKLLTTVHKGLLKALDLSMGQNIHVYSPIVSMQNIQKTPQTAKKALASRWLSWLSYLEDPRIRFFYDPQMPALKDLPAVDTGKDNKKHPSNFQHIFYTDGSAITSPTKEGHLNAGMGIVYFINKDGNLQKQQEWSISLGNHTAQFAEIAAFEFALKKCLPLGGNILVVTDSNYVAKAYNEELDVWASNGFVNNRKKPLKHISKWKSVADLKRLRPDVVVTHEPGHQKLDSSPHAYGNNLADQLATQASFKVHAGKRTADGSEFEKRTADGSEFESPKKKAKVE

SEQ ID NO: 1106 - protein, 2087 aa, synthetic construct
MPAAKRVKLDGGDKKYSIGLDIGTNSVGWAVITDEYKVPSKKFKVLGNTDRHSIKKNLIGALLFDSGETAEATRLKRTARRRYTRRKNRICYLQEIFSNEMAKVDDSFFHRLEESFLVEEDKKHERHPIFGNIVDEVAYHEKYPTIYHLRKKLVDSTDKADLRLIYLALAHMIKFRGHFLIEGDLNPDNSDVDKLFIQLVQTYNQLFEENPINASGVDAKAILSARLSKSRRLENLIAQLPGEKKNGLFGNLIALSLGLTPNFKSNFDLAEDAKLQLSKDTYDDDLDNLLAQIGDQYADLFLAAKNLSDAILLSDILRVNTEITKAPLSASMIKRYDEHHQDLTLLKALVRQQLPEKYKEIFFDQSKNGYAGYIDGGASQEEFYKFIKPILEKMDGTEELLVKLNREDLLRKQRTFDNGSIPHQIHLGELHAILRRQEDFYPFLKDNREKIEKILTFRIPYYVGPLARGNSRFAWMTRKSEETITPWNFEEVVDKGASAQSFIERMTNFDKNLPNEKVLPKHSLLYEYFTVYNELTKVKYVTEGMRKPAFLSGEQKKAIVDLLFKTNRKVTVKQLKEDYFKKIECFDSVEISGVEDRFNASLGTYHDLLKIIKDKDFLDNEENEDILEDIVLTLTLFEDREMIEERLKTYAHLFDDKVMKQLKRRRYTGWGRLSRKLINGIRDKQSGKTILDFLKSDGFANRNFMQLIHDDSLTFKEDIQKAQVSGQGDSLHEHIANLAGSPAIKKGILQTVKVVDELVKVMGRHKPENIVIEMARENQTTQKGQKNSRERMKRIEEGIKELGSQILKEHPVENTQLQNEKLYLYYLQNGRDMYVDQELDINRLSDYDVDHIVPQSFLKDDSIDNKVLTRSDKARGKSDNVPSEEVVKKMKNYWRQLLNAKLITQRKFDNLTKAERGGLSELDKAGFIKRQLVETRQITKHVAQILDSRMNTKYDENDKLIREVKVITLKSKLVSDFRKDFQFYKVREINNYHHAHDAYLNAVVGTALIKKYPKLESEFVYGDYKVYDVRKMIAKSEQEIGKATAKYFFYSNIMNFFKTEITLANGEIRKRPLIETNGETGEIVWDKGRDFATVRKVLSMPQVNIVKKTEVQTGGFSKESILPKRNSDKLIARKKDWDPKKYGGFDSPTVAYSVLVVAKVEKGKSKKLKSVKELLGITIMERSSFEKNPIDFLEAKGYKEVKKDLIIKLPKYSLFELENGRKRMLASAGELQKGNELALPSKYVNFLYLASHYEKLKGSPEDNEQKQLFVEQHKHYLDEIIEQISEFSKRVILADANLDKVLSAYNKHRDKPIREQAENIIHLFTLTNLGAPAAFKYFDTTIDRKRYTSTKEVLDATLIHQSITGLYETRIDLSQLGGDGGGGSGGGEAAAKGGVPWILKKPLELTIKLDLEEQQGTLLNNSILSKKGKEELKQLFEKYSALWQSWENQVGHRRIRPHKIATGTVKPTPQKQYHINPKAKPDIQIVINDLLKQGVLIQKESTMNTPVYPVPKPNGRWRMVLDYRAVNKVTPLIAVQNQHSYGILGSLFKGRYKTTIDLSNGFWAHPIVPEDYWITAFTWQGKQYCWTVLPQGFLNSPGLFNGDVVDLLQGIPNVEVYVDDVYISHDSEKEHLEYLDILFNRLKEAGYIISLKKSNIANSIVDFLGFQITNEGRGLTDTFKEKLENITAPTTLKQLQSILGLLNFARNFIPDFTELIAPLYALIPKSPKNYVPWQIEHSTTLETLITKLNGAEYLQGRKGDKTLIMKVNASYTTGYIRYYNEGEKKPISYVSIVFSKTELKFTELEKLLTTVHKGLLKALDLSMGQNIHVYSPIVSMQNIQKTPQTAKKALASRWLSWLSYLEDPRIRFFYDPQMPALKDLPAVDTGKDNKKHPSNFQHIFYTDGSAITSPTKEGHLNAGMGIVYFINKDGNLQKQQEWSISLGNHTAQFAEIAAFEFALKKCLPLGGNILVVTDSNYVAKAYNEELDVWASNGFVNNRKKPLKHISKWKSVADLKRLRPDVVVTHEPGHQKLDSSPHAYGNNLADQLATQASFKVHAGKRTADGSEFEKRTADGSEFESPKKKAKVE

SEQ ID NO: 1107 - protein, 2082 aa, synthetic construct
MPAAKRVKLDGGDKKYSIGLDIGTNSVGWAVITDEYKVPSKKFKVLGNTDRHSIKKNLIGALLFDSGETAEATRLKRTARRRYTRRKNRICYLQEIFSNEMAKVDDSFFHRLEESFLVEEDKKHERHPIFGNIVDEVAYHEKYPTIYHLRKKLVDSTDKADLRLIYLALAHMIKFRGHFLIEGDLNPDNSDVDKLFIQLVQTYNQLFEENPINASGVDAKAILSARLSKSRRLENLIAQLPGEKKNGLFGNLIALSLGLTPNFKSNFDLAEDAKLQLSKDTYDDDLDNLLAQIGDQYADLFLAAKNLSDAILLSDILRVNTEITKAPLSASMIKRYDEHHQDLTLLKALVRQQLPEKYKEIFFDQSKNGYAGYIDGGASQEEFYKFIKPILEKMDGTEELLVKLNREDLLRKQRTFDNGSIPHQIHLGELHAILRRQEDFYPFLKDNREKIEKILTFRIPYYVGPLARGNSRFAWMTRKSEETITPWNFEEVVDKGASAQSFIERMTNFDKNLPNEKVLPKHSLLYEYFTVYNELTKVKYVTEGMRKPAFLSGEQKKAIVDLLFKTNRKVTVKQLKEDYFKKIECFDSVEISGVEDRFNASLGTYHDLLKIIKDKDFLDNEENEDILEDIVLTLTLFEDREMIEERLKTYAHLFDDKVMKQLKRRRYTGWGRLSRKLINGIRDKQSGKTILDFLKSDGFANRNFMQLIHDDSLTFKEDIQKAQVSGQGDSLHEHIANLAGSPAIKKGILQTVKVVDELVKVMGRHKPENIVIEMARENQTTQKGQKNSRERMKRIEEGIKELGSQILKEHPVENTQLQNEKLYLYYLQNGRDMYVDQELDINRLSDYDVDHIVPQSFLKDDSIDNKVLTRSDKARGKSDNVPSEEVVKKMKNYWRQLLNAKLITQRKFDNLTKAERGGLSELDKAGFIKRQLVETRQITKHVAQILDSRMNTKYDENDKLIREVKVITLKSKLVSDFRKDFQFYKVREINNYHHAHDAYLNAVVGTALIKKYPKLESEFVYGDYKVYDVRKMIAKSEQEIGKATAKYFFYSNIMNFFKTEITLANGEIRKRPLIETNGETGEIVWDKGRDFATVRKVLSMPQVNIVKKTEVQTGGFSKESILPKRNSDKLIARKKDWDPKKYGGFDSPTVAYSVLVVAKVEKGKSKKLKSVKELLGITIMERSSFEKNPIDFLEAKGYKEVKKDLIIKLPKYSLFELENGRKRMLASAGELQKGNELALPSKYVNFLYLASHYEKLKGSPEDNEQKQLFVEQHKHYLDEIIEQISEFSKRVILADANLDKVLSAYNKHRDKPIREQAENIIHLFTLTNLGAPAAFKYFDTTIDRKRYTSTKEVLDATLIHQSITGLYETRIDLSQLGGDGGPAPGGSGGVPWILKKPLELTIKLDLEEQQGTLLNNSILSKKGKEELKQLFEKYSALWQSWENQVGHRRIRPHKIATGTVKPTPQKQYHINPKAKPDIQIVINDLLKQGVLIQKESTMNTPVYPVPKPNGRWRMVLDYRAVNKVTPLIAVQNQHSYGILGSLFKGRYKTTIDLSNGFWAHPIVPEDYWITAFTWQGKQYCWTVLPQGFLNSPGLFNGDVVDLLQGIPNVEVYVDDVYISHDSEKEHLEYLDILFNRLKEAGYIISLKKSNIANSIVDFLGFQITNEGRGLTDTFKEKLENITAPTTLKQLQSILGLLNFARNFIPDFTELIAPLYALIPKSPKNYVPWQIEHSTTLETLITKLNGAEYLQGRKGDKTLIMKVNASYTTGYIRYYNEGEKKPISYVSIVFSKTELKFTELEKLLTTVHKGLLKALDLSMGQNIHVYSPIVSMQNIQKTPQTAKKALASRWLSWLSYLEDPRIRFFYDPQMPALKDLPAVDTGKDNKKHPSNFQHIFYTDGSAITSPTKEGHLNAGMGIVYFINKDGNLQKQQEWSISLGNHTAQFAEIAAFEFALKKCLPLGGNILVVTDSNYVAKAYNEELDVWASNGFVNNRKKPLKHISKWKSVADLKRLRPDVVVTHEPGHQKLDSSPHAYGNNLADQLATQASFKVHAGKRTADGSEFEKRTADGSEFESPKKKAKVE

SEQ ID NO: 1108 - protein, 2084 aa, synthetic construct
MPAAKRVKLDGGDKKYSIGLDIGTNSVGWAVITDEYKVPSKKFKVLGNTDRHSIKKNLIGALLFDSGETAEATRLKRTARRRYTRRKNRICYLQEIFSNEMAKVDDSFFHRLEESFLVEEDKKHERHPIFGNIVDEVAYHEKYPTIYHLRKKLVDSTDKADLRLIYLALAHMIKFRGHFLIEGDLNPDNSDVDKLFIQLVQTYNQLFEENPINASGVDAKAILSARLSKSRRLENLIAQLPGEKKNGLFGNLIALSLGLTPNFKSNFDLAEDAKLQLSKDTYDDDLDNLLAQIGDQYADLFLAAKNLSDAILLSDILRVNTEITKAPLSASMIKRYDEHHQDLTLLKALVRQQLPEKYKEIFFDQSKNGYAGYIDGGASQEEFYKFIKPILEKMDGTEELLVKLNREDLLRKQRTFDNGSIPHQIHLGELHAILRRQEDFYPFLKDNREKIEKILTFRIPYYVGPLARGNSRFAWMTRKSEETITPWNFEEVVDKGASAQSFIERMTNFDKNLPNEKVLPKHSLLYEYFTVYNELTKVKYVTEGMRKPAFLSGEQKKAIVDLLFKTNRKVTVKQLKEDYFKKIECFDSVEISGVEDRFNASLGTYHDLLKIIKDKDFLDNEENEDILEDIVLTLTLFEDREMIEERLKTYAHLFDDKVMKQLKRRRYTGWGRLSRKLINGIRDKQSGKTILDFLKSDGFANRNFMQLIHDDSLTFKEDIQKAQVSGQGDSLHEHIANLAGSPAIKKGILQTVKVVDELVKVMGRHKPENIVIEMARENQTTQKGQKNSRERMKRIEEGIKELGSQILKEHPVENTQLQNEKLYLYYLQNGRDMYVDQELDINRLSDYDVDHIVPQSFLKDDSIDNKVLTRSDKARGKSDNVPSEEVVKKMKNYWRQLLNAKLITQRKFDNLTKAERGGLSELDKAGFIKRQLVETRQITKHVAQILDSRMNTKYDENDKLIREVKVITLKSKLVSDFRKDFQFYKVREINNYHHAHDAYLNAVVGTALIKKYPKLESEFVYGDYKVYDVRKMIAKSEQEIGKATAKYFFYSNIMNFFKTEITLANGEIRKRPLIETNGETGEIVWDKGRDFATVRKVLSMPQVNIVKKTEVQTGGFSKESILPKRNSDKLIARKKDWDPKKYGGFDSPTVAYSVLVVAKVEKGKSKKLKSVKELLGITIMERSSFEKNPIDFLEAKGYKEVKKDLIIKLPKYSLFELENGRKRMLASAGELQKGNELALPSKYVNFLYLASHYEKLKGSPEDNEQKQLFVEQHKHYLDEIIEQISEFSKRVILADANLDKVLSAYNKHRDKPIREQAENIIHLFTLTNLGAPAAFKYFDTTIDRKRYTSTKEVLDATLIHQSITGLYETRIDLSQLGGDGGGGGEAAAKGGVPWILKKPLELTIKLDLEEQQGTLLNNSILSKKGKEELKQLFEKYSALWQSWENQVGHRRIRPHKIATGTVKPTPQKQYHINPKAKPDIQIVINDLLKQGVLIQKESTMNTPVYPVPKPNGRWRMVLDYRAVNKVTPLIAVQNQHSYGILGSLFKGRYKTTIDLSNGFWAHPIVPEDYWITAFTWQGKQYCWTVLPQGFLNSPGLFNGDVVDLLQGIPNVEVYVDDVYISHDSEKEHLEYLDILFNRLKEAGYIISLKKSNIANSIVDFLGFQITNEGRGLTDTFKEKLENITAPTTLKQLQSILGLLNFARNFIPDFTELIAPLYALIPKSPKNYVPWQIEHSTTLETLITKLNGAEYLQGRKGDKTLIMKVNASYTTGYIRYYNEGEKKPISYVSIVFSKTELKFTELEKLLTTVHKGLLKALDLSMGQNIHVYSPIVSMQNIQKTPQTAKKALASRWLSWLSYLEDPRIRFFYDPQMPALKDLPAVDTGKDNKKHPSNFQHIFYTDGSAITSPTKEGHLNAGMGIVYFINKDGNLQKQQEWSISLGNHTAQFAEIAAFEFALKKCLPLGGNILVVTDSNYVAKAYNEELDVWASNGFVNNRKKPLKHISKWKSVADLKRLRPDVVVTHEPGHQKLDSSPHAYGNNLADQLATQASFKVHAGKRTADGSEFEKRTADGSEFESPKKKAKVE

SEQ ID NO: 1109 - protein, 2085 aa, synthetic construct
MPAAKRVKLDGGDKKYSIGLDIGTNSVGWAVITDEYKVPSKKFKVLGNTDRHSIKKNLIGALLFDSGETAEATRLKRTARRRYTRRKNRICYLQEIFSNEMAKVDDSFFHRLEESFLVEEDKKHERHPIFGNIVDEVAYHEKYPTIYHLRKKLVDSTDKADLRLIYLALAHMIKFRGHFLIEGDLNPDNSDVDKLFIQLVQTYNQLFEENPINASGVDAKAILSARLSKSRRLENLIAQLPGEKKNGLFGNLIALSLGLTPNFKSNFDLAEDAKLQLSKDTYDDDLDNLLAQIGDQYADLFLAAKNLSDAILLSDILRVNTEITKAPLSASMIKRYDEHHQDLTLLKALVRQQLPEKYKEIFFDQSKNGYAGYIDGGASQEEFYKFIKPILEKMDGTEELLVKLNREDLLRKQRTFDNGSIPHQIHLGELHAILRRQEDFYPFLKDNREKIEKILTFRIPYYVGPLARGNSRFAWMTRKSEETITPWNFEEVVDKGASAQSFIERMTNFDKNLPNEKVLPKHSLLYEYFTVYNELTKVKYVTEGMRKPAFLSGEQKKAIVDLLFKTNRKVTVKQLKEDYFKKIECFDSVEISGVEDRFNASLGTYHDLLKIIKDKDFLDNEENEDILEDIVLTLTLFEDREMIEERLKTYAHLFDDKVMKQLKRRRYTGWGRLSRKLINGIRDKQSGKTILDFLKSDGFANRNFMQLIHDDSLTFKEDIQKAQVSGQGDSLHEHIANLAGSPAIKKGILQTVKVVDELVKVMGRHKPENIVIEMARENQTTQKGQKNSRERMKRIEEGIKELGSQILKEHPVENTQLQNEKLYLYYLQNGRDMYVDQELDINRLSDYDVDHIVPQSFLKDDSIDNKVLTRSDKARGKSDNVPSEEVVKKMKNYWRQLLNAKLITQRKFDNLTKAERGGLSELDKAGFIKRQLVETRQITKHVAQILDSRMNTKYDENDKLIREVKVITLKSKLVSDFRKDFQFYKVREINNYHHAHDAYLNAVVGTALIKKYPKLESEFVYGDYKVYDVRKMIAKSEQEIGKATAKYFFYSNIMNFFKTEITLANGEIRKRPLIETNGETGEIVWDKGRDFATVRKVLSMPQVNIVKKTEVQTGGFSKESILPKRNSDKLIARKKDWDPKKYGGFDSPTVAYSVLVVAKVEKGKSKKLKSVKELLGITIMERSSFEKNPIDFLEAKGYKEVKKDLIIKLPKYSLFELENGRKRMLASAGELQKGNELALPSKYVNFLYLASHYEKLKGSPEDNEQKQLFVEQHKHYLDEIIEQISEFSKRVILADANLDKVLSAYNKHRDKPIREQAENIIHLFTLTNLGAPAAFKYFDTTIDRKRYTSTKEVLDATLIHQSITGLYETRIDLSQLGGDGGGGGGSSPAPGGVPWILKKPLELTIKLDLEEQQGTLLNNSILSKKGKEELKQLFEKYSALWQSWENQVGHRRIRPHKIATGTVKPTPQKQYHINPKAKPDIQIVINDLLKQGVLIQKESTMNTPVYPVPKPNGRWRMVLDYRAVNKVTPLIAVQNQHSYGILGSLFKGRYKTTIDLSNGFWAHPIVPEDYWITAFTWQGKQYCWTVLPQGFLNSPGLFNGDVVDLLQGIPNVEVYVDDVYISHDSEKEHLEYLDILFNRLKEAGYIISLKKSNIANSIVDFLGFQITNEGRGLTDTFKEKLENITAPTTLKQLQSILGLLNFARNFIPDFTELIAPLYALIPKSPKNYVPWQIEHSTTLETLITKLNGAEYLQGRKGDKTLIMKVNASYTTGYIRYYNEGEKKPISYVSIVFSKTELKFTELEKLLTTVHKGLLKALDLSMGQNIHVYSPIVSMQNIQKTPQTAKKALASRWLSWLSYLEDPRIRFFYDPQMPALKDLPAVDTGKDNKKHPSNFQHIFYTDGSAITSPTKEGHLNAGMGIVYFINKDGNLQKQQEWSISLGNHTAQFAEIAAFEFALKKCLPLGGNILVVTDSNYVAKAYNEELDVWASNGFVNNRKKPLKHISKWKSVADLKRLRPDVVVTHEPGHQKLDSSPHAYGNNLADQLATQASFKVHAGKRTADGSEFEKRTADGSEFESPKKKAKVE

SEQ ID NO: 1110 - protein, 2085 aa, synthetic construct
MPAAKRVKLDGGDKKYSIGLDIGTNSVGWAVITDEYKVPSKKFKVLGNTDRHSIKKNLIGALLFDSGETAEATRLKRTARRRYTRRKNRICYLQEIFSNEMAKVDDSFFHRLEESFLVEEDKKHERHPIFGNIVDEVAYHEKYPTIYHLRKKLVDSTDKADLRLIYLALAHMIKFRGHFLIEGDLNPDNSDVDKLFIQLVQTYNQLFEENPINASGVDAKAILSARLSKSRRLENLIAQLPGEKKNGLFGNLIALSLGLTPNFKSNFDLAEDAKLQLSKDTYDDDLDNLLAQIGDQYADLFLAAKNLSDAILLSDILRVNTEITKAPLSASMIKRYDEHHQDLTLLKALVRQQLPEKYKEIFFDQSKNGYAGYIDGGASQEEFYKFIKPILEKMDGTEELLVKLNREDLLRKQRTFDNGSIPHQIHLGELHAILRRQEDFYPFLKDNREKIEKILTFRIPYYVGPLARGNSRFAWMTRKSEETITPWNFEEVVDKGASAQSFIERMTNFDKNLPNEKVLPKHSLLYEYFTVYNELTKVKYVTEGMRKPAFLSGEQKKAIVDLLFKTNRKVTVKQLKEDYFKKIECFDSVEISGVEDRFNASLGTYHDLLKIIKDKDFLDNEENEDILEDIVLTLTLFEDREMIEERLKTYAHLFDDKVMKQLKRRRYTGWGRLSRKLINGIRDKQSGKTILDFLKSDGFANRNFMQLIHDDSLTFKEDIQKAQVSGQGDSLHEHIANLAGSPAIKKGILQTVKVVDELVKVMGRHKPENIVIEMARENQTTQKGQKNSRERMKRIEEGIKELGSQILKEHPVENTQLQNEKLYLYYLQNGRDMYVDQELDINRLSDYDVDHIVPQSFLKDDSIDNKVLTRSDKARGKSDNVPSEEVVKKMKNYWRQLLNAKLITQRKFDNLTKAERGGLSELDKAGFIKRQLVETRQITKHVAQILDSRMNTKYDENDKLIREVKVITLKSKLVSDFRKDFQFYKVREINNYHHAHDAYLNAVVGTALIKKYPKLESEFVYGDYKVYDVRKMIAKSEQEIGKATAKYFFYSNIMNFFKTEITLANGEIRKRPLIETNGETGEIVWDKGRDFATVRKVLSMPQVNIVKKTEVQTGGFSKESILPKRNSDKLIARKKDWDPKKYGGFDSPTVAYSVLVVAKVEKGKSKKLKSVKELLGITIMERSSFEKNPIDFLEAKGYKEVKKDLIIKLPKYSLFELENGRKRMLASAGELQKGNELALPSKYVNFLYLASHYEKLKGSPEDNEQKQLFVEQHKHYLDEIIEQISEFSKRVILADANLDKVLSAYNKHRDKPIREQAENIIHLFTLTNLGAPAAFKYFDTTIDRKRYTSTKEVLDATLIHQSITGLYETRIDLSQLGGDGGPAPGGSGSSGGVPWILKKPLELTIKLDLEEQQGTLLNNSILSKKGKEELKQLFEKYSALWQSWENQVGHRRIRPHKIATGTVKPTPQKQYHINPKAKPDIQIVINDLLKQGVLIQKESTMNTPVYPVPKPNGRWRMVLDYRAVNKVTPLIAVQNQHSYGILGSLFKGRYKTTIDLSNGFWAHPIVPEDYWITAFTWQGKQYCWTVLPQGFLNSPGLFNGDVVDLLQGIPNVEVYVDDVYISHDSEKEHLEYLDILFNRLKEAGYIISLKKSNIANSIVDFLGFQITNEGRGLTDTFKEKLENITAPTTLKQLQSILGKLNFARNFIPDFTELIAPLYALIPKSPKNYVPWQIEHSTTLETLITKLNGAEYLQGRKGDKTLIMKVNASYTTGYIRYYNEGEKKPISYVSIVFSKTELKFTELEKLLTTVHKGLLKALDLSMGQNIHVYSPIVSMQNIQKTPQTAKKALASRWLSWLSYLEDPRIRFFYDPQMPALKDLPAVDTGKDNKKHPSNFQHIFYTDGSAITSPTKEGHLNAGMGIVYFINKDGNLQKQQEWSISLGNHTAQFAEIAAFEFALKKCLPLGGNILVVTDSNYVAKAYNEELDVWASNGFVNNRKKPLKHISKWKSVADLKRLRPDVVVTHEPGHQKLDSSPHAYGNNLADQLATQASFKVHAGKRTADGSEFEKRTADGSEFESPKKKAKVE

SEQ ID NO: 1111 - protein, 2087 aa, synthetic construct
MPAAKRVKLDGGDKKYSIGLDIGTNSVGWAVITDEYKVPSKKFKVLGNTDRHSIKKNLIGALLFDSGETAEATRLKRTARRRYTRRKNRICYLQEIFSNEMAKVDDSFFHRLEESFLVEEDKKHERHPIFGNIVDEVAYHEKYPTIYHLRKKLVDSTDKADLRLIYLALAHMIKFRGHFLIEGDLNPDNSDVDKLFIQLVQTYNQLFEENPINASGVDAKAILSARLSKSRRLENLIAQLPGEKKNGLFGNLIALSLGLTPNFKSNFDLAEDAKLQLSKDTYDDDLDNLLAQIGDQYADLFLAAKNLSDAILLSDILRVNTEITKAPLSASMIKRYDEHHQDLTLLKALVRQQLPEKYKEIFFDQSKNGYAGYIDGGASQEEFYKFIKPILEKMDGTEELLVKLNREDLLRKQRTFDNGSIPHQIHLGELHAILRRQEDFYPFLKDNREKIEKILTFRIPYYVGPLARGNSRFAWMTRKSEETITPWNFEEVVDKGASAQSFIERMTNFDKNLPNEKVLPKHSLLYEYFTVYNELTKVKYVTEGMRKPAFLSGEQKKAIVDLLFKTNRKVTVKQLKEDYFKKIECFDSVEISGVEDRFNASLGTYHDLLKIIKDKDFLDNEENEDILEDIVLTLTLFEDREMIEERLKTYAHLFDDKVMKQLKRRRYTGWGRLSRKLINGIRDKQSGKTILDFLKSDGFANRNFMQLIHDDSLTFKEDIQKAQVSGQGDSLHEHIANLAGSPAIKKGILQTVKVVDELVKVMGRHKPENIVIEMARENQTTQKGQKNSRERMKRIEEGIKELGSQILKEHPVENTQLQNEKLYLYYLQNGRDMYVDQELDINRLSDYDVDHIVPQSFLKDDSIDNKVLTRSDKARGKSDNVPSEEVVKKMKNYWRQLLNAKLITQRKFDNLTKAERGGLSELDKAGFIKRQLVETRQITKHVAQILDSRMNTKYDENDKLIREVKVITLKSKLVSDFRKDFQFYKVREINNYHHAHDAYLNAVVGTALIKKYPKLESEFVYGDYKVYDVRKMIAKSEQEIGKATAKYFFYSNIMNFFKTEITLANGEIRKRPLIETNGETGEIVWDKGRDFATVRKVLSMPQVNIVKKTEVQTGGFSKESILPKRNSDKLIARKKDWDPKKYGGFDSPTVAYSVLVVAKVEKGKSKKLKSVKELLGITIMERSSFEKNPIDFLEAKGYKEVKKDLIIKLPKYSLFELENGRKRMLASAGELQKGNELALPSKYVNFLYLASHYEKLKGSPEDNEQKQLFVEQHKHYLDEIIEQISEFSKRVILADANLDKVLSAYNKHRDKPIREQAENIIHLFTLTNLGAPAAFKYFDTTIDRKRYTSTKEVLDATLIHQSITGLYETRIDLSQLGGDGGGSSEAAAKGGGGGVPWILKKPLELTIKLDLEEQQGTLLNNSILSKKGKEELKQLFEKYSALWQSWENQVGHRRIRPHKIATGTVKPTPQKQYHINPKAKPDIQIVINDLLKQGVLIQKESTMNTPVYPVPKPNGRWRMVLDYRAVNKVTPLIAVQNQHSYGILGSLFKGRYKTTIDLSNGFWAHPIVPEDYWITAFTWQGKQYCWTVLPQGFLNSPGLFNGDVVDLLQGIPNVEVYVDDVYISHDSEKEHLEYLDILFNRLKEAGYIISLKKSNIANSIVDFLGFQITNEGRGLTDTFKEKLENITAPTTLKQLQSILGKLNFARNFIPDFTELIAPLYALIPKSPKNYVPWQIEHSTTLETLITKLNGAEYLQGRKGDKTLIMKVNASYTTGYIRYYNEGEKKPISYVSIVFSKTELKFTELEKLLTTVHKGLLKALDLSMGQNIHVYSPIVSMQNIQKTPQTAKKALASRWLSWLSYLEDPRIRFFYDPQMPALKDLPAVDTGKDNKKHPSNFQHIFYTDGSAITSPTKEGHLNAGMGIVYFINKDGNLQKQQEWSISLGNHTAQFAEIAAFEFALKKCLPLGGNILVVTDSNYVAKAYNEELDVWASNGFVNNRKKPLKHISKWKSVADLKRLRPDVVVTHEPGHQKLDSSPHAYGNNLADQLATQASFKVHAGKRTADGSEFEKRTADGSEFESPKKKAKVE

SEQ ID NO: 1112 - protein, 2091 aa, synthetic construct
MPAAKRVKLDGGDKKYSIGLDIGTNSVGWAVITDEYKVPSKKFKVLGNTDRHSIKKNLIGALLFDSGETAEATRLKRTARRRYTRRKNRICYLQEIFSNEMAKVDDSFFHRLEESFLVEEDKKHERHPIFGNIVDEVAYHEKYPTIYHLRKKLVDSTDKADLRLIYLALAHMIKFRGHFLIEGDLNPDNSDVDKLFIQLVQTYNQLFEENPINASGVDAKAILSARLSKSRRLENLIAQLPGEKKNGLFGNLIALSLGLTPNFKSNFDLAEDAKLQLSKDTYDDDLDNLLAQIGDQYADLFLAAKNLSDAILLSDILRVNTEITKAPLSASMIKRYDEHHQDLTLLKALVRQQLPEKYKEIFFDQSKNGYAGYIDGGASQEEFYKFIKPILEKMDGTEELLVKLNREDLLRKQRTFDNGSIPHQIHLGELHAILRRQEDFYPFLKDNREKIEKILTFRIPYYVGPLARGNSRFAWMTRKSEETITPWNFEEVVDKGASAQSFIERMTNFDKNLPNEKVLPKHSLLYEYFTVYNELTKVKYVTEGMRKPAFLSGEQKKAIVDLLFKTNRKVTVKQLKEDYFKKIECFDSVEISGVEDRFNASLGTYHDLLKIIKDKDFLDNEENEDILEDIVLTLTLFEDREMIEERLKTYAHLFDDKVMKQLKRRRYTGWGRLSRKLINGIRDKQSGKTILDFLKSDGFANRNFMQLIHDDSLTFKEDIQKAQVSGQGDSLHEHIANLAGSPAIKKGILQTVKVVDELVKVMGRHKPENIVIEMARENQTTQKGQKNSRERMKRIEEGIKELGSQILKEHPVENTQLQNEKLYLYYLQNGRDMYVDQELDINRLSDYDVDHIVPQSFLKDDSIDNKVLTRSDKARGKSDNVPSEEVVKKMKNYWRQLLNAKLITQRKFDNLTKAERGGLSELDKAGFIKRQLVETRQITKHVAQILDSRMNTKYDENDKLIREVKVITLKSKLVSDFRKDFQFYKVREINNYHHAHDAYLNAVVGTALIKKYPKLESEFVYGDYKVYDVRKMIAKSEQEIGKATAKYFFYSNIMNFFKTEITLANGEIRKRPLIETNGETGEIVWDKGRDFATVRKVLSMPQVNIVKKTEVQTGGFSKESILPKRNSDKLIARKKDWDPKKYGGFDSPTVAYSVLVVAKVEKGKSKKLKSVKELLGITIMERSSFEKNPIDFLEAKGYKEVKKDLIIKLPKYSLFELENGRKRMLASAGELQKGNELALPSKYVNFLYLASHYEKLKGSPEDNEQKQLFVEQHKHYLDEIIEQISEFSKRVILADANLDKVLSAYNKHRDKPIREQAENIIHLFTLTNLGAPAAFKYFDTTIDRKRYTSTKEVLDATLIHQSITGLYETRIDLSQLGGDGGGSSGSSGSSGSSGSSGGVPWILKKPLELTIKLDLEEQQGTLLNNSILSKKGKEELKQLFEKYSALWQSWENQVGHRRIRPHKIATGTVKPTPQKQYHINPKAKPDIQIVINDLLKQGVLIQKESTMNTPVYPVPKPNGRWRMVLDYRAVNKVTPLIAVQNQHSYGILGSLFKGRYKTTIDLSNGFWAHPIVPEDYWITAFTWQGKQYCWTVLPQGFLNSPGLFNGDVVDLLQGIPNVEVYVDDVYISHDSEKEHLEYLDILFNRLKEAGYIISLKKSNIANSIVDFLGFQITNEGRGLTDTFKEKLENITAPTTLKQLQSILGKLNFARNFIPDFTELIAPLYALIPKSPKNYVPWQIEHSTTLETLITKLNGAEYLQGRKGDKTLIMKVNASYTTGYIRYYNEGEKKPISYVSIVFSKTELKFTELEKLLTTVHKGLLKALDLSMGQNIHVYSPIVSMQNIQKTPQTAKKALASRWLSWLSYLEDPRIRFFYDPQMPALKDLPAVDTGKDNKKHPSNFQHIFYTDGSAITSPTKEGHLNAGMGIVYFINKDGNLQKQQEWSISLGNHTAQFAEIAAFEFALKKCLPLGGNILVVTDSNYVAKAYNEELDVWASNGFVNNRKKPLKHISKWKSVADLKRLRPDVVVTHEPGHQKLDSSPHAYGNNLADQLATQASFKVHAGKRTADGSEFEKRTADGSEFESPKKKAKVE

SEQ ID NO: 1113 - protein, 2087 aa, synthetic construct
MPAAKRVKLDGGDKKYSIGLDIGTNSVGWAVITDEYKVPSKKFKVLGNTDRHSIKKNLIGALLFDSGETAEATRLKRTARRRYTRRKNRICYLQEIFSNEMAKVDDSFFHRLEESFLVEEDKKHERHPIFGNIVDEVAYHEKYPTIYHLRKKLVDSTDKADLRLIYLALAHMIKFRGHFLIEGDLNPDNSDVDKLFIQLVQTYNQLFEENPINASGVDAKAILSARLSKSRRLENLIAQLPGEKKNGLFGNLIALSLGLTPNFKSNFDLAEDAKLQLSKDTYDDDLDNLLAQIGDQYADLFLAAKNLSDAILLSDILRVNTEITKAPLSASMIKRYDEHHQDLTLLKALVRQQLPEKYKEIFFDQSKNGYAGYIDGGASQEEFYKFIKPILEKMDGTEELLVKLNREDLLRKQRTFDNGSIPHQIHLGELHAILRRQEDFYPFLKDNREKIEKILTFRIPYYVGPLARGNSRFAWMTRKSEETITPWNFEEVVDKGASAQSFIERMTNFDKNLPNEKVLPKHSLLYEYFTVYNELTKVKYVTEGMRKPAFLSGEQKKAIVDLLFKTNRKVTVKQLKEDYFKKIECFDSVEISGVEDRFNASLGTYHDLLKIIKDKDFLDNEENEDILEDIVLTLTLFEDREMIEERLKTYAHLFDDKVMKQLKRRRYTGWGRLSRKLINGIRDKQSGKTILDFLKSDGFANRNFMQLIHDDSLTFKEDIQKAQVSGQGDSLHEHIANLAGSPAIKKGILQTVKVVDELVKVMGRHKPENIVIEMARENQTTQKGQKNSRERMKRIEEGIKELGSQILKEHPVENTQLQNEKLYLYYLQNGRDMYVDQELDINRLSDYDVDHIVPQSFLKDDSIDNKVLTRSDKARGKSDNVPSEEVVKKMKNYWRQLLNAKLITQRKFDNLTKAERGGLSELDKAGFIKRQLVETRQITKHVAQILDSRMNTKYDENDKLIREVKVITLKSKLVSDFRKDFQFYKVREINNYHHAHDAYLNAVVGTALIKKYPKLESEFVYGDYKVYDVRKMIAKSEQEIGKATAKYFFYSNIMNFFKTEITLANGEIRKRPLIETNGETGEIVWDKGRDFATVRKVLSMPQVNIVKKTEVQTGGFSKESILPKRNSDKLIARKKDWDPKKYGGFDSPTVAYSVLVVAKVEKGKSKKLKSVKELLGITIMERSSFEKNPIDFLEAKGYKEVKKDLIIKLPKYSLFELENGRKRMLASAGELQKGNELALPSKYVNFLYLASHYEKLKGSPEDNEQKQLFVEQHKHYLDEIIEQISEFSKRVILADANLDKVLSAYNKHRDKPIREQAENIIHLFTLTNLGAPAAFKYFDTTIDRKRYTSTKEVLDATLIHQSITGLYETRIDLSQLGGDGGGGSEAAAKGGGGGVPWILKKPLELTIKLDLEEQQGTLLNNSILSKKGKEELKQLFEKYSALWQSWENQVGHRRIRPHKIATGTVKPTPQKQYHINPKAKPDIQIVINDLLKQGVLIQKESTMNTPVYPVPKPNGRWRMVLDYRAVNKVTPLIAVQNQHSYGILGSLFKGRYKTTIDLSNGFWAHPIVPEDYWITAFTWQGKQYCWTVLPQGFLNSPGLFNGDVVDLLQGIPNVEVYVDDVYISHDSEKEHLEYLDILFNRLKEAGYIISLKKSNIANSIVDFLGFQITNEGRGLTDTFKEKLENITAPTTLKQLQSILGKLNFARNFIPDFTELIAPLYALIPKSPKNYVPWQIEHSTTLETLITKLNGAEYLQGRKGDKTLIMKVNASYTTGYIRYYNEGEKKPISYVSIVFSKTELKFTELEKLLTTVHKGLLKALDLSMGQNIHVYSPIVSMQNIQKTPQTAKKALASRWLSWLSYLEDPRIRFFYDPQMPALKDLPAVDTGKDNKKHPSNFQHIFYTDGSAITSPTKEGHLNAGMGIVYFINKDGNLQKQQEWSISLGNHTAQFAEIAAFEFALKKCLPLGGNILVVTDSNYVAKAYNEELDVWASNGFVNNRKKPLKHISKWKSVADLKRLRPDVVVTHEPGHQKLDSSPHAYGNNLADQLATQASFKVHAGKRTADGSEFEKRTADGSEFESPKKKAKVE

SEQ ID NO: 1114 - protein, 2087 aa, synthetic construct
MPAAKRVKLDGGDKKYSIGLDIGTNSVGWAVITDEYKVPSKKFKVLGNTDRHSIKKNLIGALLFDSGETAEATRLKRTARRRYTRRKNRICYLQEIFSNEMAKVDDSFFHRLEESFLVEEDKKHERHPIFGNIVDEVAYHEKYPTIYHLRKKLVDSTDKADLRLIYLALAHMIKFRGHFLIEGDLNPDNSDVDKLFIQLVQTYNQLFEENPINASGVDAKAILSARLSKSRRLENLIAQLPGEKKNGLFGNLIALSLGLTPNFKSNFDLAEDAKLQLSKDTYDDDLDNLLAQIGDQYADLFLAAKNLSDAILLSDILRVNTEITKAPLSASMIKRYDEHHQDLTLLKALVRQQLPEKYKEIFFDQSKNGYAGYIDGGASQEEFYKFIKPILEKMDGTEELLVKLNREDLLRKQRTFDNGSIPHQIHLGELHAILRRQEDFYPFLKDNREKIEKILTFRIPYYVGPLARGNSRFAWMTRKSEETITPWNFEEVVDKGASAQSFIERMTNFDKNLPNEKVLPKHSLLYEYFTVYNELTKVKYVTEGMRKPAFLSGEQKKAIVDLLFKTNRKVTVKQLKEDYFKKIECFDSVEISGVEDRFNASLGTYHDLLKIIKDKDFLDNEENEDILEDIVLTLTLFEDREMIEERLKTYAHLFDDKVMKQLKRRRYTGWGRLSRKLINGIRDKQSGKTILDFLKSDGFANRNFMQLIHDDSLTFKEDIQKAQVSGQGDSLHEHIANLAGSPAIKKGILQTVKVVDELVKVMGRHKPENIVIEMARENQTTQKGQKNSRERMKRIEEGIKELGSQILKEHPVENTQLQNEKLYLYYLQNGRDMYVDQELDINRLSDYDVDHIVPQSFLKDDSIDNKVLTRSDKARGKSDNVPSEEVVKKMKNYWRQLLNAKLITQRKFDNLTKAERGGLSELDKAGFIKRQLVETRQITKHVAQILDSRMNTKYDENDKLIREVKVITLKSKLVSDFRKDFQFYKVREINNYHHAHDAYLNAVVGTALIKKYPKLESEFVYGDYKVYDVRKMIAKSEQEIGKATAKYFFYSNIMNFFKTEITLANGEIRKRPLIETNGETGEIVWDKGRDFATVRKVLSMPQVNIVKKTEVQTGGFSKESILPKRNSDKLIARKKDWDPKKYGGFDSPTVAYSVLVVAKVEKGKSKKLKSVKELLGITIMERSSFEKNPIDFLEAKGYKEVKKDLIIKLPKYSLFELENGRKRMLASAGELQKGNELALPSKYVNFLYLASHYEKLKGSPEDNEQKQLFVEQHKHYLDEIIEQISEFSKRVILADANLDKVLSAYNKHRDKPIREQAENIIHLFTLTNLGAPAAFKYFDTTIDRKRYTSTKEVLDATLIHQSITGLYETRIDLSQLGGDGGGGGEAAAKGGSGGVPWILKKPLELTIKLDLEEQQGTLLNNSILSKKGKEELKQLFEKYSALWQSWENQVGHRRIRPHKIATGTVKPTPQKQYHINPKAKPDIQIVINDLLKQGVLIQKESTMNTPVYPVPKPNGRWRMVLDYRAVNKVTPLIAVQNQHSYGILGSLFKGRYKTTIDLSNGFWAHPIVPEDYWITAFTWQGKQYCWTVLPQGFLNSPGLFNGDVVDLLQGIPNVEVYVDDVYISHDSEKEHLEYLDILFNRLKEAGYIISLKKSNIANSIVDFLGFQITNEGRGLTDTFKEKLENITAPTTLKQLQSILGKLNFARNFIPDFTELIAPLYALIPKSPKNYVPWQIEHSTTLETLITKLNGAEYLQGRKGDKTLIMKVNASYTTGYIRYYNEGEKKPISYVSIVFSKTELKFTELEKLLTTVHKGLLKALDLSMGQNIHVYSPIVSMQNIQKTPQTAKKALASRWLSWLSYLEDPRIRFFYDPQMPALKDLPAVDTGKDNKKHPSNFQHIFYTDGSAITSPTKEGHLNAGMGIVYFINKDGNLQKQQEWSISLGNHTAQFAEIAAFEFALKKCLPLGGNILVVTDSNYVAKAYNEELDVWASNGFVNNRKKPLKHISKWKSVADLKRLRPDVVVTHEPGHQKLDSSPHAYGNNLADQLATQASFKVHAGKRTADGSEFEKRTADGSEFESPKKKAKVE

SEQ ID NO: 1115 - protein, 2208 aa, synthetic construct
MPAAKRVKLDGGDKKYSIGLDIGTNSVGWAVITDEYKVPSKKFKVLGNTDRHSIKKNLIGALLFDSGETAEATRLKRTARRRYTRRKNRICYLQEIFSNEMAKVDDSFFHRLEESFLVEEDKKHERHPIFGNIVDEVAYHEKYPTIYHLRKKLVDSTDKADLRLIYLALAHMIKFRGHFLIEGDLNPDNSDVDKLFIQLVQTYNQLFEENPINASGVDAKAILSARLSKSRRLENLIAQLPGEKKNGLFGNLIALSLGLTPNFKSNFDLAEDAKLQLSKDTYDDDLDNLLAQIGDQYADLFLAAKNLSDAILLSDILRVNTEITKAPLSASMIKRYDEHHQDLTLLKALVRQQLPEKYKEIFFDQSKNGYAGYIDGGASQEEFYKFIKPILEKMDGTEELLVKLNREDLLRKQRTFDNGSIPHQIHLGELHAILRRQEDFYPFLKDNREKIEKILTFRIPYYVGPLARGNSRFAWMTRKSEETITPWNFEEVVDKGASAQSFIERMTNFDKNLPNEKVLPKHSLLYEYFTVYNELTKVKYVTEGMRKPAFLSGEQKKAIVDLLFKTNRKVTVKQLKEDYFKKIECFDSVEISGVEDRFNASLGTYHDLLKIIKDKDFLDNEENEDILEDIVLTLTLFEDREMIEERLKTYAHLFDDKVMKQLKRRRYTGWGRLSRKLINGIRDKQSGKTILDFLKSDGFANRNFMQLIHDDSLTFKEDIQKAQVSGQGDSLHEHIANLAGSPAIKKGILQTVKVVDELVKVMGRHKPENIVIEMARENQTTQKGQKNSRERMKRIEEGIKELGSQILKEHPVENTQLQNEKLYLYYLQNGRDMYVDQELDINRLSDYDVDHIVPQSFLKDDSIDNKVLTRSDKARGKSDNVPSEEVVKKMKNYWRQLLNAKLITQRKFDNLTKAERGGLSELDKAGFIKRQLVETRQITKHVAQILDSRMNTKYDENDKLIREVKVITLKSKLVSDFRKDFQFYKVREINNYHHAHDAYLNAVVGTALIKKYPKLESEFVYGDYKVYDVRKMIAKSEQEIGKATAKYFFYSNIMNFFKTEITLANGEIRKRPLIETNGETGEIVWDKGRDFATVRKVLSMPQVNIVKKTEVQTGGFSKESILPKRNSDKLIARKKDWDPKKYGGFDSPTVAYSVLVVAKVEKGKSKKLKSVKELLGITIMERSSFEKNPIDFLEAKGYKEVKKDLIIKLPKYSLFELENGRKRMLASAGELQKGNELALPSKYVNFLYLASHYEKLKGSPEDNEQKQLFVEQHKHYLDEIIEQISEFSKRVILADANLDKVLSAYNKHRDKPIREQAENIIHLFTLTNLGAPAAFKYFDTTIDRKRYTSTKEVLDATLIHQSITGLYETRIDLSQLGGDGGAEAAAKEAAAKEAAAKEAAAKALEAEAAAKEAAAKEAAAKEAAAKAGGMDLLKPLTVERKGVKIKGYWNSQADITCVPKDLLQGEEPVRQQNVTTIHGTQEGDVYYVNLKIDGRRINTEVIGTTLDYAIITPGDVPWILKKPLELTIKLDLEEQQGTLLNNSILSKKGKEELKQLFEKYSALWQSWENQVGHRRIRPHKIATGTVKPTPQKQYHINPKAKPDIQIVINDLLKQGVLIQKESTMNTPVYPVPKPNGRWRMVLDYRAVNKVTPLIAVQNQHSYGILGSLFKGRYKTTIDLSNGFWAHPIVPEDYWITAFTWQGKQYCWTVLPQGFLNSPGLFNGDVVDLLQGIPNVEVYVDDVYISHDSEKEHLEYLDILFNRLKEAGYIISLKKSNIANSIVDFLGFQITNEGRGLTDTFKEKLENITAPTTLKQLQSILGLLNFARNFIPDFTELIAPLYALIPKSPKNYVPWQIEHSTTLETLITKLNGAEYLQGRKGDKTLIMKVNASYTTGYIRYYNEGEKKPISYVSIVFSKTELKFTELEKLLTTVHKGLLKALDLSMGQNIHVYSPIVSMQNIQKTPQTAKKALASRWLSWLSYLEDPRIRFFYDPQMPALKDLPAVDTGKDNKKHPSNFQHIFYTDGSAITSPTKEGHLNAGMGIVYFINKDGNLQKQQEWSISLGNHTAQFAEIAAFEFALKKCLPLGGNILVVTDSNYVAKAYNEELDVWASNGFVNNRKKPLKHISKWKSVADLKRLRPDVVVTHEPGHQKLDSSPHAYGNNLADQLATQASFKVHAGKRTADGSEFEKRTADGSEFESPKKKAKVE

SEQ ID NO: 1116 - protein, 2182 aa, synthetic construct
MPAAKRVKLDGGDKKYSIGLDIGTNSVGWAVITDEYKVPSKKFKVLGNTDRHSIKKNLIGALLFDSGETAEATRLKRTARRRYTRRKNRICYLQEIFSNEMAKVDDSFFHRLEESFLVEEDKKHERHPIFGNIVDEVAYHEKYPTIYHLRKKLVDSTDKADLRLIYLALAHMIKFRGHFLIEGDLNPDNSDVDKLFIQLVQTYNQLFEENPINASGVDAKAILSARLSKSRRLENLIAQLPGEKKNGLFGNLIALSLGLTPNFKSNFDLAEDAKLQLSKDTYDDDLDNLLAQIGDQYADLFLAAKNLSDAILLSDILRVNTEITKAPLSASMIKRYDEHHQDLTLLKALVRQQLPEKYKEIFFDQSKNGYAGYIDGGASQEEFYKFIKPILEKMDGTEELLVKLNREDLLRKQRTFDNGSIPHQIHLGELHAILRRQEDFYPFLKDNREKIEKILTFRIPYYVGPLARGNSRFAWMTRKSEETITPWNFEEVVDKGASAQSFIERMTNFDKNLPNEKVLPKHSLLYEYFTVYNELTKVKYVTEGMRKPAFLSGEQKKAIVDLLFKTNRKVTVKQLKEDYFKKIECFDSVEISGVEDRFNASLGTYHDLLKIIKDKDFLDNEENEDILEDIVLTLTLFEDREMIEERLKTYAHLFDDKVMKQLKRRRYTGWGRLSRKLINGIRDKQSGKTILDFLKSDGFANRNFMQLIHDDSLTFKEDIQKAQVSGQGDSLHEHIANLAGSPAIKKGILQTVKVVDELVKVMGRHKPENIVIEMARENQTTQKGQKNSRERMKRIEEGIKELGSQILKEHPVENTQLQNEKLYLYYLQNGRDMYVDQELDINRLSDYDVDHIVPQSFLKDDSIDNKVLTRSDKARGKSDNVPSEEVVKKMKNYWRQLLNAKLITQRKFDNLTKAERGGLSELDKAGFIKRQLVETRQITKHVAQILDSRMNTKYDENDKLIREVKVITLKSKLVSDFRKDFQFYKVREINNYHHAHDAYLNAVVGTALIKKYPKLESEFVYGDYKVYDVRKMIAKSEQEIGKATAKYFFYSNIMNFFKTEITLANGEIRKRPLIETNGETGEIVWDKGRDFATVRKVLSMPQVNIVKKTEVQTGGFSKESILPKRNSDKLIARKKDWDPKKYGGFDSPTVAYSVLVVAKVEKGKSKKLKSVKELLGITIMERSSFEKNPIDFLEAKGYKEVKKDLIIKLPKYSLFELENGRKRMLASAGELQKGNELALPSKYVNFLYLASHYEKLKGSPEDNEQKQLFVEQHKHYLDEIIEQISEFSKRVILADANLDKVLSAYNKHRDKPIREQAENIIHLFTLTNLGAPAAFKYFDTTIDRKRYTSTKEVLDATLIHQSITGLYETRIDLSQLGGDGGEAAAKEAAAKEAAAKEAAAKGGMDLLKPLTVERKGVKIKGYWNSQADITCVPKDLLQGEEPVRQQNVTTIHGTQEGDVYYVNLKIDGRRINTEVIGTTLDYAIITPGDVPWILKKPLELTIKLDLEEQQGTLLNNSILSKKGKEELKQLFEKYSALWQSWENQVGHRRIRPHKIATGTVKPTPQKQYHINPKAKPDIQIVINDLLKQGVLIQKESTMNTPVYPVPKPNGRWRMVLDYRAVNKVTPLIAVQNQHSYGILGSLFKGRYKTTIDLSNGFWAHPIVPEDYWITAFTWQGKQYCWTVLPQGFLNSPGLFNGDVVDLLQGIPNVEVYVDDVYISHDSEKEHLEYLDILFNRLKEAGYIISLKKSNIANSIVDFLGFQITNEGRGLTDTFKEKLENITAPTTLKQLQSILGLLNFARNFIPDFTELIAPLYALIPKSPKNYVPWQIEHSTTLETLITKLNGAEYLQGRKGDKTLIMKVNASYTTGYIRYYNEGEKKPISYVSIVFSKTELKFTELEKLLTTVHKGLLKALDLSMGQNIHVYSPIVSMQNIQKTPQTAKKALASRWLSWLSYLEDPRIRFFYDPQMPALKDLPAVDTGKDNKKHPSNFQHIFYTDGSAITSPTKEGHLNAGMGIVYFINKDGNLQKQQEWSISLGNHTAQFAEIAAFEFALKKCLPLGGNILVVTDSNYVAKAYNEELDVWASNGFVNNRKKPLKHISKWKSVADLKRLRPDVVVTHEPGHQKLDSSPHAYGNNLADQLATQASFKVHAGKRTADGSEFEKRTADGSEFESPKKKAKVE

SEQ ID NO: 1117 - protein, 2171 aa, synthetic construct
MPAAKRVKLDGGDKKYSIGLDIGTNSVGWAVITDEYKVPSKKFKVLGNTDRHSIKKNLIGALLFDSGETAEATRLKRTARRRYTRRKNRICYLQEIFSNEMAKVDDSFFHRLEESFLVEEDKKHERHPIFGNIVDEVAYHEKYPTIYHLRKKLVDSTDKADLRLIYLALAHMIKFRGHFLIEGDLNPDNSDVDKLFIQLVQTYNQLFEENPINASGVDAKAILSARLSKSRRLENLIAQLPGEKKNGLFGNLIALSLGLTPNFKSNFDLAEDAKLQLSKDTYDDDLDNLLAQIGDQYADLFLAAKNLSDAILLSDILRVNTEITKAPLSASMIKRYDEHHQDLTLLKALVRQQLPEKYKEIFFDQSKNGYAGYIDGGASQEEFYKFIKPILEKMDGTEELLVKLNREDLLRKQRTFDNGSIPHQIHLGELHAILRRQEDFYPFLKDNREKIEKILTFRIPYYVGPLARGNSRFAWMTRKSEETITPWNFEEVVDKGASAQSFIERMTNFDKNLPNEKVLPKHSLLYEYFTVYNELTKVKYVTEGMRKPAFLSGEQKKAIVDLLFKTNRKVTVKQLKEDYFKKIECFDSVEISGVEDRFNASLGTYHDLLKIIKDKDFLDNEENEDILEDIVLTLTLFEDREMIEERLKTYAHLFDDKVMKQLKRRRYTGWGRLSRKLINGIRDKQSGKTILDFLKSDGFANRNFMQLIHDDSLTFKEDIQKAQVSGQGDSLHEHIANLAGSPAIKKGILQTVKVVDELVKVMGRHKPENIVIEMARENQTTQKGQKNSRERMKRIEEGIKELGSQILKEHPVENTQLQNEKLYLYYLQNGRDMYVDQELDINRLSDYDVDHIVPQSFLKDDSIDNKVLTRSDKARGKSDNVPSEEVVKKMKNYWRQLLNAKLITQRKFDNLTKAERGGLSELDKAGFIKRQLVETRQITKHVAQILDSRMNTKYDENDKLIREVKVITLKSKLVSDFRKDFQFYKVREINNYHHAHDAYLNAVVGTALIKKYPKLESEFVYGDYKVYDVRKMIAKSEQEIGKATAKYFFYSNIMNFFKTEITLANGEIRKRPLIETNGETGEIVWDKGRDFATVRKVLSMPQVNIVKKTEVQTGGFSKESILPKRNSDKLIARKKDWDPKKYGGFDSPTVAYSVLVVAKVEKGKSKKLKSVKELLGITIMERSSFEKNPIDFLEAKGYKEVKKDLIIKLPKYSLFELENGRKRMLASAGELQKGNELALPSKYVNFLYLASHYEKLKGSPEDNEQKQLFVEQHKHYLDEIIEQISEFSKRVILADANLDKVLSAYNKHRDKPIREQAENIIHLFTLTNLGAPAAFKYFDTTIDRKRYTSTKEVLDATLIHQSITGLYETRIDLSQLGGDGGGSSPAPGGGGGMDLLKPLTVERKGVKIKGYWNSQADITCVPKDLLQGEEPVRQQNVTTIHGTQEGDVYYVNLKIDGRRINTEVIGTTLDYAIITPGDVPWILKKPLELTIKLDLEEQQGTLLNNSILSKKGKEELKQLFEKYSALWQSWENQVGHRRIRPHKIATGTVKPTPQKQYHINPKAKPDIQIVINDLLKQGVLIQKESTMNTPVYPVPKPNGRWRMVLDYRAVNKVTPLIAVQNQHSYGILGSLFKGRYKTTIDLSNGFWAHPIVPEDYWITAFTWQGKQYCWTVLPQGFLNSPGLFNGDVVDLLQGIPNVEVYVDDVYISHDSEKEHLEYLDILFNRLKEAGYIISLKKSNIANSIVDFLGFQITNEGRGLTDTFKEKLENITAPTTLKQLQSILGLLNFARNFIPDFTELIAPLYALIPKSPKNYVPWQIEHSTTLETLITKLNGAEYLQGRKGDKTLIMKVNASYTTGYIRYYNEGEKKPISYVSIVFSKTELKFTELEKLLTTVHKGLLKALDLSMGQNIHVYSPIVSMQNIQKTPQTAKKALASRWLSWLSYLEDPRIRFFYDPQMPALKDLPAVDTGKDNKKHPSNFQHIFYTDGSAITSPTKEGHLNAGMGIVYFINKDGNLQKQQEWSISLGNHTAQFAEIAAFEFALKKCLPLGGNILVVTDSNYVAKAYNEELDVWASNGFVNNRKKPLKHISKWKSVADLKRLRPDVVVTHEPGHQKLDSSPHAYGNNLADQLATQASFKVHAGKRTADGSEFEKRTADGSEFESPKKKAKVE

SEQ ID NO: 1118 - protein, 2173 aa, synthetic construct
MPAAKRVKLDGGDKKYSIGLDIGTNSVGWAVITDEYKVPSKKFKVLGNTDRHSIKKNLIGALLFDSGETAEATRLKRTARRRYTRRKNRICYLQEIFSNEMAKVDDSFFHRLEESFLVEEDKKHERHPIFGNIVDEVAYHEKYPTIYHLRKKLVDSTDKADLRLIYLALAHMIKFRGHFLIEGDLNPDNSDVDKLFIQLVQTYNQLFEENPINASGVDAKAILSARLSKSRRLENLIAQLPGEKKNGLFGNLIALSLGLTPNFKSNFDLAEDAKLQLSKDTYDDDLDNLLAQIGDQYADLFLAAKNLSDAILLSDILRVNTEITKAPLSASMIKRYDEHHQDLTLLKALVRQQLPEKYKEIFFDQSKNGYAGYIDGGASQEEFYKFIKPILEKMDGTEELLVKLNREDLLRKQRTFDNGSIPHQIHLGELHAILRRQEDFYPFLKDNREKIEKILTFRIPYYVGPLARGNSRFAWMTRKSEETITPWNFEEVVDKGASAQSFIERMTNFDKNLPNEKVLPKHSLLYEYFTVYNELTKVKYVTEGMRKPAFLSGEQKKAIVDLLFKTNRKVTVKQLKEDYFKKIECFDSVEISGVEDRFNASLGTYHDLLKIIKDKDFLDNEENEDILEDIVLTLTLFEDREMIEERLKTYAHLFDDKVMKQLKRRRYTGWGRLSRKLINGIRDKQSGKTILDFLKSDGFANRNFMQLIHDDSLTFKEDIQKAQVSGQGDSLHEHIANLAGSPAIKKGILQTVKVVDELVKVMGRHKPENIVIEMARENQTTQKGQKNSRERMKRIEEGIKELGSQILKEHPVENTQLQNEKLYLYYLQNGRDMYVDQELDINRLSDYDVDHIVPQSFLKDDSIDNKVLTRSDKARGKSDNVPSEEVVKKMKNYWRQLLNAKLITQRKFDNLTKAERGGLSELDKAGFIKRQLVETRQITKHVAQILDSRMNTKYDENDKLIREVKVITLKSKLVSDFRKDFQFYKVREINNYHHAHDAYLNAVVGTALIKKYPKLESEFVYGDYKVYDVRKMIAKSEQEIGKATAKYFFYSNIMNFFKTEITLANGEIRKRPLIETNGETGEIVWDKGRDFATVRKVLSMPQVNIVKKTEVQTGGFSKESILPKRNSDKLIARKKDWDPKKYGGFDSPTVAYSVLVVAKVEKGKSKKLKSVKELLGITIMERSSFEKNPIDFLEAKGYKEVKKDLIIKLPKYSLFELENGRKRMLASAGELQKGNELALPSKYVNFLYLASHYEKLKGSPEDNEQKQLFVEQHKHYLDEIIEQISEFSKRVILADANLDKVLSAYNKHRDKPIREQAENIIHLFTLTNLGAPAAFKYFDTTIDRKRYTSTKEVLDATLIHQSITGLYETRIDLSQLGGDGGPAPEAAAKGGGGGMDLLKPLTVERKGVKIKGYWNSQADITCVPKDLLQGEEPVRQQNVTTIHGTQEGDVYYVNLKIDGRRINTEVIGTTLDYAIITPGDVPWILKKPLELTIKLDLEEQQGTLLNNSILSKKGKEELKQLFEKYSALWQSWENQVGHRRIRPHKIATGTVKPTPQKQYHINPKAKPDIQIVINDLLKQGVLIQKESTMNTPVYPVPKPNGRWRMVLDYRAVNKVTPLIAVQNQHSYGILGSLFKGRYKTTIDLSNGFWAHPIVPEDYWITAFTWQGKQYCWTVLPQGFLNSPGLFNGDVVDLLQGIPNVEVYVDDVYISHDSEKEHLEYLDILFNRLKEAGYIISLKKSNIANSIVDFLGFQITNEGRGLTDTFKEKLENITAPTTLKQLQSILGLLNFARNFIPDFTELIAPLYALIPKSPKNYVPWQIEHSTTLETLITKLNGAEYLQGRKGDKTLIMKVNASYTTGYIRYYNEGEKKPISYVSIVFSKTELKFTELEKLLTTVHKGLLKALDLSMGQNIHVYSPIVSMQNIQKTPQTAKKALASRWLSWLSYLEDPRIRFFYDPQMPALKDLPAVDTGKDNKKHPSNFQHIFYTDGSAITSPTKEGHLNAGMGIVYFINKDGNLQKQQEWSISLGNHTAQFAEIAAFEFALKKCLPLGGNILVVTDSNYVAKAYNEELDVWASNGFVNNRKKPLKHISKWKSVADLKRLRPDVVVTHEPGHQKLDSSPHAYGNNLADQLATQASFKVHAGKRTADGSEFEKRTADGSEFESPKKKAKVE

SEQ ID NO: 1119 - protein, 2182 aa, synthetic construct
MPAAKRVKLDGGDKKYSIGLDIGTNSVGWAVITDEYKVPSKKFKVLGNTDRHSIKKNLIGALLFDSGETAEATRLKRTARRRYTRRKNRICYLQEIFSNEMAKVDDSFFHRLEESFLVEEDKKHERHPIFGNIVDEVAYHEKYPTIYHLRKKLVDSTDKADLRLIYLALAHMIKFRGHFLIEGDLNPDNSDVDKLFIQLVQTYNQLFEENPINASGVDAKAILSARLSKSRRLENLIAQLPGEKKNGLFGNLIALSLGLTPNFKSNFDLAEDAKLQLSKDTYDDDLDNLLAQIGDQYADLFLAAKNLSDAILLSDILRVNTEITKAPLSASMIKRYDEHHQDLTLLKALVRQQLPEKYKEIFFDQSKNGYAGYIDGGASQEEFYKFIKPILEKMDGTEELLVKLNREDLLRKQRTFDNGSIPHQIHLGELHAILRRQEDFYPFLKDNREKIEKILTFRIPYYVGPLARGNSRFAWMTRKSEETITPWNFEEVVDKGASAQSFIERMTNFDKNLPNEKVLPKHSLLYEYFTVYNELTKVKYVTEGMRKPAFLSGEQKKAIVDLLFKTNRKVTVKQLKEDYFKKIECFDSVEISGVEDRFNASLGTYHDLLKIIKDKDFLDNEENEDILEDIVLTLTLFEDREMIEERLKTYAHLFDDKVMKQLKRRRYTGWGRLSRKLINGIRDKQSGKTILDFLKSDGFANRNFMQLIHDDSLTFKEDIQKAQVSGQGDSLHEHIANLAGSPAIKKGILQTVKVVDELVKVMGRHKPENIVIEMARENQTTQKGQKNSRERMKRIEEGIKELGSQILKEHPVENTQLQNEKLYLYYLQNGRDMYVDQELDINRLSDYDVDHIVPQSFLKDDSIDNKVLTRSDKARGKSDNVPSEEVVKKMKNYWRQLLNAKLITQRKFDNLTKAERGGLSELDKAGFIKRQLVETRQITKHVAQILDSRMNTKYDENDKLIREVKVITLKSKLVSDFRKDFQFYKVREINNYHHAHDAYLNAVVGTALIKKYPKLESEFVYGDYKVYDVRKMIAKSEQEIGKATAKYFFYSNIMNFFKTEITLANGEIRKRPLIETNGETGEIVWDKGRDFATVRKVLSMPQVNIVKKTEVQTGGFSKESILPKRNSDKLIARKKDWDPKKYGGFDSPTVAYSVLVVAKVEKGKSKKLKSVKELLGITIMERSSFEKNPIDFLEAKGYKEVKKDLIIKLPKYSLFELENGRKRMLASAGELQKGNELALPSKYVNFLYLASHYEKLKGSPEDNEQKQLFVEQHKHYLDEIIEQISEFSKRVILADANLDKVLSAYNKHRDKPIREQAENIIHLFTLTNLGAPAAFKYFDTTIDRKRYTSTKEVLDATLIHQSITGLYETRIDLSQLGGDGGGGGGSGGGGSGGGGSGGGGSGGMDLLKPLTVERKGVKIKGYWNSQADITCVPKDLLQGEEPVRQQNVTTIHGTQEGDVYYVNLKIDGRRINTEVIGTTLDYAIITPGDVPWILKKPLELTIKLDLEEQQGTLLNNSILSKKGKEELKQLFEKYSALWQSWENQVGHRRIRPHKIATGTVKPTPQKQYHINPKAKPDIQIVINDLLKQGVLIQKESTMNTPVYPVPKPNGRWRMVLDYRAVNKVTPLIAVQNQHSYGILGSLFKGRYKTTIDLSNGFWAHPIVPEDYWITAFTWQGKQYCWTVLPQGFLNSPGLFNGDVVDLLQGIPNVEVYVDDVYISHDSEKEHLEYLDILFNRLKEAGYIISLKKSNIANSIVDFLGFQITNEGRGLTDTFKEKLENITAPTTLKQLQSILGLLNFARNFIPDFTELIAPLYALIPKSPKNYVPWQIEHSTTLETLITKLNGAEYLQGRKGDKTLIMKVNASYTTGYIRYYNEGEKKPISYVSIVFSKTELKFTELEKLLTTVHKGLLKALDLSMGQNIHVYSPIVSMQNIQKTPQTAKKALASRWLSWLSYLEDPRIRFFYDPQMPALKDLPAVDTGKDNKKHPSNFQHIFYTDGSAITSPTKEGHLNAGMGIVYFINKDGNLQKQQEWSISLGNHTAQFAEIAAFEFALKKCLPLGGNILVVTDSNYVAKAYNEELDVWASNGFVNNRKKPLKHISKWKSVADLKRLRPDVVVTHEPGHQKLDSSPHAYGNNLADQLATQASFKVHAGKRTADGSEFEKRTADGSEFESPKKKAKVE

SEQ ID NO: 1120 - protein, 2171 aa, synthetic construct
MPAAKRVKLDGGDKKYSIGLDIGTNSVGWAVITDEYKVPSKKFKVLGNTDRHSIKKNLIGALLFDSGETAEATRLKRTARRRYTRRKNRICYLQEIFSNEMAKVDDSFFHRLEESFLVEEDKKHERHPIFGNIVDEVAYHEKYPTIYHLRKKLVDSTDKADLRLIYLALAHMIKFRGHFLIEGDLNPDNSDVDKLFIQLVQTYNQLFEENPINASGVDAKAILSARLSKSRRLENLIAQLPGEKKNGLFGNLIALSLGLTPNFKSNFDLAEDAKLQLSKDTYDDDLDNLLAQIGDQYADLFLAAKNLSDAILLSDILRVNTEITKAPLSASMIKRYDEHHQDLTLLKALVRQQLPEKYKEIFFDQSKNGYAGYIDGGASQEEFYKFIKPILEKMDGTEELLVKLNREDLLRKQRTFDNGSIPHQIHLGELHAILRRQEDFYPFLKDNREKIEKILTFRIPYYVGPLARGNSRFAWMTRKSEETITPWNFEEVVDKGASAQSFIERMTNFDKNLPNEKVLPKHSLLYEYFTVYNELTKVKYVTEGMRKPAFLSGEQKKAIVDLLFKTNRKVTVKQLKEDYFKKIECFDSVEISGVEDRFNASLGTYHDLLKIIKDKDFLDNEENEDILEDIVLTLTLFEDREMIEERLKTYAHLFDDKVMKQLKRRRYTGWGRLSRKLINGIRDKQSGKTILDFLKSDGFANRNFMQLIHDDSLTFKEDIQKAQVSGQGDSLHEHIANLAGSPAIKKGILQTVKVVDELVKVMGRHKPENIVIEMARENQTTQKGQKNSRERMKRIEEGIKELGSQILKEHPVENTQLQNEKLYLYYLQNGRDMYVDQELDINRLSDYDVDHIVPQSFLKDDSIDNKVLTRSDKARGKSDNVPSEEVVKKMKNYWRQLLNAKLITQRKFDNLTKAERGGLSELDKAGFIKRQLVETRQITKHVAQILDSRMNTKYDENDKLIREVKVITLKSKLVSDFRKDFQFYKVREINNYHHAHDAYLNAVVGTALIKKYPKLESEFVYGDYKVYDVRKMIAKSEQEIGKATAKYFFYSNIMNFFKTEITLANGEIRKRPLIETNGETGEIVWDKGRDFATVRKVLSMPQVNIVKKTEVQTGGFSKESILPKRNSDKLIARKKDWDPKKYGGFDSPTVAYSVLVVAKVEKGKSKKLKSVKELLGITIMERSSFEKNPIDFLEAKGYKEVKKDLIIKLPKYSLFELENGRKRMLASAGELQKGNELALPSKYVNFLYLASHYEKLKGSPEDNEQKQLFVEQHKHYLDEIIEQISEFSKRVILADANLDKVLSAYNKHRDKPIREQAENIIHLFTLTNLGAPAAFKYFDTTIDRKRYTSTKEVLDATLIHQSITGLYETRIDLSQLGGDGGPAPGGSGSSGGMDLLKPLTVERKGVKIKGYWNSQADITCVPKDLLQGEEPVRQQNVTTIHGTQEGDVYYVNLKIDGRRINTEVIGTTLDYAIITPGDVPWILKKPLELTIKLDLEEQQGTLLNNSILSKKGKEELKQLFEKYSALWQSWENQVGHRRIRPHKIATGTVKPTPQKQYHINPKAKPDIQIVINDLLKQGVLIQKESTMNTPVYPVPKPNGRWRMVLDYRAVNKVTPLIAVQNQHSYGILGSLFKGRYKTTIDLSNGFWAHPIVPEDYWITAFTWQGKQYCWTVLPQGFLNSPGLFNGDVVDLLQGIPNVEVYVDDVYISHDSEKEHLEYLDILFNRLKEAGYIISLKKSNIANSIVDFLGFQITNEGRGLTDTFKEKLENITAPTTLKQLQSILGLLNFARNFIPDFTELIAPLYALIPKSPKNYVPWQIEHSTTLETLITKLNGAEYLQGRKGDKTLIMKVNASYTTGYIRYYNEGEKKPISYVSIVFSKTELKFTELEKLLTTVHKGLLKALDLSMGQNIHVYSPIVSMQNIQKTPQTAKKALASRWLSWLSYLEDPRIRFFYDPQMPALKDLPAVDTGKDNKKHPSNFQHIFYTDGSAITSPTKEGHLNAGMGIVYFINKDGNLQKQQEWSISLGNHTAQFAEIAAFEFALKKCLPLGGNILVVTDSNYVAKAYNEELDVWASNGFVNNRKKPLKHISKWKSVADLKRLRPDVVVTHEPGHQKLDSSPHAYGNNLADQLATQASFKVHAGKRTADGSEFEKRTADGSEFESPKKKAKVE

SEQ ID NO: 1121 - protein, 2173 aa, synthetic construct
MPAAKRVKLDGGDKKYSIGLDIGTNSVGWAVITDEYKVPSKKFKVLGNTDRHSIKKNLIGALLFDSGETAEATRLKRTARRRYTRRKNRICYLQEIFSNEMAKVDDSFFHRLEESFLVEEDKKHERHPIFGNIVDEVAYHEKYPTIYHLRKKLVDSTDKADLRLIYLALAHMIKFRGHFLIEGDLNPDNSDVDKLFIQLVQTYNQLFEENPINASGVDAKAILSARLSKSRRLENLIAQLPGEKKNGLFGNLIALSLGLTPNFKSNFDLAEDAKLQLSKDTYDDDLDNLLAQIGDQYADLFLAAKNLSDAILLSDILRVNTEITKAPLSASMIKRYDEHHQDLTLLKALVRQQLPEKYKEIFFDQSKNGYAGYIDGGASQEEFYKFIKPILEKMDGTEELLVKLNREDLLRKQRTFDNGSIPHQIHLGELHAILRRQEDFYPFLKDNREKIEKILTFRIPYYVGPLARGNSRFAWMTRKSEETITPWNFEEVVDKGASAQSFIERMTNFDKNLPNEKVLPKHSLLYEYFTVYNELTKVKYVTEGMRKPAFLSGEQKKAIVDLLFKTNRKVTVKQLKEDYFKKIECFDSVEISGVEDRFNASLGTYHDLLKIIKDKDFLDNEENEDILEDIVLTLTLFEDREMIEERLKTYAHLFDDKVMKQLKRRRYTGWGRLSRKLINGIRDKQSGKTILDFLKSDGFANRNFMQLIHDDSLTFKEDIQKAQVSGQGDSLHEHIANLAGSPAIKKGILQTVKVVDELVKVMGRHKPENIVIEMARENQTTQKGQKNSRERMKRIEEGIKELGSQILKEHPVENTQLQNEKLYLYYLQNGRDMYVDQELDINRLSDYDVDHIVPQSFLKDDSIDNKVLTRSDKARGKSDNVPSEEVVKKMKNYWRQLLNAKLITQRKFDNLTKAERGGLSELDKAGFIKRQLVETRQITKHVAQILDSRMNTKYDENDKLIREVKVITLKSKLVSDFRKDFQFYKVREINNYHHAHDAYLNAVVGTALIKKYPKLESEFVYGDYKVYDVRKMIAKSEQEIGKATAKYFFYSNIMNFFKTEITLANGEIRKRPLIETNGETGEIVWDKGRDFATVRKVLSMPQVNIVKKTEVQTGGFSKESILPKRNSDKLIARKKDWDPKKYGGFDSPTVAYSVLVVAKVEKGKSKKLKSVKELLGITIMERSSFEKNPIDFLEAKGYKEVKKDLIIKLPKYSLFELENGRKRMLASAGELQKGNELALPSKYVNFLYLASHYEKLKGSPEDNEQKQLFVEQHKHYLDEIIEQISEFSKRVILADANLDKVLSAYNKHRDKPIREQAENIIHLFTLTNLGAPAAFKYFDTTIDRKRYTSTKEVLDATLIHQSITGLYETRIDLSQLGGDGGEAAAKPAPGSSGGMDLLKPLTVERKGVKIKGYWNSQADITCVPKDLLQGEEPVRQQNVTTIHGTQEGDVYYVNLKIDGRRINTEVIGTTLDYAIITPGDVPWILKKPLELTIKLDLEEQQGTLLNNSILSKKGKEELKQLFEKYSALWQSWENQVGHRRIRPHKIATGTVKPTPQKQYHINPKAKPDIQIVINDLLKQGVLIQKESTMNTPVYPVPKPNGRWRMVLDYRAVNKVTPLIAVQNQHSYGILGSLFKGRYKTTIDLSNGFWAHPIVPEDYWITAFTWQGKQYCWTVLPQGFLNSPGLFNGDVVDLLQGIPNVEVYVDDVYISHDSEKEHLEYLDILFNRLKEAGYIISLKKSNIANSIVDFLGFQITNEGRGLTDTFKEKLENITAPTTLKQLQSILGLLNFARNFIPDFTELIAPLYALIPKSPKNYVPWQIEHSTTLETLITKLNGAEYLQGRKGDKTLIMKVNASYTTGYIRYYNEGEKKPISYVSIVFSKTELKFTELEKLLTTVHKGLLKALDLSMGQNIHVYSPIVSMQNIQKTPQTAKKALASRWLSWLSYLEDPRIRFFYDPQMPALKDLPAVDTGKDNKKHPSNFQHIFYTDGSAITSPTKEGHLNAGMGIVYFINKDGNLQKQQEWSISLGNHTAQFAEIAAFEFALKKCLPLGGNILVVTDSNYVAKAYNEELDVWASNGFVNNRKKPLKHISKWKSVADLKRLRPDVVVTHEPGHQKLDSSPHAYGNNLADQLATQASFKVHAGKRTADGSEFEKRTADGSEFESPKKKAKVE

SEQ ID NO: 1122 - protein, 2172 aa, synthetic construct
MPAAKRVKLDGGDKKYSIGLDIGTNSVGWAVITDEYKVPSKKFKVLGNTDRHSIKKNLIGALLFDSGETAEATRLKRTARRRYTRRKNRICYLQEIFSNEMAKVDDSFFHRLEESFLVEEDKKHERHPIFGNIVDEVAYHEKYPTIYHLRKKLVDSTDKADLRLIYLALAHMIKFRGHFLIEGDLNPDNSDVDKLFIQLVQTYNQLFEENPINASGVDAKAILSARLSKSRRLENLIAQLPGEKKNGLFGNLIALSLGLTPNFKSNFDLAEDAKLQLSKDTYDDDLDNLLAQIGDQYADLFLAAKNLSDAILLSDILRVNTEITKAPLSASMIKRYDEHHQDLTLLKALVRQQLPEKYKEIFFDQSKNGYAGYIDGGASQEEFYKFIKPILEKMDGTEELLVKLNREDLLRKQRTFDNGSIPHQIHLGELHAILRRQEDFYPFLKDNREKIEKILTFRIPYYVGPLARGNSRFAWMTRKSEETITPWNFEEVVDKGASAQSFIERMTNFDKNLPNEKVLPKHSLLYEYFTVYNELTKVKYVTEGMRKPAFLSGEQKKAIVDLLFKTNRKVTVKQLKEDYFKKIECFDSVEISGVEDRFNASLGTYHDLLKIIKDKDFLDNEENEDILEDIVLTLTLFEDREMIEERLKTYAHLFDDKVMKQLKRRRYTGWGRLSRKLINGIRDKQSGKTILDFLKSDGFANRNFMQLIHDDSLTFKEDIQKAQVSGQGDSLHEHIANLAGSPAIKKGILQTVKVVDELVKVMGRHKPENIVIEMARENQTTQKGQKNSRERMKRIEEGIKELGSQILKEHPVENTQLQNEKLYLYYLQNGRDMYVDQELDINRLSDYDVDHIVPQSFLKDDSIDNKVLTRSDKARGKSDNVPSEEVVKKMKNYWRQLLNAKLITQRKFDNLTKAERGGLSELDKAGFIKRQLVETRQITKHVAQILDSRMNTKYDENDKLIREVKVITLKSKLVSDFRKDFQFYKVREINNYHHAHDAYLNAVVGTALIKKYPKLESEFVYGDYKVYDVRKMIAKSEQEIGKATAKYFFYSNIMNFFKTEITLANGEIRKRPLIETNGETGEIVWDKGRDFATVRKVLSMPQVNIVKKTEVQTGGFSKESILPKRNSDKLIARKKDWDPKKYGGFDSPTVAYSVLVVAKVEKGKSKKLKSVKELLGITIMERSSFEKNPIDFLEAKGYKEVKKDLIIKLPKYSLFELENGRKRMLASAGELQKGNELALPSKYVNFLYLASHYEKLKGSPEDNEQKQLFVEQHKHYLDEIIEQISEFSKRVILADANLDKVLSAYNKHRDKPIREQAENIIHLFTLTNLGAPAAFKYFDTTIDRKRYTSTKEVLDATLIHQSITGLYETRIDLSQLGGDGGGGGGSGGGGSGGMDLLKPLTVERKGVKIKGYWNSQADITCVPKDLLQGEEPVRQQNVTTIHGTQEGDVYYVNLKIDGRRINTEVIGTTLDYAIITPGDVPWILKKPLELTIKLDLEEQQGTLLNNSILSKKGKEELKQLFEKYSALWQSWENQVGHRRIRPHKIATGTVKPTPQKQYHINPKAKPDIQIVINDLLKQGVLIQKESTMNTPVYPVPKPNGRWRMVLDYRAVNKVTPLIAVQNQHSYGILGSLFKGRYKTTIDLSNGFWAHPIVPEDYWITAFTWQGKQYCWTVLPQGFLNSPGLFNGDVVDLLQGIPNVEVYVDDVYISHDSEKEHLEYLDILFNRLKEAGYIISLKKSNIANSIVDFLGFQITNEGRGLTDTFKEKLENITAPTTLKQLQSILGLLNFARNFIPDFTELIAPLYALIPKSPKNYVPWQIEHSTTLETLITKLNGAEYLQGRKGDKTLIMKVNASYTTGYIRYYNEGEKKPISYVSIVFSKTELKFTELEKLLTTVHKGLLKALDLSMGQNIHVYSPIVSMQNIQKTPQTAKKALASRWLSWLSYLEDPRIRFFYDPQMPALKDLPAVDTGKDNKKHPSNFQHIFYTDGSAITSPTKEGHLNAGMGIVYFINKDGNLQKQQEWSISLGNHTAQFAEIAAFEFALKKCLPLGGNILVVTDSNYVAKAYNEELDVWASNGFVNNRKKPLKHISKWKSVADLKRLRPDVVVTHEPGHQKLDSSPHAYGNNLADQLATQASFKVHAGKRTADGSEFEKRTADGSEFESPKKKAKVE

SEQ ID NO: 1123 - protein, 2173 aa, synthetic construct
MPAAKRVKLDGGDKKYSIGLDIGTNSVGWAVITDEYKVPSKKFKVLGNTDRHSIKKNLIGALLFDSGETAEATRLKRTARRRYTRRKNRICYLQEIFSNEMAKVDDSFFHRLEESFLVEEDKKHERHPIFGNIVDEVAYHEKYPTIYHLRKKLVDSTDKADLRLIYLALAHMIKFRGHFLIEGDLNPDNSDVDKLFIQLVQTYNQLFEENPINASGVDAKAILSARLSKSRRLENLIAQLPGEKKNGLFGNLIALSLGLTPNFKSNFDLAEDAKLQLSKDTYDDDLDNLLAQIGDQYADLFLAAKNLSDAILLSDILRVNTEITKAPLSASMIKRYDEHHQDLTLLKALVRQQLPEKYKEIFFDQSKNGYAGYIDGGASQEEFYKFIKPILEKMDGTEELLVKLNREDLLRKQRTFDNGSIPHQIHLGELHAILRRQEDFYPFLKDNREKIEKILTFRIPYYVGPLARGNSRFAWMTRKSEETITPWNFEEVVDKGASAQSFIERMTNFDKNLPNEKVLPKHSLLYEYFTVYNELTKVKYVTEGMRKPAFLSGEQKKAIVDLLFKTNRKVTVKQLKEDYFKKIECFDSVEISGVEDRFNASLGTYHDLLKIIKDKDFLDNEENEDILEDIVLTLTLFEDREMIEERLKTYAHLFDDKVMKQLKRRRYTGWGRLSRKLINGIRDKQSGKTILDFLKSDGFANRNFMQLIHDDSLTFKEDIQKAQVSGQGDSLHEHIANLAGSPAIKKGILQTVKVVDELVKVMGRHKPENIVIEMARENQTTQKGQKNSRERMKRIEEGIKELGSQILKEHPVENTQLQNEKLYLYYLQNGRDMYVDQELDINRLSDYDVDHIVPQSFLKDDSIDNKVLTRSDKARGKSDNVPSEEVVKKMKNYWRQLLNAKLITQRKFDNLTKAERGGLSELDKAGFIKRQLVETRQITKHVAQILDSRMNTKYDENDKLIREVKVITLKSKLVSDFRKDFQFYKVREINNYHHAHDAYLNAVVGTALIKKYPKLESEFVYGDYKVYDVRKMIAKSEQEIGKATAKYFFYSNIMNFFKTEITLANGEIRKRPLIETNGETGEIVWDKGRDFATVRKVLSMPQVNIVKKTEVQTGGFSKESILPKRNSDKLIARKKDWDPKKYGGFDSPTVAYSVLVVAKVEKGKSKKLKSVKELLGITIMERSSFEKNPIDFLEAKGYKEVKKDLIIKLPKYSLFELENGRKRMLASAGELQKGNELALPSKYVNFLYLASHYEKLKGSPEDNEQKQLFVEQHKHYLDEIIEQISEFSKRVILADANLDKVLSAYNKHRDKPIREQAENIIHLFTLTNLGAPAAFKYFDTTIDRKRYTSTKEVLDATLIHQSITGLYETRIDLSQLGGDGGGGSEAAAKPAPGGMDLLKPLTVERKGVKIKGYWNSQADITCVPKDLLQGEEPVRQQNVTTIHGTQEGDVYYVNLKIDGRRINTEVIGTTLDYAIITPGDVPWILKKPLELTIKLDLEEQQGTLLNNSILSKKGKEELKQLFEKYSALWQSWENQVGHRRIRPHKIATGTVKPTPQKQYHINPKAKPDIQIVINDLLKQGVLIQKESTMNTPVYPVPKPNGRWRMVLDYRAVNKVTPLIAVQNQHSYGILGSLFKGRYKTTIDLSNGFWAHPIVPEDYWITAFTWQGKQYCWTVLPQGFLNSPGLFNGDVVDLLQGIPNVEVYVDDVYISHDSEKEHLEYLDILFNRLKEAGYIISLKKSNIANSIVDFLGFQITNEGRGLTDTFKEKLENITAPTTLKQLQSILGLLNFARNFIPDFTELIAPLYALIPKSPKNYVPWQIEHSTTLETLITKLNGAEYLQGRKGDKTLIMKVNASYTTGYIRYYNEGEKKPISYVSIVFSKTELKFTELEKLLTTVHKGLLKALDLSMGQNIHVYSPIVSMQNIQKTPQTAKKALASRWLSWLSYLEDPRIRFFYDPQMPALKDLPAVDTGKDNKKHPSNFQHIFYTDGSAITSPTKEGHLNAGMGIVYFINKDGNLQKQQEWSISLGNHTAQFAEIAAFEFALKKCLPLGGNILVVTDSNYVAKAYNEELDVWASNGFVNNRKKPLKHISKWKSVADLKRLRPDVVVTHEPGHQKLDSSPHAYGNNLADQLATQASFKVHAGKRTADGSEFEKRTADGSEFESPKKKAKVE

SEQ ID NO: 1124 - protein, 2171 aa, synthetic construct
MPAAKRVKLDGGDKKYSIGLDIGTNSVGWAVITDEYKVPSKKFKVLGNTDRHSIKKNLIGALLFDSGETAEATRLKRTARRRYTRRKNRICYLQEIFSNEMAKVDDSFFHRLEESFLVEEDKKHERHPIFGNIVDEVAYHEKYPTIYHLRKKLVDSTDKADLRLIYLALAHMIKFRGHFLIEGDLNPDNSDVDKLFIQLVQTYNQLFEENPINASGVDAKAILSARLSKSRRLENLIAQLPGEKKNGLFGNLIALSLGLTPNFKSNFDLAEDAKLQLSKDTYDDDLDNLLAQIGDQYADLFLAAKNLSDAILLSDILRVNTEITKAPLSASMIKRYDEHHQDLTLLKALVRQQLPEKYKEIFFDQSKNGYAGYIDGGASQEEFYKFIKPILEKMDGTEELLVKLNREDLLRKQRTFDNGSIPHQIHLGELHAILRRQEDFYPFLKDNREKIEKILTFRIPYYVGPLARGNSRFAWMTRKSEETITPWNFEEVVDKGASAQSFIERMTNFDKNLPNEKVLPKHSLLYEYFTVYNELTKVKYVTEGMRKPAFLSGEQKKAIVDLLFKTNRKVTVKQLKEDYFKKIECFDSVEISGVEDRFNASLGTYHDLLKIIKDKDFLDNEENEDILEDIVLTLTLFEDREMIEERLKTYAHLFDDKVMKQLKRRRYTGWGRLSRKLINGIRDKQSGKTILDFLKSDGFANRNFMQLIHDDSLTFKEDIQKAQVSGQGDSLHEHIANLAGSPAIKKGILQTVKVVDELVKVMGRHKPENIVIEMARENQTTQKGQKNSRERMKRIEEGIKELGSQILKEHPVENTQLQNEKLYLYYLQNGRDMYVDQELDINRLSDYDVDHIVPQSFLKDDSIDNKVLTRSDKARGKSDNVPSEEVVKKMKNYWRQLLNAKLITQRKFDNLTKAERGGLSELDKAGFIKRQLVETRQITKHVAQILDSRMNTKYDENDKLIREVKVITLKSKLVSDFRKDFQFYKVREINNYHHAHDAYLNAVVGTALIKKYPKLESEFVYGDYKVYDVRKMIAKSEQEIGKATAKYFFYSNIMNFFKTEITLANGEIRKRPLIETNGETGEIVWDKGRDFATVRKVLSMPQVNIVKKTEVQTGGFSKESILPKRNSDKLIARKKDWDPKKYGGFDSPTVAYSVLVVAKVEKGKSKKLKSVKELLGITIMERSSFEKNPIDFLEAKGYKEVKKDLIIKLPKYSLFELENGRKRMLASAGELQKGNELALPSKYVNFLYLASHYEKLKGSPEDNEQKQLFVEQHKHYLDEIIEQISEFSKRVILADANLDKVLSAYNKHRDKPIREQAENIIHLFTLTNLGAPAAFKYFDTTIDRKRYTSTKEVLDATLIHQSITGLYETRIDLSQLGGDGGGGGGSSPAPGGMDLLKPLTVERKGVKIKGYWNSQADITCVPKDLLQGEEPVRQQNVTTIHGTQEGDVYYVNLKIDGRRINTEVIGTTLDYAIITPGDVPWILKKPLELTIKLDLEEQQGTLLNNSILSKKGKEELKQLFEKYSALWQSWENQVGHRRIRPHKIATGTVKPTPQKQYHINPKAKPDIQIVINDLLKQGVLIQKESTMNTPVYPVPKPNGRWRMVLDYRAVNKVTPLIAVQNQHSYGILGSLFKGRYKTTIDLSNGFWAHPIVPEDYWITAFTWQGKQYCWTVLPQGFLNSPGLFNGDVVDLLQGIPNVEVYVDDVYISHDSEKEHLEYLDILFNRLKEAGYIISLKKSNIANSIVDFLGFQITNEGRGLTDTFKEKLENITAPTTLKQLQSILGLLNFARNFIPDFTELIAPLYALIPKSPKNYVPWQIEHSTTLETLITKLNGAEYLQGRKGDKTLIMKVNASYTTGYIRYYNEGEKKPISYVSIVFSKTELKFTELEKLLTTVHKGLLKALDLSMGQNIHVYSPIVSMQNIQKTPQTAKKALASRWLSWLSYLEDPRIRFFYDPQMPALKDLPAVDTGKDNKKHPSNFQHIFYTDGSAITSPTKEGHLNAGMGIVYFINKDGNLQKQQEWSISLGNHTAQFAEIAAFEFALKKCLPLGGNILVVTDSNYVAKAYNEELDVWASNGFVNNRKKPLKHISKWKSVADLKRLRPDVVVTHEPGHQKLDSSPHAYGNNLADQLATQASFKVHAGKRTADGSEFEKRTADGSEFESPKKKAKVE

SEQ ID NO: 1125 - protein, 2177 aa, synthetic construct
MPAAKRVKLDGGDKKYSIGLDIGTNSVGWAVITDEYKVPSKKFKVLGNTDRHSIKKNLIGALLFDSGETAEATRLKRTARRRYTRRKNRICYLQEIFSNEMAKVDDSFFHRLEESFLVEEDKKHERHPIFGNIVDEVAYHEKYPTIYHLRKKLVDSTDKADLRLIYLALAHMIKFRGHFLIEGDLNPDNSDVDKLFIQLVQTYNQLFEENPINASGVDAKAILSARLSKSRRLENLIAQLPGEKKNGLFGNLIALSLGLTPNFKSNFDLAEDAKLQLSKDTYDDDLDNLLAQIGDQYADLFLAAKNLSDAILLSDILRVNTEITKAPLSASMIKRYDEHHQDLTLLKALVRQQLPEKYKEIFFDQSKNGYAGYIDGGASQEEFYKFIKPILEKMDGTEELLVKLNREDLLRKQRTFDNGSIPHQIHLGELHAILRRQEDFYPFLKDNREKIEKILTFRIPYYVGPLARGNSRFAWMTRKSEETITPWNFEEVVDKGASAQSFIERMTNFDKNLPNEKVLPKHSLLYEYFTVYNELTKVKYVTEGMRKPAFLSGEQKKAIVDLLFKTNRKVTVKQLKEDYFKKIECFDSVEISGVEDRFNASLGTYHDLLKIIKDKDFLDNEENEDILEDIVLTLTLFEDREMIEERLKTYAHLFDDKVMKQLKRRRYTGWGRLSRKLINGIRDKQSGKTILDFLKSDGFANRNFMQLIHDDSLTFKEDIQKAQVSGQGDSLHEHIANLAGSPAIKKGILQTVKVVDELVKVMGRHKPENIVIEMARENQTTQKGQKNSRERMKRIEEGIKELGSQILKEHPVENTQLQNEKLYLYYLQNGRDMYVDQELDINRLSDYDVDHIVPQSFLKDDSIDNKVLTRSDKARGKSDNVPSEEVVKKMKNYWRQLLNAKLITQRKFDNLTKAERGGLSELDKAGFIKRQLVETRQITKHVAQILDSRMNTKYDENDKLIREVKVITLKSKLVSDFRKDFQFYKVREINNYHHAHDAYLNAVVGTALIKKYPKLESEFVYGDYKVYDVRKMIAKSEQEIGKATAKYFFYSNIMNFFKTEITLANGEIRKRPLIETNGETGEIVWDKGRDFATVRKVLSMPQVNIVKKTEVQTGGFSKESILPKRNSDKLIARKKDWDPKKYGGFDSPTVAYSVLVVAKVEKGKSKKLKSVKELLGITIMERSSFEKNPIDFLEAKGYKEVKKDLIIKLPKYSLFELENGRKRMLASAGELQKGNELALPSKYVNFLYLASHYEKLKGSPEDNEQKQLFVEQHKHYLDEIIEQISEFSKRVILADANLDKVLSAYNKHRDKPIREQAENIIHLFTLTNLGAPAAFKYFDTTIDRKRYTSTKEVLDATLIHQSITGLYETRIDLSQLGGDGGGGGGSGGGGSGGGGSGGMDLLKPLTVERKGVKIKGYWNSQADITCVPKDLLQGEEPVRQQNVTTIHGTQEGDVYYVNLKIDGRRINTEVIGTTLDYAIITPGDVPWILKKPLELTIKLDLEEQQGTLLNNSILSKKGKEELKQLFEKYSALWQSWENQVGHRRIRPHKIATGTVKPTPQKQYHINPKAKPDIQIVINDLLKQGVLIQKESTMNTPVYPVPKPNGRWRMVLDYRAVNKVTPLIAVQNQHSYGILGSLFKGRYKTTIDLSNGFWAHPIVPEDYWITAFTWQGKQYCWTVLPQGFLNSPGLFNGDVVDLLQGIPNVEVYVDDVYISHDSEKEHLEYLDILFNRLKEAGYIISLKKSNIANSIVDFLGFQITNEGRGLTDTFKEKLENITAPTTLKQLQSILGLLNFARNFIPDFTELIAPLYALIPKSPKNYVPWQIEHSTTLETLITKLNGAEYLQGRKGDKTLIMKVNASYTTGYIRYYNEGEKKPISYVSIVFSKTELKFTELEKLLTTVHKGLLKALDLSMGQNIHVYSPIVSMQNIQKTPQTAKKALASRWLSWLSYLEDPRIRFFYDPQMPALKDLPAVDTGKDNKKHPSNFQHIFYTDGSAITSPTKEGHLNAGMGIVYFINKDGNLQKQQEWSISLGNHTAQFAEIAAFEFALKKCLPLGGNILVVTDSNYVAKAYNEELDVWASNGFVNNRKKPLKHISKWKSVADLKRLRPDVVVTHEPGHQKLDSSPHAYGNNLADQLATQASFKVHAGKRTADGSEFEKRTADGSEFESPKKKAKVE

SEQ ID NO: 1126 - protein, 2177 aa, synthetic construct
MPAAKRVKLDGGDKKYSIGLDIGTNSVGWAVITDEYKVPSKKFKVLGNTDRHSIKKNLIGALLFDSGETAEATRLKRTARRRYTRRKNRICYLQEIFSNEMAKVDDSFFHRLEESFLVEEDKKHERHPIFGNIVDEVAYHEKYPTIYHLRKKLVDSTDKADLRLIYLALAHMIKFRGHFLIEGDLNPDNSDVDKLFIQLVQTYNQLFEENPINASGVDAKAILSARLSKSRRLENLIAQLPGEKKNGLFGNLIALSLGLTPNFKSNFDLAEDAKLQLSKDTYDDDLDNLLAQIGDQYADLFLAAKNLSDAILLSDILRVNTEITKAPLSASMIKRYDEHHQDLTLLKALVRQQLPEKYKEIFFDQSKNGYAGYIDGGASQEEFYKFIKPILEKMDGTEELLVKLNREDLLRKQRTFDNGSIPHQIHLGELHAILRRQEDFYPFLKDNREKIEKILTFRIPYYVGPLARGNSRFAWMTRKSEETITPWNFEEVVDKGASAQSFIERMTNFDKNLPNEKVLPKHSLLYEYFTVYNELTKVKYVTEGMRKPAFLSGEQKKAIVDLLFKTNRKVTVKQLKEDYFKKIECFDSVEISGVEDRFNASLGTYHDLLKIIKDKDFLDNEENEDILEDIVLTLTLFEDREMIEERLKTYAHLFDDKVMKQLKRRRYTGWGRLSRKLINGIRDKQSGKTILDFLKSDGFANRNFMQLIHDDSLTFKEDIQKAQVSGQGDSLHEHIANLAGSPAIKKGILQTVKVVDELVKVMGRHKPENIVIEMARENQTTQKGQKNSRERMKRIEEGIKELGSQILKEHPVENTQLQNEKLYLYYLQNGRDMYVDQELDINRLSDYDVDHIVPQSFLKDDSIDNKVLTRSDKARGKSDNVPSEEVVKKMKNYWRQLLNAKLITQRKFDNLTKAERGGLSELDKAGFIKRQLVETRQITKHVAQILDSRMNTKYDENDKLIREVKVITLKSKLVSDFRKDFQFYKVREINNYHHAHDAYLNAVVGTALIKKYPKLESEFVYGDYKVYDVRKMIAKSEQEIGKATAKYFFYSNIMNFFKTEITLANGEIRKRPLIETNGETGEIVWDKGRDFATVRKVLSMPQVNIVKKTEVQTGGFSKESILPKRNSDKLIARKKDWDPKKYGGFDSPTVAYSVLVVAKVEKGKSKKLKSVKELLGITIMERSSFEKNPIDFLEAKGYKEVKKDLIIKLPKYSLFELENGRKRMLASAGELQKGNELALPSKYVNFLYLASHYEKLKGSPEDNEQKQLFVEQHKHYLDEIIEQISEFSKRVILADANLDKVLSAYNKHRDKPIREQAENIIHLFTLTNLGAPAAFKYFDTTIDRKRYTSTKEVLDATLIHQSITGLYETRIDLSQLGGDGGEAAAKEAAAKEAAAKGGMDLLKPLTVERKGVKIKGYWNSQADITCVPKDLLQGEEPVRQQNVTTIHGTQEGDVYYVNLKIDGRRINTEVIGTTLDYAIITPGDVPWILKKPLELTIKLDLEEQQGTLLNNSILSKKGKEELKQLFEKYSALWQSWENQVGHRRIRPHKIATGTVKPTPQKQYHINPKAKPDIQIVINDLLKQGVLIQKESTMNTPVYPVPKPNGRWRMVLDYRAVNKVTPLIAVQNQHSYGILGSLFKGRYKTTIDLSNGFWAHPIVPEDYWITAFTWQGKQYCWTVLPQGFLNSPGLFNGDVVDLLQGIPNVEVYVDDVYISHDSEKEHLEYLDILFNRLKEAGYIISLKKSNIANSIVDFLGFQITNEGRGLTDTFKEKLENITAPTTLKQLQSILGLLNFARNFIPDFTELIAPLYALIPKSPKNYVPWQIEHSTTLETLITKLNGAEYLQGRKGDKTLIMKVNASYTTGYIRYYNEGEKKPISYVSIVFSKTELKFTELEKLLTTVHKGLLKALDLSMGQNIHVYSPIVSMQNIQKTPQTAKKALASRWLSWLSYLEDPRIRFFYDPQMPALKDLPAVDTGKDNKKHPSNFQHIFYTDGSAITSPTKEGHLNAGMGIVYFINKDGNLQKQQEWSISLGNHTAQFAEIAAFEFALKKCLPLGGNILVVTDSNYVAKAYNEELDVWASNGFVNNRKKPLKHISKWKSVADLKRLRPDVVVTHEPGHQKLDSSPHAYGNNLADQLATQASFKVHAGKRTADGSEFEKRTADGSEFESPKKKAKVE

SEQ ID NO: 1127 - protein, 2173 aa, synthetic construct
MPAAKRVKLDGGDKKYSIGLDIGTNSVGWAVITDEYKVPSKKFKVLGNTDRHSIKKNLIGALLFDSGETAEATRLKRTARRRYTRRKNRICYLQEIFSNEMAKVDDSFFHRLEESFLVEEDKKHERHPIFGNIVDEVAYHEKYPTIYHLRKKLVDSTDKADLRLIYLALAHMIKFRGHFLIEGDLNPDNSDVDKLFIQLVQTYNQLFEENPINASGVDAKAILSARLSKSRRLENLIAQLPGEKKNGLFGNLIALSLGLTPNFKSNFDLAEDAKLQLSKDTYDDDLDNLLAQIGDQYADLFLAAKNLSDAILLSDILRVNTEITKAPLSASMIKRYDEHHQDLTLLKALVRQQLPEKYKEIFFDQSKNGYAGYIDGGASQEEFYKFIKPILEKMDGTEELLVKLNREDLLRKQRTFDNGSIPHQIHLGELHAILRRQEDFYPFLKDNREKIEKILTFRIPYYVGPLARGNSRFAWMTRKSEETITPWNFEEVVDKGASAQSFIERMTNFDKNLPNEKVLPKHSLLYEYFTVYNELTKVKYVTEGMRKPAFLSGEQKKAIVDLLFKTNRKVTVKQLKEDYFKKIECFDSVEISGVEDRFNASLGTYHDLLKIIKDKDFLDNEENEDILEDIVLTLTLFEDREMIEERLKTYAHLFDDKVMKQLKRRRYTGWGRLSRKLINGIRDKQSGKTILDFLKSDGFANRNFMQLIHDDSLTFKEDIQKAQVSGQGDSLHEHIANLAGSPAIKKGILQTVKVVDELVKVMGRHKPENIVIEMARENQTTQKGQKNSRERMKRIEEGIKELGSQILKEHPVENTQLQNEKLYLYYLQNGRDMYVDQELDINRLSDYDVDHIVPQSFLKDDSIDNKVLTRSDKARGKSDNVPSEEVVKKMKNYWRQLLNAKLITQRKFDNLTKAERGGLSELDKAGFIKRQLVETRQITKHVAQILDSRMNTKYDENDKLIREVKVITLKSKLVSDFRKDFQFYKVREINNYHHAHDAYLNAVVGTALIKKYPKLESEFVYGDYKVYDVRKMIAKSEQEIGKATAKYFFYSNIMNFFKTEITLANGEIRKRPLIETNGETGEIVWDKGRDFATVRKVLSMPQVNIVKKTEVQTGGFSKESILPKRNSDKLIARKKDWDPKKYGGFDSPTVAYSVLVVAKVEKGKSKKLKSVKELLGITIMERSSFEKNPIDFLEAKGYKEVKKDLIIKLPKYSLFELENGRKRMLASAGELQKGNELALPSKYVNFLYLASHYEKLKGSPEDNEQKQLFVEQHKHYLDEIIEQISEFSKRVILADANLDKVLSAYNKHRDKPIREQAENIIHLFTLTNLGAPAAFKYFDTTIDRKRYTSTKEVLDATLIHQSITGLYETRIDLSQLGGDGGEAAAKGSSGGSGGMDLLKPLTVERKGVKIKGYWNSQADITCVPKDLLQGEEPVRQQNVTTIHGTQEGDVYYVNLKIDGRRINTEVIGTTLDYAIITPGDVPWILKKPLELTIKLDLEEQQGTLLNNSILSKKGKEELKQLFEKYSALWQSWENQVGHRRIRPHKIATGTVKPTPQKQYHINPKAKPDIQIVINDLLKQGVLIQKESTMNTPVYPVPKPNGRWRMVLDYRAVNKVTPLIAVQNQHSYGILGSLFKGRYKTTIDLSNGFWAHPIVPEDYWITAFTWQGKQYCWTVLPQGFLNSPGLFNGDVVDLLQGIPNVEVYVDDVYISHDSEKEHLEYLDILFNRLKEAGYIISLKKSNIANSIVDFLGFQITNEGRGLTDTFKEKLENITAPTTLKQLQSILGLLNFARNFIPDFTELIAPLYALIPKSPKNYVPWQIEHSTTLETLITKLNGAEYLQGRKGDKTLIMKVNASYTTGYIRYYNEGEKKPISYVSIVFSKTELKFTELEKLLTTVHKGLLKALDLSMGQNIHVYSPIVSMQNIQKTPQTAKKALASRWLSWLSYLEDPRIRFFYDPQMPALKDLPAVDTGKDNKKHPSNFQHIFYTDGSAITSPTKEGHLNAGMGIVYFINKDGNLQKQQEWSISLGNHTAQFAEIAAFEFALKKCLPLGGNILVVTDSNYVAKAYNEELDVWASNGFVNNRKKPLKHISKWKSVADLKRLRPDVVVTHEPGHQKLDSSPHAYGNNLADQLATQASFKVHAGKRTADGSEFEKRTADGSEFESPKKKAKVE

SEQ ID NO: 1128 - protein, 2171 aa, synthetic construct
MPAAKRVKLDGGDKKYSIGLDIGTNSVGWAVITDEYKVPSKKFKVLGNTDRHSIKKNLIGALLFDSGETAEATRLKRTARRRYTRRKNRICYLQEIFSNEMAKVDDSFFHRLEESFLVEEDKKHERHPIFGNIVDEVAYHEKYPTIYHLRKKLVDSTDKADLRLIYLALAHMIKFRGHFLIEGDLNPDNSDVDKLFIQLVQTYNQLFEENPINASGVDAKAILSARLSKSRRLENLIAQLPGEKKNGLFGNLIALSLGLTPNFKSNFDLAEDAKLQLSKDTYDDDLDNLLAQIGDQYADLFLAAKNLSDAILLSDILRVNTEITKAPLSASMIKRYDEHHQDLTLLKALVRQQLPEKYKEIFFDQSKNGYAGYIDGGASQEEFYKFIKPILEKMDGTEELLVKLNREDLLRKQRTFDNGSIPHQIHLGELHAILRRQEDFYPFLKDNREKIEKILTFRIPYYVGPLARGNSRFAWMTRKSEETITPWNFEEVVDKGASAQSFIERMTNFDKNLPNEKVLPKHSLLYEYFTVYNELTKVKYVTEGMRKPAFLSGEQKKAIVDLLFKTNRKVTVKQLKEDYFKKIECFDSVEISGVEDRFNASLGTYHDLLKIIKDKDFLDNEENEDILEDIVLTLTLFEDREMIEERLKTYAHLFDDKVMKQLKRRRYTGWGRLSRKLINGIRDKQSGKTILDFLKSDGFANRNFMQLIHDDSLTFKEDIQKAQVSGQGDSLHEHIANLAGSPAIKKGILQTVKVVDELVKVMGRHKPENIVIEMARENQTTQKGQKNSRERMKRIEEGIKELGSQILKEHPVENTQLQNEKLYLYYLQNGRDMYVDQELDINRLSDYDVDHIVPQSFLKDDSIDNKVLTRSDKARGKSDNVPSEEVVKKMKNYWRQLLNAKLITQRKFDNLTKAERGGLSELDKAGFIKRQLVETRQITKHVAQILDSRMNTKYDENDKLIREVKVITLKSKLVSDFRKDFQFYKVREINNYHHAHDAYLNAVVGTALIKKYPKLESEFVYGDYKVYDVRKMIAKSEQEIGKATAKYFFYSNIMNFFKTEITLANGEIRKRPLIETNGETGEIVWDKGRDFATVRKVLSMPQVNIVKKTEVQTGGFSKESILPKRNSDKLIARKKDWDPKKYGGFDSPTVAYSVLVVAKVEKGKSKKLKSVKELLGITIMERSSFEKNPIDFLEAKGYKEVKKDLIIKLPKYSLFELENGRKRMLASAGELQKGNELALPSKYVNFLYLASHYEKLKGSPEDNEQKQLFVEQHKHYLDEIIEQISEFSKRVILADANLDKVLSAYNKHRDKPIREQAENIIHLFTLTNLGAPAAFKYFDTTIDRKRYTSTKEVLDATLIHQSITGLYETRIDLSQLGGDGGGGSGGGPAPGGMDLLKPLTVERKGVKIKGYWNSQADITCVPKDLLQGEEPVRQQNVTTIHGTQEGDVYYVNLKIDGRRINTEVIGTTLDYAIITPGDVPWILKKPLELTIKLDLEEQQGTLLNNSILSKKGKEELKQLFEKYSALWQSWENQVGHRRIRPHKIATGTVKPTPQKQYHINPKAKPDIQIVINDLLKQGVLIQKESTMNTPVYPVPKPNGRWRMVLDYRAVNKVTPLIAVQNQHSYGILGSLFKGRYKTTIDLSNGFWAHPIVPEDYWITAFTWQGKQYCWTVLPQGFLNSPGLFNGDVVDLLQGIPNVEVYVDDVYISHDSEKEHLEYLDILFNRLKEAGYIISLKKSNIANSIVDFLGFQITNEGRGLTDTFKEKLENITAPTTLKQLQSILGLLNFARNFIPDFTELIAPLYALIPKSPKNYVPWQIEHSTTLETLITKLNGAEYLQGRKGDKTLIMKVNASYTTGYIRYYNEGEKKPISYVSIVFSKTELKFTELEKLLTTVHKGLLKALDLSMGQNIHVYSPIVSMQNIQKTPQTAKKALASRWLSWLSYLEDPRIRFFYDPQMPALKDLPAVDTGKDNKKHPSNFQHIFYTDGSAITSPTKEGHLNAGMGIVYFINKDGNLQKQQEWSISLGNHTAQFAEIAAFEFALKKCLPLGGNILVVTDSNYVAKAYNEELDVWASNGFVNNRKKPLKHISKWKSVADLKRLRPDVVVTHEPGHQKLDSSPHAYGNNLADQLATQASFKVHAGKRTADGSEFEKRTADGSEFESPKKKAKVE

SEQ ID NO: 1129 - protein, 2208 aa, synthetic construct
MPAAKRVKLDGGDKKYSIGLDIGTNSVGWAVITDEYKVPSKKFKVLGNTDRHSIKKNLIGALLFDSGETAEATRLKRTARRRYTRRKNRICYLQEIFSNEMAKVDDSFFHRLEESFLVEEDKKHERHPIFGNIVDEVAYHEKYPTIYHLRKKLVDSTDKADLRLIYLALAHMIKFRGHFLIEGDLNPDNSDVDKLFIQLVQTYNQLFEENPINASGVDAKAILSARLSKSRRLENLIAQLPGEKKNGLFGNLIALSLGLTPNFKSNFDLAEDAKLQLSKDTYDDDLDNLLAQIGDQYADLFLAAKNLSDAILLSDILRVNTEITKAPLSASMIKRYDEHHQDLTLLKALVRQQLPEKYKEIFFDQSKNGYAGYIDGGASQEEFYKFIKPILEKMDGTEELLVKLNREDLLRKQRTFDNGSIPHQIHLGELHAILRRQEDFYPFLKDNREKIEKILTFRIPYYVGPLARGNSRFAWMTRKSEETITPWNFEEVVDKGASAQSFIERMTNFDKNLPNEKVLPKHSLLYEYFTVYNELTKVKYVTEGMRKPAFLSGEQKKAIVDLLFKTNRKVTVKQLKEDYFKKIECFDSVEISGVEDRFNASLGTYHDLLKIIKDKDFLDNEENEDILEDIVLTLTLFEDREMIEERLKTYAHLFDDKVMKQLKRRRYTGWGRLSRKLINGIRDKQSGKTILDFLKSDGFANRNFMQLIHDDSLTFKEDIQKAQVSGQGDSLHEHIANLAGSPAIKKGILQTVKVVDELVKVMGRHKPENIVIEMARENQTTQKGQKNSRERMKRIEEGIKELGSQILKEHPVENTQLQNEKLYLYYLQNGRDMYVDQELDINRLSDYDVDHIVPQSFLKDDSIDNKVLTRSDKARGKSDNVPSEEVVKKMKNYWRQLLNAKLITQRKFDNLTKAERGGLSELDKAGFIKRQLVETRQITKHVAQILDSRMNTKYDENDKLIREVKVITLKSKLVSDFRKDFQFYKVREINNYHHAHDAYLNAVVGTALIKKYPKLESEFVYGDYKVYDVRKMIAKSEQEIGKATAKYFFYSNIMNFFKTEITLANGEIRKRPLIETNGETGEIVWDKGRDFATVRKVLSMPQVNIVKKTEVQTGGFSKESILPKRNSDKLIARKKDWDPKKYGGFDSPTVAYSVLVVAKVEKGKSKKLKSVKELLGITIMERSSFEKNPIDFLEAKGYKEVKKDLIIKLPKYSLFELENGRKRMLASAGELQKGNELALPSKYVNFLYLASHYEKLKGSPEDNEQKQLFVEQHKHYLDEIIEQISEFSKRVILADANLDKVLSAYNKHRDKPIREQAENIIHLFTLTNLGAPAAFKYFDTTIDRKRYTSTKEVLDATLIHQSITGLYETRIDLSQLGGDGGAEAAAKEAAAKEAAAKEAAAKALEAEAAAKEAAAKEAAAKEAAAKAGGMDLLKPLTVERKGVKIKGYWNSQADITCVPKDLLQGEEPVRQQNVTTIHGTQEGDVYYVNLKIDGRRINTEVIGTTLDYAIITPGDVPWILKKPLELTIKLDLEEQQGTLLNNSILSKKGKEELKQLFEKYSALWQSWENQVGHRRIRPHKIATGTVKPTPQKQYHINPKAKPDIQIVINDLLKQGVLIQKESTMNTPVYPVPKPNGRWRMVLDYRAVNKVTPLIAVQNQHSYGILGSLFKGRYKTTIDLSNGFWAHPIVPEDYWITAFTWQGKQYCWTVLPQGFLNSPGLFNGDVVDLLQGIPNVEVYVDDVYISHDSEKEHLEYLDILFNRLKEAGYIISLKKSNIANSIVDFLGFQITNEGRGLTDTFKEKLENITAPTTLKQLQSILGKLNFARNFIPDFTELIAPLYALIPKSPKNYVPWQIEHSTTLETLITKLNGAEYLQGRKGDKTLIMKVNASYTTGYIRYYNEGEKKPISYVSIVFSKTELKFTELEKLLTTVHKGLLKALDLSMGQNIHVYSPIVSMQNIQKTPQTAKKALASRWLSWLSYLEDPRIRFFYDPQMPALKDLPAVDTGKDNKKHPSNFQHIFYTDGSAITSPTKEGHLNAGMGIVYFINKDGNLQKQQEWSISLGNHTAQFAEIAAFEFALKKCLPLGGNILVVTDSNYVAKAYNEELDVWASNGFVNNRKKPLKHISKWKSVADLKRLRPDVVVTHEPGHQKLDSSPHAYGNNLADQLATQASFKVHAGKRTADGSEFEKRTADGSEFESPKKKAKVE

SEQ ID NO: 1130 - protein, 2171 aa, synthetic construct
MPAAKRVKLDGGDKKYSIGLDIGTNSVGWAVITDEYKVPSKKFKVLGNTDRHSIKKNLIGALLFDSGETAEATRLKRTARRRYTRRKNRICYLQEIFSNEMAKVDDSFFHRLEESFLVEEDKKHERHPIFGNIVDEVAYHEKYPTIYHLRKKLVDSTDKADLRLIYLALAHMIKFRGHFLIEGDLNPDNSDVDKLFIQLVQTYNQLFEENPINASGVDAKAILSARLSKSRRLENLIAQLPGEKKNGLFGNLIALSLGLTPNFKSNFDLAEDAKLQLSKDTYDDDLDNLLAQIGDQYADLFLAAKNLSDAILLSDILRVNTEITKAPLSASMIKRYDEHHQDLTLLKALVRQQLPEKYKEIFFDQSKNGYAGYIDGGASQEEFYKFIKPILEKMDGTEELLVKLNREDLLRKQRTFDNGSIPHQIHLGELHAILRRQEDFYPFLKDNREKIEKILTFRIPYYVGPLARGNSRFAWMTRKSEETITPWNFEEVVDKGASAQSFIERMTNFDKNLPNEKVLPKHSLLYEYFTVYNELTKVKYVTEGMRKPAFLSGEQKKAIVDLLFKTNRKVTVKQLKEDYFKKIECFDSVEISGVEDRFNASLGTYHDLLKIIKDKDFLDNEENEDILEDIVLTLTLFEDREMIEERLKTYAHLFDDKVMKQLKRRRYTGWGRLSRKLINGIRDKQSGKTILDFLKSDGFANRNFMQLIHDDSLTFKEDIQKAQVSGQGDSLHEHIANLAGSPAIKKGILQTVKVVDELVKVMGRHKPENIVIEMARENQTTQKGQKNSRERMKRIEEGIKELGSQILKEHPVENTQLQNEKLYLYYLQNGRDMYVDQELDINRLSDYDVDHIVPQSFLKDDSIDNKVLTRSDKARGKSDNVPSEEVVKKMKNYWRQLLNAKLITQRKFDNLTKAERGGLSELDKAGFIKRQLVETRQITKHVAQILDSRMNTKYDENDKLIREVKVITLKSKLVSDFRKDFQFYKVREINNYHHAHDAYLNAVVGTALIKKYPKLESEFVYGDYKVYDVRKMIAKSEQEIGKATAKYFFYSNIMNFFKTEITLANGEIRKRPLIETNGETGEIVWDKGRDFATVRKVLSMPQVNIVKKTEVQTGGFSKESILPKRNSDKLIARKKDWDPKKYGGFDSPTVAYSVLVVAKVEKGKSKKLKSVKELLGITIMERSSFEKNPIDFLEAKGYKEVKKDLIIKLPKYSLFELENGRKRMLASAGELQKGNELALPSKYVNFLYLASHYEKLKGSPEDNEQKQLFVEQHKHYLDEIIEQISEFSKRVILADANLDKVLSAYNKHRDKPIREQAENIIHLFTLTNLGAPAAFKYFDTTIDRKRYTSTKEVLDATLIHQSITGLYETRIDLSQLGGDGGGSSPAPGGSGGMDLLKPLTVERKGVKIKGYWNSQADITCVPKDLLQGEEPVRQQNVTTIHGTQEGDVYYVNLKIDGRRINTEVIGTTLDYAIITPGDVPWILKKPLELTIKLDLEEQQGTLLNNSILSKKGKEELKQLFEKYSALWQSWENQVGHRRIRPHKIATGTVKPTPQKQYHINPKAKPDIQIVINDLLKQGVLIQKESTMNTPVYPVPKPNGRWRMVLDYRAVNKVTPLIAVQNQHSYGILGSLFKGRYKTTIDLSNGFWAHPIVPEDYWITAFTWQGKQYCWTVLPQGFLNSPGLFNGDVVDLLQGIPNVEVYVDDVYISHDSEKEHLEYLDILFNRLKEAGYIISLKKSNIANSIVDFLGFQITNEGRGLTDTFKEKLENITAPTTLKQLQSILGKLNFARNFIPDFTELIAPLYALIPKSPKNYVPWQIEHSTTLETLITKLNGAEYLQGRKGDKTLIMKVNASYTTGYIRYYNEGEKKPISYVSIVFSKTELKFTELEKLLTTVHKGLLKALDLSMGQNIHVYSPIVSMQNIQKTPQTAKKALASRWLSWLSYLEDPRIRFFYDPQMPALKDLPAVDTGKDNKKHPSNFQHIFYTDGSAITSPTKEGHLNAGMGIVYFINKDGNLQKQQEWSISLGNHTAQFAEIAAFEFALKKCLPLGGNILVVTDSNYVAKAYNEELDVWASNGFVNNRKKPLKHISKWKSVADLKRLRPDVVVTHEPGHQKLDSSPHAYGNNLADQLATQASFKVHAGKRTADGSEFEKRTADGSEFESPKKKAKVE

SEQ ID NO: 1131 - protein, 2182 aa, synthetic construct
MPAAKRVKLDGGDKKYSIGLDIGTNSVGWAVITDEYKVPSKKFKVLGNTDRHSIKKNLIGALLFDSGETAEATRLKRTARRRYTRRKNRICYLQEIFSNEMAKVDDSFFHRLEESFLVEEDKKHERHPIFGNIVDEVAYHEKYPTIYHLRKKLVDSTDKADLRLIYLALAHMIKFRGHFLIEGDLNPDNSDVDKLFIQLVQTYNQLFEENPINASGVDAKAILSARLSKSRRLENLIAQLPGEKKNGLFGNLIALSLGLTPNFKSNFDLAEDAKLQLSKDTYDDDLDNLLAQIGDQYADLFLAAKNLSDAILLSDILRVNTEITKAPLSASMIKRYDEHHQDLTLLKALVRQQLPEKYKEIFFDQSKNGYAGYIDGGASQEEFYKFIKPILEKMDGTEELLVKLNREDLLRKQRTFDNGSIPHQIHLGELHAILRRQEDFYPFLKDNREKIEKILTFRIPYYVGPLARGNSRFAWMTRKSEETITPWNFEEVVDKGASAQSFIERMTNFDKNLPNEKVLPKHSLLYEYFTVYNELTKVKYVTEGMRKPAFLSGEQKKAIVDLLFKTNRKVTVKQLKEDYFKKIECFDSVEISGVEDRFNASLGTYHDLLKIIKDKDFLDNEENEDILEDIVLTLTLFEDREMIEERLKTYAHLFDDKVMKQLKRRRYTGWGRLSRKLINGIRDKQSGKTILDFLKSDGFANRNFMQLIHDDSLTFKEDIQKAQVSGQGDSLHEHIANLAGSPAIKKGILQTVKVVDELVKVMGRHKPENIVIEMARENQTTQKGQKNSRERMKRIEEGIKELGSQILKEHPVENTQLQNEKLYLYYLQNGRDMYVDQELDINRLSDYDVDHIVPQSFLKDDSIDNKVLTRSDKARGKSDNVPSEEVVKKMKNYWRQLLNAKLITQRKFDNLTKAERGGLSELDKAGFIKRQLVETRQITKHVAQILDSRMNTKYDENDKLIREVKVITLKSKLVSDFRKDFQFYKVREINNYHHAHDAYLNAVVGTALIKKYPKLESEFVYGDYKVYDVRKMIAKSEQEIGKATAKYFFYSNIMNFFKTEITLANGEIRKRPLIETNGETGEIVWDKGRDFATVRKVLSMPQVNIVKKTEVQTGGFSKESILPKRNSDKLIARKKDWDPKKYGGFDSPTVAYSVLVVAKVEKGKSKKLKSVKELLGITIMERSSFEKNPIDFLEAKGYKEVKKDLIIKLPKYSLFELENGRKRMLASAGELQKGNELALPSKYVNFLYLASHYEKLKGSPEDNEQKQLFVEQHKHYLDEIIEQISEFSKRVILADANLDKVLSAYNKHRDKPIREQAENIIHLFTLTNLGAPAAFKYFDTTIDRKRYTSTKEVLDATLIHQSITGLYETRIDLSQLGGDGGGGGGSGGGGSGGGGSGGGGSGGMDLLKPLTVERKGVKIKGYWNSQADITCVPKDLLQGEEPVRQQNVTTIHGTQEGDVYYVNLKIDGRRINTEVIGTTLDYAIITPGDVPWILKKPLELTIKLDLEEQQGTLLNNSILSKKGKEELKQLFEKYSALWQSWENQVGHRRIRPHKIATGTVKPTPQKQYHINPKAKPDIQIVINDLLKQGVLIQKESTMNTPVYPVPKPNGRWRMVLDYRAVNKVTPLIAVQNQHSYGILGSLFKGRYKTTIDLSNGFWAHPIVPEDYWITAFTWQGKQYCWTVLPQGFLNSPGLFNGDVVDLLQGIPNVEVYVDDVYISHDSEKEHLEYLDILFNRLKEAGYIISLKKSNIANSIVDFLGFQITNEGRGLTDTFKEKLENITAPTTLKQLQSILGKLNFARNFIPDFTELIAPLYALIPKSPKNYVPWQIEHSTTLETLITKLNGAEYLQGRKGDKTLIMKVNASYTTGYIRYYNEGEKKPISYVSIVFSKTELKFTELEKLLTTVHKGLLKALDLSMGQNIHVYSPIVSMQNIQKTPQTAKKALASRWLSWLSYLEDPRIRFFYDPQMPALKDLPAVDTGKDNKKHPSNFQHIFYTDGSAITSPTKEGHLNAGMGIVYFINKDGNLQKQQEWSISLGNHTAQFAEIAAFEFALKKCLPLGGNILVVTDSNYVAKAYNEELDVWASNGFVNNRKKPLKHISKWKSVADLKRLRPDVVVTHEPGHQKLDSSPHAYGNNLADQLATQASFKVHAGKRTADGSEFEKRTADGSEFESPKKKAKVE

SEQ ID NO: 1132 - protein, 2167 aa, synthetic construct
MPAAKRVKLDGGDKKYSIGLDIGTNSVGWAVITDEYKVPSKKFKVLGNTDRHSIKKNLIGALLFDSGETAEATRLKRTARRRYTRRKNRICYLQEIFSNEMAKVDDSFFHRLEESFLVEEDKKHERHPIFGNIVDEVAYHEKYPTIYHLRKKLVDSTDKADLRLIYLALAHMIKFRGHFLIEGDLNPDNSDVDKLFIQLVQTYNQLFEENPINASGVDAKAILSARLSKSRRLENLIAQLPGEKKNGLFGNLIALSLGLTPNFKSNFDLAEDAKLQLSKDTYDDDLDNLLAQIGDQYADLFLAAKNLSDAILLSDILRVNTEITKAPLSASMIKRYDEHHQDLTLLKALVRQQLPEKYKEIFFDQSKNGYAGYIDGGASQEEFYKFIKPILEKMDGTEELLVKLNREDLLRKQRTFDNGSIPHQIHLGELHAILRRQEDFYPFLKDNREKIEKILTFRIPYYVGPLARGNSRFAWMTRKSEETITPWNFEEVVDKGASAQSFIERMTNFDKNLPNEKVLPKHSLLYEYFTVYNELTKVKYVTEGMRKPAFLSGEQKKAIVDLLFKTNRKVTVKQLKEDYFKKIECFDSVEISGVEDRFNASLGTYHDLLKIIKDKDFLDNEENEDILEDIVLTLTLFEDREMIEERLKTYAHLFDDKVMKQLKRRRYTGWGRLSRKLINGIRDKQSGKTILDFLKSDGFANRNFMQLIHDDSLTFKEDIQKAQVSGQGDSLHEHIANLAGSPAIKKGILQTVKVVDELVKVMGRHKPENIVIEMARENQTTQKGQKNSRERMKRIEEGIKELGSQILKEHPVENTQLQNEKLYLYYLQNGRDMYVDQELDINRLSDYDVDHIVPQSFLKDDSIDNKVLTRSDKARGKSDNVPSEEVVKKMKNYWRQLLNAKLITQRKFDNLTKAERGGLSELDKAGFIKRQLVETRQITKHVAQILDSRMNTKYDENDKLIREVKVITLKSKLVSDFRKDFQFYKVREINNYHHAHDAYLNAVVGTALIKKYPKLESEFVYGDYKVYDVRKMIAKSEQEIGKATAKYFFYSNIMNFFKTEITLANGEIRKRPLIETNGETGEIVWDKGRDFATVRKVLSMPQVNIVKKTEVQTGGFSKESILPKRNSDKLIARKKDWDPKKYGGFDSPTVAYSVLVVAKVEKGKSKKLKSVKELLGITIMERSSFEKNPIDFLEAKGYKEVKKDLIIKLPKYSLFELENGRKRMLASAGELQKGNELALPSKYVNFLYLASHYEKLKGSPEDNEQKQLFVEQHKHYLDEIIEQISEFSKRVILADANLDKVLSAYNKHRDKPIREQAENIIHLFTLTNLGAPAAFKYFDTTIDRKRYTSTKEVLDATLIHQSITGLYETRIDLSQLGGDGGEAAAKGGMDLLKPLTVERKGVKIKGYWNSQADITCVPKDLLQGEEPVRQQNVTTIHGTQEGDVYYVNLKIDGRRINTEVIGTTLDYAIITPGDVPWILKKPLELTIKLDLEEQQGTLLNNSILSKKGKEELKQLFEKYSALWQSWENQVGHRRIRPHKIATGTVKPTPQKQYHINPKAKPDIQIVINDLLKQGVLIQKESTMNTPVYPVPKPNGRWRMVLDYRAVNKVTPLIAVQNQHSYGILGSLFKGRYKTTIDLSNGFWAHPIVPEDYWITAFTWQGKQYCWTVLPQGFLNSPGLFNGDVVDLLQGIPNVEVYVDDVYISHDSEKEHLEYLDILFNRLKEAGYIISLKKSNIANSIVDFLGFQITNEGRGLTDTFKEKLENITAPTTLKQLQSILGKLNFARNFIPDFTELIAPLYALIPKSPKNYVPWQIEHSTTLETLITKLNGAEYLQGRKGDKTLIMKVNASYTTGYIRYYNEGEKKPISYVSIVFSKTELKFTELEKLLTTVHKGLLKALDLSMGQNIHVYSPIVSMQNIQKTPQTAKKALASRWLSWLSYLEDPRIRFFYDPQMPALKDLPAVDTGKDNKKHPSNFQHIFYTDGSAITSPTKEGHLNAGMGIVYFINKDGNLQKQQEWSISLGNHTAQFAEIAAFEFALKKCLPLGGNILVVTDSNYVAKAYNEELDVWASNGFVNNRKKPLKHISKWKSVADLKRLRPDVVVTHEPGHQKLDSSPHAYGNNLADQLATQASFKVHAGKRTADGSEFEKRTADGSEFESPKKKAKVE

SEQ ID NO: 1133 - protein, 2174 aa, synthetic construct
MPAAKRVKLDGGDKKYSIGLDIGTNSVGWAVITDEYKVPSKKFKVLGNTDRHSIKKNLIGALLFDSGETAEATRLKRTARRRYTRRKNRICYLQEIFSNEMAKVDDSFFHRLEESFLVEEDKKHERHPIFGNIVDEVAYHEKYPTIYHLRKKLVDSTDKADLRLIYLALAHMIKFRGHFLIEGDLNPDNSDVDKLFIQLVQTYNQLFEENPINASGVDAKAILSARLSKSRRLENLIAQLPGEKKNGLFGNLIALSLGLTPNFKSNFDLAEDAKLQLSKDTYDDDLDNLLAQIGDQYADLFLAAKNLSDAILLSDILRVNTEITKAPLSASMIKRYDEHHQDLTLLKALVRQQLPEKYKEIFFDQSKNGYAGYIDGGASQEEFYKFIKPILEKMDGTEELLVKLNREDLLRKQRTFDNGSIPHQIHLGELHAILRRQEDFYPFLKDNREKIEKILTFRIPYYVGPLARGNSRFAWMTRKSEETITPWNFEEVVDKGASAQSFIERMTNFDKNLPNEKVLPKHSLLYEYFTVYNELTKVKYVTEGMRKPAFLSGEQKKAIVDLLFKTNRKVTVKQLKEDYFKKIECFDSVEISGVEDRFNASLGTYHDLLKIIKDKDFLDNEENEDILEDIVLTLTLFEDREMIEERLKTYAHLFDDKVMKQLKRRRYTGWGRLSRKLINGIRDKQSGKTILDFLKSDGFANRNFMQLIHDDSLTFKEDIQKAQVSGQGDSLHEHIANLAGSPAIKKGILQTVKVVDELVKVMGRHKPENIVIEMARENQTTQKGQKNSRERMKRIEEGIKELGSQILKEHPVENTQLQNEKLYLYYLQNGRDMYVDQELDINRLSDYDVDHIVPQSFLKDDSIDNKVLTRSDKARGKSDNVPSEEVVKKMKNYWRQLLNAKLITQRKFDNLTKAERGGLSELDKAGFIKRQLVETRQITKHVAQILDSRMNTKYDENDKLIREVKVITLKSKLVSDFRKDFQFYKVREINNYHHAHDAYLNAVVGTALIKKYPKLESEFVYGDYKVYDVRKMIAKSEQEIGKATAKYFFYSNIMNFFKTEITLANGEIRKRPLIETNGETGEIVWDKGRDFATVRKVLSMPQVNIVKKTEVQTGGFSKESILPKRNSDKLIARKKDWDPKKYGGFDSPTVAYSVLVVAKVEKGKSKKLKSVKELLGITIMERSSFEKNPIDFLEAKGYKEVKKDLIIKLPKYSLFELENGRKRMLASAGELQKGNELALPSKYVNFLYLASHYEKLKGSPEDNEQKQLFVEQHKHYLDEIIEQISEFSKRVILADANLDKVLSAYNKHRDKPIREQAENIIHLFTLTNLGAPAAFKYFDTTIDRKRYTSTKEVLDATLIHQSITGLYETRIDLSQLGGDGGGSAGSAAGSGEFGGMDLLKPLTVERKGVKIKGYWNSQADITCVPKDLLQGEEPVRQQNVTTIHGTQEGDVYYVNLKIDGRRINTEVIGTTLDYAIITPGDVPWILKKPLELTIKLDLEEQQGTLLNNSILSKKGKEELKQLFEKYSALWQSWENQVGHRRIRPHKIATGTVKPTPQKQYHINPKAKPDIQIVINDLLKQGVLIQKESTMNTPVYPVPKPNGRWRMVLDYRAVNKVTPLIAVQNQHSYGILGSLFKGRYKTTIDLSNGFWAHPIVPEDYWITAFTWQGKQYCWTVLPQGFLNSPGLFNGDVVDLLQGIPNVEVYVDDVYISHDSEKEHLEYLDILFNRLKEAGYIISLKKSNIANSIVDFLGFQITNEGRGLTDTFKEKLENITAPTTLKQLQSILGKLNFARNFIPDFTELIAPLYALIPKSPKNYVPWQIEHSTTLETLITKLNGAEYLQGRKGDKTLIMKVNASYTTGYIRYYNEGEKKPISYVSIVFSKTELKFTELEKLLTTVHKGLLKALDLSMGQNIHVYSPIVSMQNIQKTPQTAKKALASRWLSWLSYLEDPRIRFFYDPQMPALKDLPAVDTGKDNKKHPSNFQHIFYTDGSAITSPTKEGHLNAGMGIVYFINKDGNLQKQQEWSISLGNHTAQFAEIAAFEFALKKCLPLGGNILVVTDSNYVAKAYNEELDVWASNGFVNNRKKPLKHISKWKSVADLKRLRPDVVVTHEPGHQKLDSSPHAYGNNLADQLATQASFKVHAGKRTADGSEFEKRTADGSEFESPKKKAKVE

SEQ ID NO: 1134 - protein, 2109 aa, synthetic construct
MPAAKRVKLDGGDKKYSIGLDIGTNSVGWAVITDEYKVPSKKFKVLGNTDRHSIKKNLIGALLFDSGETAEATRLKRTARRRYTRRKNRICYLQEIFSNEMAKVDDSFFHRLEESFLVEEDKKHERHPIFGNIVDEVAYHEKYPTIYHLRKKLVDSTDKADLRLIYLALAHMIKFRGHFLIEGDLNPDNSDVDKLFIQLVQTYNQLFEENPINASGVDAKAILSARLSKSRRLENLIAQLPGEKKNGLFGNLIALSLGLTPNFKSNFDLAEDAKLQLSKDTYDDDLDNLLAQIGDQYADLFLAAKNLSDAILLSDILRVNTEITKAPLSASMIKRYDEHHQDLTLLKALVRQQLPEKYKEIFFDQSKNGYAGYIDGGASQEEFYKFIKPILEKMDGTEELLVKLNREDLLRKQRTFDNGSIPHQIHLGELHAILRRQEDFYPFLKDNREKIEKILTFRIPYYVGPLARGNSRFAWMTRKSEETITPWNFEEVVDKGASAQSFIERMTNFDKNLPNEKVLPKHSLLYEYFTVYNELTKVKYVTEGMRKPAFLSGEQKKAIVDLLFKTNRKVTVKQLKEDYFKKIECFDSVEISGVEDRFNASLGTYHDLLKIIKDKDFLDNEENEDILEDIVLTLTLFEDREMIEERLKTYAHLFDDKVMKQLKRRRYTGWGRLSRKLINGIRDKQSGKTILDFLKSDGFANRNFMQLIHDDSLTFKEDIQKAQVSGQGDSLHEHIANLAGSPAIKKGILQTVKVVDELVKVMGRHKPENIVIEMARENQTTQKGQKNSRERMKRIEEGIKELGSQILKEHPVENTQLQNEKLYLYYLQNGRDMYVDQELDINRLSDYDVDHIVPQSFLKDDSIDNKVLTRSDKARGKSDNVPSEEVVKKMKNYWRQLLNAKLITQRKFDNLTKAERGGLSELDKAGFIKRQLVETRQITKHVAQILDSRMNTKYDENDKLIREVKVITLKSKLVSDFRKDFQFYKVREINNYHHAHDAYLNAVVGTALIKKYPKLESEFVYGDYKVYDVRKMIAKSEQEIGKATAKYFFYSNIMNFFKTEITLANGEIRKRPLIETNGETGEIVWDKGRDFATVRKVLSMPQVNIVKKTEVQTGGFSKESILPKRNSDKLIARKKDWDPKKYGGFDSPTVAYSVLVVAKVEKGKSKKLKSVKELLGITIMERSSFEKNPIDFLEAKGYKEVKKDLIIKLPKYSLFELENGRKRMLASAGELQKGNELALPSKYVNFLYLASHYEKLKGSPEDNEQKQLFVEQHKHYLDEIIEQISEFSKRVILADANLDKVLSAYNKHRDKPIREQAENIIHLFTLTNLGAPAAFKYFDTTIDRKRYTSTKEVLDATLIHQSITGLYETRIDLSQLGGDGGEAAAKEAAAKEAAAKEAAAKEAAAKGGTLQLEEEYRLFEPESTQKQEMDIWLKNFPQAWAETGGMGTAHCQAPVLIQLKATATPISIRQYPMPHEAYQGIKPHIRRMLDQGILKPCQSPWNTPLLPVKKPGTEDYRPVQDLREVNKRVEDIHPTVPNPYNLLSTLPPSHPWYTVLDLKDAFFCLRLHSESQLLFAFEWRDPEIGLSGQLTWTRLPQGFKNSPTLFDEALHSDLADFRVRYPALVLLQYVDDLLLAAATRTECLEGTKALLETLGNKGYRASAKKAQICLQEVTYLGYSLKDGQRWLTKARKEAILSIPVPKNSRQVREFLGTAGYCRLWIPGFAELAAPLYPLTRPGTLFQWGTEQQLAFEDIKKALLSSPALGLPDITKPFELFIDENSGFAKGVLVQKLGPWKRPVAYLSKKLDTVASGWPPCLRMVAAIAILVKDAGKLTLGQPLTILTSHPVEALVRQPPNKWLSNARMTHYQAMLLDAERVHFGPTVSLNPATLLPLPSGGNHHDCLQILAETHGTRPDLTDQPLPDADLTWYTDGSSFIRNGEREAGAAVTTESEVIWAAPLPPGTSAQRAELIALTQALKMAEGKKLTVYTDSRYAFATTHVHGEIYRRRGLLTSEGKEIKNKNEILALLEALFLPKRLSIIHCPGHQKGDSPQAKGNRLADDTAKKAATETHSSLTVLPAGKRTADGSEFEKRTADGSEFESPKKKAKVE

SEQ ID NO: 1135 - protein, 2095 aa, synthetic construct
MPAAKRVKLDGGDKKYSIGLDIGTNSVGWAVITDEYKVPSKKFKVLGNTDRHSIKKNLIGALLFDSGETAEATRLKRTARRRYTRRKNRICYLQEIFSNEMAKVDDSFFHRLEESFLVEEDKKHERHPIFGNIVDEVAYHEKYPTIYHLRKKLVDSTDKADLRLIYLALAHMIKFRGHFLIEGDLNPDNSDVDKLFIQLVQTYNQLFEENPINASGVDAKAILSARLSKSRRLENLIAQLPGEKKNGLFGNLIALSLGLTPNFKSNFDLAEDAKLQLSKDTYDDDLDNLLAQIGDQYADLFLAAKNLSDAILLSDILRVNTEITKAPLSASMIKRYDEHHQDLTLLKALVRQQLPEKYKEIFFDQSKNGYAGYIDGGASQEEFYKFIKPILEKMDGTEELLVKLNREDLLRKQRTFDNGSIPHQIHLGELHAILRRQEDFYPFLKDNREKIEKILTFRIPYYVGPLARGNSRFAWMTRKSEETITPWNFEEVVDKGASAQSFIERMTNFDKNLPNEKVLPKHSLLYEYFTVYNELTKVKYVTEGMRKPAFLSGEQKKAIVDLLFKTNRKVTVKQLKEDYFKKIECFDSVEISGVEDRFNASLGTYHDLLKIIKDKDFLDNEENEDILEDIVLTLTLFEDREMIEERLKTYAHLFDDKVMKQLKRRRYTGWGRLSRKLINGIRDKQSGKTILDFLKSDGFANRNFMQLIHDDSLTFKEDIQKAQVSGQGDSLHEHIANLAGSPAIKKGILQTVKVVDELVKVMGRHKPENIVIEMARENQTTQKGQKNSRERMKRIEEGIKELGSQILKEHPVENTQLQNEKLYLYYLQNGRDMYVDQELDINRLSDYDVDHIVPQSFLKDDSIDNKVLTRSDKARGKSDNVPSEEVVKKMKNYWRQLLNAKLITQRKFDNLTKAERGGLSELDKAGFIKRQLVETRQITKHVAQILDSRMNTKYDENDKLIREVKVITLKSKLVSDFRKDFQFYKVREINNYHHAHDAYLNAVVGTALIKKYPKLESEFVYGDYKVYDVRKMIAKSEQEIGKATAKYFFYSNIMNFFKTEITLANGEIRKRPLIETNGETGEIVWDKGRDFATVRKVLSMPQVNIVKKTEVQTGGFSKESILPKRNSDKLIARKKDWDPKKYGGFDSPTVAYSVLVVAKVEKGKSKKLKSVKELLGITIMERSSFEKNPIDFLEAKGYKEVKKDLIIKLPKYSLFELENGRKRMLASAGELQKGNELALPSKYVNFLYLASHYEKLKGSPEDNEQKQLFVEQHKHYLDEIIEQISEFSKRVILADANLDKVLSAYNKHRDKPIREQAENIIHLFTLTNLGAPAAFKYFDTTIDRKRYTSTKEVLDATLIHQSITGLYETRIDLSQLGGDGGGGSEAAAKPAPGGTLQLEEEYRLFEPESTQKQEMDIWLKNFPQAWAETGGMGTAHCQAPVLIQLKATATPISIRQYPMPHEAYQGIKPHIRRMLDQGILKPCQSPWNTPLLPVKKPGTEDYRPVQDLREVNKRVEDIHPTVPNPYNLLSTLPPSHPWYTVLDLKDAFFCLRLHSESQLLFAFEWRDPEIGLSGQLTWTRLPQGFKNSPTLFDEALHSDLADFRVRYPALVLLQYVDDLLLAAATRTECLEGTKALLETLGNKGYRASAKKAQICLQEVTYLGYSLKDGQRWLTKARKEAILSIPVPKNSRQVREFLGTAGYCRLWIPGFAELAAPLYPLTRPGTLFQWGTEQQLAFEDIKKALLSSPALGLPDITKPFELFIDENSGFAKGVLVQKLGPWKRPVAYLSKKLDTVASGWPPCLRMVAAIAILVKDAGKLTLGQPLTILTSHPVEALVRQPPNKWLSNARMTHYQAMLLDAERVHFGPTVSLNPATLLPLPSGGNHHDCLQILAETHGTRPDLTDQPLPDADLTWYTDGSSFIRNGEREAGAAVTTESEVIWAAPLPPGTSAQRAELIALTQALKMAEGKKLTVYTDSRYAFATTHVHGEIYRRRGLLTSEGKEIKNKNEILALLEALFLPKRLSIIHCPGHQKGDSPQAKGNRLADDTAKKAATETHSSLTVLPAGKRTADGSEFEKRTADGSEFESPKKKAKVE

SEQ ID NO: 1136 - protein, 2093 aa, synthetic construct
MPAAKRVKLDGGDKKYSIGLDIGTNSVGWAVITDEYKVPSKKFKVLGNTDRHSIKKNLIGALLFDSGETAEATRLKRTARRRYTRRKNRICYLQEIFSNEMAKVDDSFFHRLEESFLVEEDKKHERHPIFGNIVDEVAYHEKYPTIYHLRKKLVDSTDKADLRLIYLALAHMIKFRGHFLIEGDLNPDNSDVDKLFIQLVQTYNQLFEENPINASGVDAKAILSARLSKSRRLENLIAQLPGEKKNGLFGNLIALSLGLTPNFKSNFDLAEDAKLQLSKDTYDDDLDNLLAQIGDQYADLFLAAKNLSDAILLSDILRVNTEITKAPLSASMIKRYDEHHQDLTLLKALVRQQLPEKYKEIFFDQSKNGYAGYIDGGASQEEFYKFIKPILEKMDGTEELLVKLNREDLLRKQRTFDNGSIPHQIHLGELHAILRRQEDFYPFLKDNREKIEKILTFRIPYYVGPLARGNSRFAWMTRKSEETITPWNFEEVVDKGASAQSFIERMTNFDKNLPNEKVLPKHSLLYEYFTVYNELTKVKYVTEGMRKPAFLSGEQKKAIVDLLFKTNRKVTVKQLKEDYFKKIECFDSVEISGVEDRFNASLGTYHDLLKIIKDKDFLDNEENEDILEDIVLTLTLFEDREMIEERLKTYAHLFDDKVMKQLKRRRYTGWGRLSRKLINGIRDKQSGKTILDFLKSDGFANRNFMQLIHDDSLTFKEDIQKAQVSGQGDSLHEHIANLAGSPAIKKGILQTVKVVDELVKVMGRHKPENIVIEMARENQTTQKGQKNSRERMKRIEEGIKELGSQILKEHPVENTQLQNEKLYLYYLQNGRDMYVDQELDINRLSDYDVDHIVPQSFLKDDSIDNKVLTRSDKARGKSDNVPSEEVVKKMKNYWRQLLNAKLITQRKFDNLTKAERGGLSELDKAGFIKRQLVETRQITKHVAQILDSRMNTKYDENDKLIREVKVITLKSKLVSDFRKDFQFYKVREINNYHHAHDAYLNAVVGTALIKKYPKLESEFVYGDYKVYDVRKMIAKSEQEIGKATAKYFFYSNIMNFFKTEITLANGEIRKRPLIETNGETGEIVWDKGRDFATVRKVLSMPQVNIVKKTEVQTGGFSKESILPKRNSDKLIARKKDWDPKKYGGFDSPTVAYSVLVVAKVEKGKSKKLKSVKELLGITIMERSSFEKNPIDFLEAKGYKEVKKDLIIKLPKYSLFELENGRKRMLASAGELQKGNELALPSKYVNFLYLASHYEKLKGSPEDNEQKQLFVEQHKHYLDEIIEQISEFSKRVILADANLDKVLSAYNKHRDKPIREQAENIIHLFTLTNLGAPAAFKYFDTTIDRKRYTSTKEVLDATLIHQSITGLYETRIDLSQLGGDGGPAPGSSGGGGGTLQLEEEYRLFEPESTQKQEMDIWLKNFPQAWAETGGMGTAHCQAPVLIQLKATATPISIRQYPMPHEAYQGIKPHIRRMLDQGILKPCQSPWNTPLLPVKKPGTEDYRPVQDLREVNKRVEDIHPTVPNPYNLLSTLPPSHPWYTVLDLKDAFFCLRLHSESQLLFAFEWRDPEIGLSGQLTWTRLPQGFKNSPTLFDEALHSDLADFRVRYPALVLLQYVDDLLLAAATRTECLEGTKALLETLGNKGYRASAKKAQICLQEVTYLGYSLKDGQRWLTKARKEAILSIPVPKNSRQVREFLGTAGYCRLWIPGFAELAAPLYPLTRPGTLFQWGTEQQLAFEDIKKALLSSPALGLPDITKPFELFIDENSGFAKGVLVQKLGPWKRPVAYLSKKLDTVASGWPPCLRMVAAIAILVKDAGKLTLGQPLTILTSHPVEALVRQPPNKWLSNARMTHYQAMLLDAERVHFGPTVSLNPATLLPLPSGGNHHDCLQILAETHGTRPDLTDQPLPDADLTWYTDGSSFIRNGEREAGAAVTTESEVIWAAPLPPGTSAQRAELIALTQALKMAEGKKLTVYTDSRYAFATTHVHGEIYRRRGLLTSEGKEIKNKNEILALLEALFLPKRLSIIHCPGHQKGDSPQAKGNRLADDTAKKAATETHSSLTVLPAGKRTADGSEFEKRTADGSEFESPKKKAKVE

SEQ ID NO: 1137 - protein, 2107 aa, synthetic construct
MPAAKRVKLDGGDKKYSIGLDIGTNSVGWAVITDEYKVPSKKFKVLGNTDRHSIKKNLIGALLFDSGETAEATRLKRTARRRYTRRKNRICYLQEIFSNEMAKVDDSFFHRLEESFLVEEDKKHERHPIFGNIVDEVAYHEKYPTIYHLRKKLVDSTDKADLRLIYLALAHMIKFRGHFLIEGDLNPDNSDVDKLFIQLVQTYNQLFEENPINASGVDAKAILSARLSKSRRLENLIAQLPGEKKNGLFGNLIALSLGLTPNFKSNFDLAEDAKLQLSKDTYDDDLDNLLAQIGDQYADLFLAAKNLSDAILLSDILRVNTEITKAPLSASMIKRYDEHHQDLTLLKALVRQQLPEKYKEIFFDQSKNGYAGYIDGGASQEEFYKFIKPILEKMDGTEELLVKLNREDLLRKQRTFDNGSIPHQIHLGELHAILRRQEDFYPFLKDNREKIEKILTFRIPYYVGPLARGNSRFAWMTRKSEETITPWNFEEVVDKGASAQSFIERMTNFDKNLPNEKVLPKHSLLYEYFTVYNELTKVKYVTEGMRKPAFLSGEQKKAIVDLLFKTNRKVTVKQLKEDYFKKIECFDSVEISGVEDRFNASLGTYHDLLKIIKDKDFLDNEENEDILEDIVLTLTLFEDREMIEERLKTYAHLFDDKVMKQLKRRRYTGWGRLSRKLINGIRDKQSGKTILDFLKSDGFANRNFMQLIHDDSLTFKEDIQKAQVSGQGDSLHEHIANLAGSPAIKKGILQTVKVVDELVKVMGRHKPENIVIEMARENQTTQKGQKNSRERMKRIEEGIKELGSQILKEHPVENTQLQNEKLYLYYLQNGRDMYVDQELDINRLSDYDVDHIVPQSFLKDDSIDNKVLTRSDKARGKSDNVPSEEVVKKMKNYWRQLLNAKLITQRKFDNLTKAERGGLSELDKAGFIKRQLVETRQITKHVAQILDSRMNTKYDENDKLIREVKVITLKSKLVSDFRKDFQFYKVREINNYHHAHDAYLNAVVGTALIKKYPKLESEFVYGDYKVYDVRKMIAKSEQEIGKATAKYFFYSNIMNFFKTEITLANGEIRKRPLIETNGETGEIVWDKGRDFATVRKVLSMPQVNIVKKTEVQTGGFSKESILPKRNSDKLIARKKDWDPKKYGGFDSPTVAYSVLVVAKVEKGKSKKLKSVKELLGITIMERSSFEKNPIDFLEAKGYKEVKKDLIIKLPKYSLFELENGRKRMLASAGELQKGNELALPSKYVNFLYLASHYEKLKGSPEDNEQKQLFVEQHKHYLDEIIEQISEFSKRVILADANLDKVLSAYNKHRDKPIREQAENIIHLFTLTNLGAPAAFKYFDTTIDRKRYTSTKEVLDATLIHQSITGLYETRIDLSQLGGDGGEAAAKEAAAKEAAAKEAAAKGGTAPLEEEYRLFLEAPIQNVTLLEQWKREIPKVWAEINPPGLASTQAPIHVQLLSTALPVRVRQYPITLEAKRSLRETIRKFRAAGILRPVHSPWNTPLLPVRKSGTSEYRMVQDLREVNKRVETIHPTVPNPYTLLSLLPPDRIWYSVLDLKDAFFCIPLAPESQLIFAFEWADAEEGESGQLTWTRLPQGFKNSPTLFNEALNRDLQGFRLDHPSVSLLQYVDDLLIAADTQAACLSATRDLLMTLAELGYRVSGKKAQLCQEEVTYLGFKIHKGSRSLSNSRTQAILQIPVPKTKRQVREFLGTIGYCRLWIPGFAELAQPLYAATRPGNDPLVWGEKEEEAFQSLKLALTQPPALALPSLDKPFQLFVEETSGAAKGVLTQALGPWKRPVAYLSKRLDPVAAGWPRCLRAIAAAALLTREASKLTFGQDIEITSSHNLESLLRSPPDKWLTNARITQYQVLLLDPPRVRFKQTAALNPATLLPETDDTLPIHHCLDTLDSLTSTRPDLTDQPLAQAEATLFTDGSSYIRDGKRYAGAAVVTLDSVIWAEPLPIGTSAQKAELIALTKALEWSKDKSVNIYTDSRYAFATLHVHGMIYRERGWLTAGGKAIKNAPEILALLTAVWLPKRVAVMHCKGHQKDDAPTSTGNRRADEVAREVAIRPLSTQATISAGKRTADGSEFEKRTADGSEFESPKKKAKVE

SEQ ID NO: 1138 - protein, 2100 aa, synthetic construct
MPAAKRVKLDGGDKKYSIGLDIGTNSVGWAVITDEYKVPSKKFKVLGNTDRHSIKKNLIGALLFDSGETAEATRLKRTARRRYTRRKNRICYLQEIFSNEMAKVDDSFFHRLEESFLVEEDKKHERHPIFGNIVDEVAYHEKYPTIYHLRKKLVDSTDKADLRLIYLALAHMIKFRGHFLIEGDLNPDNSDVDKLFIQLVQTYNQLFEENPINASGVDAKAILSARLSKSRRLENLIAQLPGEKKNGLFGNLIALSLGLTPNFKSNFDLAEDAKLQLSKDTYDDDLDNLLAQIGDQYADLFLAAKNLSDAILLSDILRVNTEITKAPLSASMIKRYDEHHQDLTLLKALVRQQLPEKYKEIFFDQSKNGYAGYIDGGASQEEFYKFIKPILEKMDGTEELLVKLNREDLLRKQRTFDNGSIPHQIHLGELHAILRRQEDFYPFLKDNREKIEKILTFRIPYYVGPLARGNSRFAWMTRKSEETITPWNFEEVVDKGASAQSFIERMTNFDKNLPNEKVLPKHSLLYEYFTVYNELTKVKYVTEGMRKPAFLSGEQKKAIVDLLFKTNRKVTVKQLKEDYFKKIECFDSVEISGVEDRFNASLGTYHDLLKIIKDKDFLDNEENEDILEDIVLTLTLFEDREMIEERLKTYAHLFDDKVMKQLKRRRYTGWGRLSRKLINGIRDKQSGKTILDFLKSDGFANRNFMQLIHDDSLTFKEDIQKAQVSGQGDSLHEHIANLAGSPAIKKGILQTVKVVDELVKVMGRHKPENIVIEMARENQTTQKGQKNSRERMKRIEEGIKELGSQILKEHPVENTQLQNEKLYLYYLQNGRDMYVDQELDINRLSDYDVDHIVPQSFLKDDSIDNKVLTRSDKARGKSDNVPSEEVVKKMKNYWRQLLNAKLITQRKFDNLTKAERGGLSELDKAGFIKRQLVETRQITKHVAQILDSRMNTKYDENDKLIREVKVITLKSKLVSDFRKDFQFYKVREINNYHHAHDAYLNAVVGTALIKKYPKLESEFVYGDYKVYDVRKMIAKSEQEIGKATAKYFFYSNIMNFFKTEITLANGEIRKRPLIETNGETGEIVWDKGRDFATVRKVLSMPQVNIVKKTEVQTGGFSKESILPKRNSDKLIARKKDWDPKKYGGFDSPTVAYSVLVVAKVEKGKSKKLKSVKELLGITIMERSSFEKNPIDFLEAKGYKEVKKDLIIKLPKYSLFELENGRKRMLASAGELQKGNELALPSKYVNFLYLASHYEKLKGSPEDNEQKQLFVEQHKHYLDEIIEQISEFSKRVILADANLDKVLSAYNKHRDKPIREQAENIIHLFTLTNLGAPAAFKYFDTTIDRKRYTSTKEVLDATLIHQSITGLYETRIDLSQLGGDGGPAPAPAPAPAPAPGGTAPLEEEYRLFLEAPIQNVTLLEQWKREIPKVWAEINPPGLASTQAPIHVQLLSTALPVRVRQYPITLEAKRSLRETIRKFRAAGILRPVHSPWNTPLLPVRKSGTSEYRMVQDLREVNKRVETIHPTVPNPYTLLSLLPPDRIWYSVLDLKDAFFCIPLAPESQLIFAFEWADAEEGESGQLTWTRLPQGFKNSPTLFNEALNRDLQGFRLDHPSVSLLQYVDDLLIAADTQAACLSATRDLLMTLAELGYRVSGKKAQLCQEEVTYLGFKIHKGSRSLSNSRTQAILQIPVPKTKRQVREFLGTIGYCRLWIPGFAELAQPLYAATRPGNDPLVWGEKEEEAFQSLKLALTQPPALALPSLDKPFQLFVEETSGAAKGVLTQALGPWKRPVAYLSKRLDPVAAGWPRCLRAIAAAALLTREASKLTFGQDIEITSSHNLESLLRSPPDKWLTNARITQYQVLLLDPPRVRFKQTAALNPATLLPETDDTLPIHHCLDTLDSLTSTRPDLTDQPLAQAEATLFTDGSSYIRDGKRYAGAAVVTLDSVIWAEPLPIGTSAQKAELIALTKALEWSKDKSVNIYTDSRYAFATLHVHGMIYRERGWLTAGGKAIKNAPEILALLTAVWLPKRVAVMHCKGHQKDDAPTSTGNRRADEVAREVAIRPLSTQATISAGKRTADGSEFEKRTADGSEFESPKKKAKVE

SEQ ID NO: 1139 - protein, 2098 aa, synthetic construct
MPAAKRVKLDGGDKKYSIGLDIGTNSVGWAVITDEYKVPSKKFKVLGNTDRHSIKKNLIGALLFDSGETAEATRLKRTARRRYTRRKNRICYLQEIFSNEMAKVDDSFFHRLEESFLVEEDKKHERHPIFGNIVDEVAYHEKYPTIYHLRKKLVDSTDKADLRLIYLALAHMIKFRGHFLIEGDLNPDNSDVDKLFIQLVQTYNQLFEENPINASGVDAKAILSARLSKSRRLENLIAQLPGEKKNGLFGNLIALSLGLTPNFKSNFDLAEDAKLQLSKDTYDDDLDNLLAQIGDQYADLFLAAKNLSDAILLSDILRVNTEITKAPLSASMIKRYDEHHQDLTLLKALVRQQLPEKYKEIFFDQSKNGYAGYIDGGASQEEFYKFIKPILEKMDGTEELLVKLNREDLLRKQRTFDNGSIPHQIHLGELHAILRRQEDFYPFLKDNREKIEKILTFRIPYYVGPLARGNSRFAWMTRKSEETITPWNFEEVVDKGASAQSFIERMTNFDKNLPNEKVLPKHSLLYEYFTVYNELTKVKYVTEGMRKPAFLSGEQKKAIVDLLFKTNRKVTVKQLKEDYFKKIECFDSVEISGVEDRFNASLGTYHDLLKIIKDKDFLDNEENEDILEDIVLTLTLFEDREMIEERLKTYAHLFDDKVMKQLKRRRYTGWGRLSRKLINGIRDKQSGKTILDFLKSDGFANRNFMQLIHDDSLTFKEDIQKAQVSGQGDSLHEHIANLAGSPAIKKGILQTVKVVDELVKVMGRHKPENIVIEMARENQTTQKGQKNSRERMKRIEEGIKELGSQILKEHPVENTQLQNEKLYLYYLQNGRDMYVDQELDINRLSDYDVDHIVPQSFLKDDSIDNKVLTRSDKARGKSDNVPSEEVVKKMKNYWRQLLNAKLITQRKFDNLTKAERGGLSELDKAGFIKRQLVETRQITKHVAQILDSRMNTKYDENDKLIREVKVITLKSKLVSDFRKDFQFYKVREINNYHHAHDAYLNAVVGTALIKKYPKLESEFVYGDYKVYDVRKMIAKSEQEIGKATAKYFFYSNIMNFFKTEITLANGEIRKRPLIETNGETGEIVWDKGRDFATVRKVLSMPQVNIVKKTEVQTGGFSKESILPKRNSDKLIARKKDWDPKKYGGFDSPTVAYSVLVVAKVEKGKSKKLKSVKELLGITIMERSSFEKNPIDFLEAKGYKEVKKDLIIKLPKYSLFELENGRKRMLASAGELQKGNELALPSKYVNFLYLASHYEKLKGSPEDNEQKQLFVEQHKHYLDEIIEQISEFSKRVILADANLDKVLSAYNKHRDKPIREQAENIIHLFTLTNLGAPAAFKYFDTTIDRKRYTSTKEVLDATLIHQSITGLYETRIDLSQLGGDGGEAAAKGGSPAPGGTAPLEEEYRLFLEAPIQNVTLLEQWKREIPKVWAEINPPGLASTQAPIHVQLLSTALPVRVRQYPITLEAKRSLRETIRKFRAAGILRPVHSPWNTPLLPVRKSGTSEYRMVQDLREVNKRVETIHPTVPNPYTLLSLLPPDRIWYSVLDLKDAFFCIPLAPESQLIFAFEWADAEEGESGQLTWTRLPQGFKNSPTLFNEALNRDLQGFRLDHPSVSLLQYVDDLLIAADTQAACLSATRDLLMTLAELGYRVSGKKAQLCQEEVTYLGFKIHKGSRSLSNSRTQAILQIPVPKTKRQVREFLGTIGYCRLWIPGFAELAQPLYAATRPGNDPLVWGEKEEEAFQSLKLALTQPPALALPSLDKPFQLFVEETSGAAKGVLTQALGPWKRPVAYLSKRLDPVAAGWPRCLRAIAAAALLTREASKLTFGQDIEITSSHNLESLLRSPPDKWLTNARITQYQVLLLDPPRVRFKQTAALNPATLLPETDDTLPIHHCLDTLDSLTSTRPDLTDQPLAQAEATLFTDGSSYIRDGKRYAGAAVVTLDSVIWAEPLPIGTSAQKAELIALTKALEWSKDKSVNIYTDSRYAFATLHVHGMIYRERGWLTAGGKAIKNAPEILALLTAVWLPKRVAVMHCKGHQKDDAPTSTGNRRADEVAREVAIRPLSTQATISAGKRTADGSEFEKRTADGSEFESPKKKAKVE

SEQ ID NO: 1140 - protein, 2096 aa, synthetic construct
MPAAKRVKLDGGDKKYSIGLDIGTNSVGWAVITDEYKVPSKKFKVLGNTDRHSIKKNLIGALLFDSGETAEATRLKRTARRRYTRRKNRICYLQEIFSNEMAKVDDSFFHRLEESFLVEEDKKHERHPIFGNIVDEVAYHEKYPTIYHLRKKLVDSTDKADLRLIYLALAHMIKFRGHFLIEGDLNPDNSDVDKLFIQLVQTYNQLFEENPINASGVDAKAILSARLSKSRRLENLIAQLPGEKKNGLFGNLIALSLGLTPNFKSNFDLAEDAKLQLSKDTYDDDLDNLLAQIGDQYADLFLAAKNLSDAILLSDILRVNTEITKAPLSASMIKRYDEHHQDLTLLKALVRQQLPEKYKEIFFDQSKNGYAGYIDGGASQEEFYKFIKPILEKMDGTEELLVKLNREDLLRKQRTFDNGSIPHQIHLGELHAILRRQEDFYPFLKDNREKIEKILTFRIPYYVGPLARGNSRFAWMTRKSEETITPWNFEEVVDKGASAQSFIERMTNFDKNLPNEKVLPKHSLLYEYFTVYNELTKVKYVTEGMRKPAFLSGEQKKAIVDLLFKTNRKVTVKQLKEDYFKKIECFDSVEISGVEDRFNASLGTYHDLLKIIKDKDFLDNEENEDILEDIVLTLTLFEDREMIEERLKTYAHLFDDKVMKQLKRRRYTGWGRLSRKLINGIRDKQSGKTILDFLKSDGFANRNFMQLIHDDSLTFKEDIQKAQVSGQGDSLHEHIANLAGSPAIKKGILQTVKVVDELVKVMGRHKPENIVIEMARENQTTQKGQKNSRERMKRIEEGIKELGSQILKEHPVENTQLQNEKLYLYYLQNGRDMYVDQELDINRLSDYDVDHIVPQSFLKDDSIDNKVLTRSDKARGKSDNVPSEEVVKKMKNYWRQLLNAKLITQRKFDNLTKAERGGLSELDKAGFIKRQLVETRQITKHVAQILDSRMNTKYDENDKLIREVKVITLKSKLVSDFRKDFQFYKVREINNYHHAHDAYLNAVVGTALIKKYPKLESEFVYGDYKVYDVRKMIAKSEQEIGKATAKYFFYSNIMNFFKTEITLANGEIRKRPLIETNGETGEIVWDKGRDFATVRKVLSMPQVNIVKKTEVQTGGFSKESILPKRNSDKLIARKKDWDPKKYGGFDSPTVAYSVLVVAKVEKGKSKKLKSVKELLGITIMERSSFEKNPIDFLEAKGYKEVKKDLIIKLPKYSLFELENGRKRMLASAGELQKGNELALPSKYVNFLYLASHYEKLKGSPEDNEQKQLFVEQHKHYLDEIIEQISEFSKRVILADANLDKVLSAYNKHRDKPIREQAENIIHLFTLTNLGAPAAFKYFDTTIDRKRYTSTKEVLDATLIHQSITGLYETRIDLSQLGGDGGGGGPAPGSSGGTAPLEEEYRLFLEAPIQNVTLLEQWKREIPKVWAEINPPGLASTQAPIHVQLLSTALPVRVRQYPITLEAKRSLRETIRKFRAAGILRPVHSPWNTPLLPVRKSGTSEYRMVQDLREVNKRVETIHPTVPNPYTLLSLLPPDRIWYSVLDLKDAFFCIPLAPESQLIFAFEWADAEEGESGQLTWTRLPQGFKNSPTLFNEALNRDLQGFRLDHPSVSLLQYVDDLLIAADTQAACLSATRDLLMTLAELGYRVSGKKAQLCQEEVTYLGFKIHKGSRSLSNSRTQAILQIPVPKTKRQVREFLGTIGYCRLWIPGFAELAQPLYAATRPGNDPLVWGEKEEEAFQSLKLALTQPPALALPSLDKPFQLFVEETSGAAKGVLTQALGPWKRPVAYLSKRLDPVAAGWPRCLRAIAAAALLTREASKLTFGQDIEITSSHNLESLLRSPPDKWLTNARITQYQVLLLDPPRVRFKQTAALNPATLLPETDDTLPIHHCLDTLDSLTSTRPDLTDQPLAQAEATLFTDGSSYIRDGKRYAGAAVVTLDSVIWAEPLPIGTSAQKAELIALTKALEWSKDKSVNIYTDSRYAFATLHVHGMIYRERGWLTAGGKAIKNAPEILALLTAVWLPKRVAVMHCKGHQKDDAPTSTGNRRADEVAREVAIRPLSTQATISAGKRTADGSEFEKRTADGSEFESPKKKAKVE

SEQ ID NO: 1141 - protein, 2095 aa, synthetic construct
MPAAKRVKLDGGDKKYSIGLDIGTNSVGWAVITDEYKVPSKKFKVLGNTDRHSIKKNLIGALLFDSGETAEATRLKRTARRRYTRRKNRICYLQEIFSNEMAKVDDSFFHRLEESFLVEEDKKHERHPIFGNIVDEVAYHEKYPTIYHLRKKLVDSTDKADLRLIYLALAHMIKFRGHFLIEGDLNPDNSDVDKLFIQLVQTYNQLFEENPINASGVDAKAILSARLSKSRRLENLIAQLPGEKKNGLFGNLIALSLGLTPNFKSNFDLAEDAKLQLSKDTYDDDLDNLLAQIGDQYADLFLAAKNLSDAILLSDILRVNTEITKAPLSASMIKRYDEHHQDLTLLKALVRQQLPEKYKEIFFDQSKNGYAGYIDGGASQEEFYKFIKPILEKMDGTEELLVKLNREDLLRKQRTFDNGSIPHQIHLGELHAILRRQEDFYPFLKDNREKIEKILTFRIPYYVGPLARGNSRFAWMTRKSEETITPWNFEEVVDKGASAQSFIERMTNFDKNLPNEKVLPKHSLLYEYFTVYNELTKVKYVTEGMRKPAFLSGEQKKAIVDLLFKTNRKVTVKQLKEDYFKKIECFDSVEISGVEDRFNASLGTYHDLLKIIKDKDFLDNEENEDILEDIVLTLTLFEDREMIEERLKTYAHLFDDKVMKQLKRRRYTGWGRLSRKLINGIRDKQSGKTILDFLKSDGFANRNFMQLIHDDSLTFKEDIQKAQVSGQGDSLHEHIANLAGSPAIKKGILQTVKVVDELVKVMGRHKPENIVIEMARENQTTQKGQKNSRERMKRIEEGIKELGSQILKEHPVENTQLQNEKLYLYYLQNGRDMYVDQELDINRLSDYDVDHIVPQSFLKDDSIDNKVLTRSDKARGKSDNVPSEEVVKKMKNYWRQLLNAKLITQRKFDNLTKAERGGLSELDKAGFIKRQLVETRQITKHVAQILDSRMNTKYDENDKLIREVKVITLKSKLVSDFRKDFQFYKVREINNYHHAHDAYLNAVVGTALIKKYPKLESEFVYGDYKVYDVRKMIAKSEQEIGKATAKYFFYSNIMNFFKTEITLANGEIRKRPLIETNGETGEIVWDKGRDFATVRKVLSMPQVNIVKKTEVQTGGFSKESILPKRNSDKLIARKKDWDPKKYGGFDSPTVAYSVLVVAKVEKGKSKKLKSVKELLGITIMERSSFEKNPIDFLEAKGYKEVKKDLIIKLPKYSLFELENGRKRMLASAGELQKGNELALPSKYVNFLYLASHYEKLKGSPEDNEQKQLFVEQHKHYLDEIIEQISEFSKRVILADANLDKVLSAYNKHRDKPIREQAENIIHLFTLTNLGAPAAFKYFDTTIDRKRYTSTKEVLDATLIHQSITGLYETRIDLSQLGGDGGEAAAKGGGGGTAPLEEEYRLFLEAPIQNVTLLEQWKREIPKVWAEINPPGLASTQAPIHVQLLSTALPVRVRQYPITLEAKRSLRETIRKFRAAGILRPVHSPWNTPLLPVRKSGTSEYRMVQDLREVNKRVETIHPTVPNPYTLLSLLPPDRIWYSVLDLKDAFFCIPLAPESQLIFAFEWADAEEGESGQLTWTRLPQGFKNSPTLFNEALNRDLQGFRLDHPSVSLLQYVDDLLIAADTQAACLSATRDLLMTLAELGYRVSGKKAQLCQEEVTYLGFKIHKGSRSLSNSRTQAILQIPVPKTKRQVREFLGTIGYCRLWIPGFAELAQPLYAATRPGNDPLVWGEKEEEAFQSLKLALTQPPALALPSLDKPFQLFVEETSGAAKGVLTQALGPWKRPVAYLSKRLDPVAAGWPRCLRAIAAAALLTREASKLTFGQDIEITSSHNLESLLRSPPDKWLTNARITQYQVLLLDPPRVRFKQTAALNPATLLPETDDTLPIHHCLDTLDSLTSTRPDLTDQPLAQAEATLFTDGSSYIRDGKRYAGAAVVTLDSVIWAEPLPIGTSAQKAELIALTKALEWSKDKSVNIYTDSRYAFATLHVHGMIYRERGWLTAGGKAIKNAPEILALLTAVWLPKRVAVMHCKGHQKDDAPTSTGNRRADEVAREVAIRPLSTQATISAGKRTADGSEFEKRTADGSEFESPKKKAKVE

SEQ ID NO: 1142 - protein, 2098 aa, synthetic construct
MPAAKRVKLDGGDKKYSIGLDIGTNSVGWAVITDEYKVPSKKFKVLGNTDRHSIKKNLIGALLFDSGETAEATRLKRTARRRYTRRKNRICYLQEIFSNEMAKVDDSFFHRLEESFLVEEDKKHERHPIFGNIVDEVAYHEKYPTIYHLRKKLVDSTDKADLRLIYLALAHMIKFRGHFLIEGDLNPDNSDVDKLFIQLVQTYNQLFEENPINASGVDAKAILSARLSKSRRLENLIAQLPGEKKNGLFGNLIALSLGLTPNFKSNFDLAEDAKLQLSKDTYDDDLDNLLAQIGDQYADLFLAAKNLSDAILLSDILRVNTEITKAPLSASMIKRYDEHHQDLTLLKALVRQQLPEKYKEIFFDQSKNGYAGYIDGGASQEEFYKFIKPILEKMDGTEELLVKLNREDLLRKQRTFDNGSIPHQIHLGELHAILRRQEDFYPFLKDNREKIEKILTFRIPYYVGPLARGNSRFAWMTRKSEETITPWNFEEVVDKGASAQSFIERMTNFDKNLPNEKVLPKHSLLYEYFTVYNELTKVKYVTEGMRKPAFLSGEQKKAIVDLLFKTNRKVTVKQLKEDYFKKIECFDSVEISGVEDRFNASLGTYHDLLKIIKDKDFLDNEENEDILEDIVLTLTLFEDREMIEERLKTYAHLFDDKVMKQLKRRRYTGWGRLSRKLINGIRDKQSGKTILDFLKSDGFANRNFMQLIHDDSLTFKEDIQKAQVSGQGDSLHEHIANLAGSPAIKKGILQTVKVVDELVKVMGRHKPENIVIEMARENQTTQKGQKNSRERMKRIEEGIKELGSQILKEHPVENTQLQNEKLYLYYLQNGRDMYVDQELDINRLSDYDVDHIVPQSFLKDDSIDNKVLTRSDKARGKSDNVPSEEVVKKMKNYWRQLLNAKLITQRKFDNLTKAERGGLSELDKAGFIKRQLVETRQITKHVAQILDSRMNTKYDENDKLIREVKVITLKSKLVSDFRKDFQFYKVREINNYHHAHDAYLNAVVGTALIKKYPKLESEFVYGDYKVYDVRKMIAKSEQEIGKATAKYFFYSNIMNFFKTEITLANGEIRKRPLIETNGETGEIVWDKGRDFATVRKVLSMPQVNIVKKTEVQTGGFSKESILPKRNSDKLIARKKDWDPKKYGGFDSPTVAYSVLVVAKVEKGKSKKLKSVKELLGITIMERSSFEKNPIDFLEAKGYKEVKKDLIIKLPKYSLFELENGRKRMLASAGELQKGNELALPSKYVNFLYLASHYEKLKGSPEDNEQKQLFVEQHKHYLDEIIEQISEFSKRVILADANLDKVLSAYNKHRDKPIREQAENIIHLFTLTNLGAPAAFKYFDTTIDRKRYTSTKEVLDATLIHQSITGLYETRIDLSQLGGDGGGGGEAAAKGSSGGTAPLEEEYRLFLEAPIQNVTLLEQWKREIPKVWAEINPPGLASTQAPIHVQLLSTALPVRVRQYPITLEAKRSLRETIRKFRAAGILRPVHSPWNTPLLPVRKSGTSEYRMVQDLREVNKRVETIHPTVPNPYTLLSLLPPDRIWYSVLDLKDAFFCIPLAPESQLIFAFEWADAEEGESGQLTWTRLPQGFKNSPTLFNEALNRDLQGFRLDHPSVSLLQYVDDLLIAADTQAACLSATRDLLMTLAELGYRVSGKKAQLCQEEVTYLGFKIHKGSRSLSNSRTQAILQIPVPKTKRQVREFLGTIGYCRLWIPGFAELAQPLYAATRPGNDPLVWGEKEEEAFQSLKLALTQPPALALPSLDKPFQLFVEETSGAAKGVLTQALGPWKRPVAYLSKRLDPVAAGWPRCLRAIAAAALLTREASKLTFGQDIEITSSHNLESLLRSPPDKWLTNARITQYQVLLLDPPRVRFKQTAALNPATLLPETDDTLPIHHCLDTLDSLTSTRPDLTDQPLAQAEATLFTDGSSYIRDGKRYAGAAVVTLDSVIWAEPLPIGTSAQKAELIALTKALEWSKDKSVNIYTDSRYAFATLHVHGMIYRERGWLTAGGKAIKNAPEILALLTAVWLPKRVAVMHCKGHQKDDAPTSTGNRRADEVAREVAIRPLSTQATISAGKRTADGSEFEKRTADGSEFESPKKKAKVE

SEQ ID NO: 1143 - protein, 2102 aa, synthetic construct
MPAAKRVKLDGGDKKYSIGLDIGTNSVGWAVITDEYKVPSKKFKVLGNTDRHSIKKNLIGALLFDSGETAEATRLKRTARRRYTRRKNRICYLQEIFSNEMAKVDDSFFHRLEESFLVEEDKKHERHPIFGNIVDEVAYHEKYPTIYHLRKKLVDSTDKADLRLIYLALAHMIKFRGHFLIEGDLNPDNSDVDKLFIQLVQTYNQLFEENPINASGVDAKAILSARLSKSRRLENLIAQLPGEKKNGLFGNLIALSLGLTPNFKSNFDLAEDAKLQLSKDTYDDDLDNLLAQIGDQYADLFLAAKNLSDAILLSDILRVNTEITKAPLSASMIKRYDEHHQDLTLLKALVRQQLPEKYKEIFFDQSKNGYAGYIDGGASQEEFYKFIKPILEKMDGTEELLVKLNREDLLRKQRTFDNGSIPHQIHLGELHAILRRQEDFYPFLKDNREKIEKILTFRIPYYVGPLARGNSRFAWMTRKSEETITPWNFEEVVDKGASAQSFIERMTNFDKNLPNEKVLPKHSLLYEYFTVYNELTKVKYVTEGMRKPAFLSGEQKKAIVDLLFKTNRKVTVKQLKEDYFKKIECFDSVEISGVEDRFNASLGTYHDLLKIIKDKDFLDNEENEDILEDIVLTLTLFEDREMIEERLKTYAHLFDDKVMKQLKRRRYTGWGRLSRKLINGIRDKQSGKTILDFLKSDGFANRNFMQLIHDDSLTFKEDIQKAQVSGQGDSLHEHIANLAGSPAIKKGILQTVKVVDELVKVMGRHKPENIVIEMARENQTTQKGQKNSRERMKRIEEGIKELGSQILKEHPVENTQLQNEKLYLYYLQNGRDMYVDQELDINRLSDYDVDHIVPQSFLKDDSIDNKVLTRSDKARGKSDNVPSEEVVKKMKNYWRQLLNAKLITQRKFDNLTKAERGGLSELDKAGFIKRQLVETRQITKHVAQILDSRMNTKYDENDKLIREVKVITLKSKLVSDFRKDFQFYKVREINNYHHAHDAYLNAVVGTALIKKYPKLESEFVYGDYKVYDVRKMIAKSEQEIGKATAKYFFYSNIMNFFKTEITLANGEIRKRPLIETNGETGEIVWDKGRDFATVRKVLSMPQVNIVKKTEVQTGGFSKESILPKRNSDKLIARKKDWDPKKYGGFDSPTVAYSVLVVAKVEKGKSKKLKSVKELLGITIMERSSFEKNPIDFLEAKGYKEVKKDLIIKLPKYSLFELENGRKRMLASAGELQKGNELALPSKYVNFLYLASHYEKLKGSPEDNEQKQLFVEQHKHYLDEIIEQISEFSKRVILADANLDKVLSAYNKHRDKPIREQAENIIHLFTLTNLGAPAAFKYFDTTIDRKRYTSTKEVLDATLIHQSITGLYETRIDLSQLGGDGGGSSGSSGSSGSSGSSGGTAPLEEEYRLFLEAPIQNVTLLEQWKREIPKVWAEINPPGLASTQAPIHVQLLSTALPVRVRQYPITLEAKRSLRETIRKFRAAGILRPVHSPWNTPLLPVRKSGTSEYRMVQDLREVNKRVETIHPTVPNPYTLLSLLPPDRIWYSVLDLKDAFFCIPLAPESQLIFAFEWADAEEGESGQLTWTRLPQGFKNSPTLFNEALNRDLQGFRLDHPSVSLLQYVDDLLIAADTQAACLSATRDLLMTLAELGYRVSGKKAQLCQEEVTYLGFKIHKGSRSLSNSRTQAILQIPVPKTKRQVREFLGTIGYCRLWIPGFAELAQPLYAATRPGNDPLVWGEKEEEAFQSLKLALTQPPALALPSLDKPFQLFVEETSGAAKGVLTQALGPWKRPVAYLSKRLDPVAAGWPRCLRAIAAAALLTREASKLTFGQDIEITSSHNLESLLRSPPDKWLTNARITQYQVLLLDPPRVRFKQTAALNPATLLPETDDTLPIHHCLDTLDSLTSTRPDLTDQPLAQAEATLFTDGSSYIRDGKRYAGAAVVTLDSVIWAEPLPIGTSAQKAELIALTKALEWSKDKSVNIYTDSRYAFATLHVHGMIYRERGWLTAGGKAIKNAPEILALLTAVWLPKRVAVMHCKGHQKDDAPTSTGNRRADEVAREVAIRPLSTQATISAGKRTADGSEFEKRTADGSEFESPKKKAKVE

SEQ ID NO: 1144 - protein, 2090 aa, synthetic construct
MPAAKRVKLDGGDKKYSIGLDIGTNSVGWAVITDEYKVPSKKFKVLGNTDRHSIKKNLIGALLFDSGETAEATRLKRTARRRYTRRKNRICYLQEIFSNEMAKVDDSFFHRLEESFLVEEDKKHERHPIFGNIVDEVAYHEKYPTIYHLRKKLVDSTDKADLRLIYLALAHMIKFRGHFLIEGDLNPDNSDVDKLFIQLVQTYNQLFEENPINASGVDAKAILSARLSKSRRLENLIAQLPGEKKNGLFGNLIALSLGLTPNFKSNFDLAEDAKLQLSKDTYDDDLDNLLAQIGDQYADLFLAAKNLSDAILLSDILRVNTEITKAPLSASMIKRYDEHHQDLTLLKALVRQQLPEKYKEIFFDQSKNGYAGYIDGGASQEEFYKFIKPILEKMDGTEELLVKLNREDLLRKQRTFDNGSIPHQIHLGELHAILRRQEDFYPFLKDNREKIEKILTFRIPYYVGPLARGNSRFAWMTRKSEETITPWNFEEVVDKGASAQSFIERMTNFDKNLPNEKVLPKHSLLYEYFTVYNELTKVKYVTEGMRKPAFLSGEQKKAIVDLLFKTNRKVTVKQLKEDYFKKIECFDSVEISGVEDRFNASLGTYHDLLKIIKDKDFLDNEENEDILEDIVLTLTLFEDREMIEERLKTYAHLFDDKVMKQLKRRRYTGWGRLSRKLINGIRDKQSGKTILDFLKSDGFANRNFMQLIHDDSLTFKEDIQKAQVSGQGDSLHEHIANLAGSPAIKKGILQTVKVVDELVKVMGRHKPENIVIEMARENQTTQKGQKNSRERMKRIEEGIKELGSQILKEHPVENTQLQNEKLYLYYLQNGRDMYVDQELDINRLSDYDVDHIVPQSFLKDDSIDNKVLTRSDKARGKSDNVPSEEVVKKMKNYWRQLLNAKLITQRKFDNLTKAERGGLSELDKAGFIKRQLVETRQITKHVAQILDSRMNTKYDENDKLIREVKVITLKSKLVSDFRKDFQFYKVREINNYHHAHDAYLNAVVGTALIKKYPKLESEFVYGDYKVYDVRKMIAKSEQEIGKATAKYFFYSNIMNFFKTEITLANGEIRKRPLIETNGETGEIVWDKGRDFATVRKVLSMPQVNIVKKTEVQTGGFSKESILPKRNSDKLIARKKDWDPKKYGGFDSPTVAYSVLVVAKVEKGKSKKLKSVKELLGITIMERSSFEKNPIDFLEAKGYKEVKKDLIIKLPKYSLFELENGRKRMLASAGELQKGNELALPSKYVNFLYLASHYEKLKGSPEDNEQKQLFVEQHKHYLDEIIEQISEFSKRVILADANLDKVLSAYNKHRDKPIREQAENIIHLFTLTNLGAPAAFKYFDTTIDRKRYTSTKEVLDATLIHQSITGLYETRIDLSQLGGDGGGGSGGTAPLEEEYRLFLEAPIQNVTLLEQWKREIPKVWAEINPPGLASTQAPIHVQLLSTALPVRVRQYPITLEAKRSLRETIRKFRAAGILRPVHSPWNTPLLPVRKSGTSEYRMVQDLREVNKRVETIHPTVPNPYTLLSLLPPDRIWYSVLDLKDAFFCIPLAPESQLIFAFEWADAEEGESGQLTWTRLPQGFKNSPTLFNEALNRDLQGFRLDHPSVSLLQYVDDLLIAADTQAACLSATRDLLMTLAELGYRVSGKKAQLCQEEVTYLGFKIHKGSRSLSNSRTQAILQIPVPKTKRQVREFLGTIGYCRLWIPGFAELAQPLYAATRPGNDPLVWGEKEEEAFQSLKLALTQPPALALPSLDKPFQLFVEETSGAAKGVLTQALGPWKRPVAYLSKRLDPVAAGWPRCLRAIAAAALLTREASKLTFGQDIEITSSHNLESLLRSPPDKWLTNARITQYQVLLLDPPRVRFKQTAALNPATLLPETDDTLPIHHCLDTLDSLTSTRPDLTDQPLAQAEATLFTDGSSYIRDGKRYAGAAVVTLDSVIWAEPLPIGTSAQKAELIALTKALEWSKDKSVNIYTDSRYAFATLHVHGMIYRERGWLTAGGKAIKNAPEILALLTAVWLPKRVAVMHCKGHQKDDAPTSTGNRRADEVAREVAIRPLSTQATISAGKRTADGSEFEKRTADGSEFESPKKKAKVE

SEQ ID NO: 1145 - protein, 2098 aa, synthetic construct
MPAAKRVKLDGGDKKYSIGLDIGTNSVGWAVITDEYKVPSKKFKVLGNTDRHSIKKNLIGALLFDSGETAEATRLKRTARRRYTRRKNRICYLQEIFSNEMAKVDDSFFHRLEESFLVEEDKKHERHPIFGNIVDEVAYHEKYPTIYHLRKKLVDSTDKADLRLIYLALAHMIKFRGHFLIEGDLNPDNSDVDKLFIQLVQTYNQLFEENPINASGVDAKAILSARLSKSRRLENLIAQLPGEKKNGLFGNLIALSLGLTPNFKSNFDLAEDAKLQLSKDTYDDDLDNLLAQIGDQYADLFLAAKNLSDAILLSDILRVNTEITKAPLSASMIKRYDEHHQDLTLLKALVRQQLPEKYKEIFFDQSKNGYAGYIDGGASQEEFYKFIKPILEKMDGTEELLVKLNREDLLRKQRTFDNGSIPHQIHLGELHAILRRQEDFYPFLKDNREKIEKILTFRIPYYVGPLARGNSRFAWMTRKSEETITPWNFEEVVDKGASAQSFIERMTNFDKNLPNEKVLPKHSLLYEYFTVYNELTKVKYVTEGMRKPAFLSGEQKKAIVDLLFKTNRKVTVKQLKEDYFKKIECFDSVEISGVEDRFNASLGTYHDLLKIIKDKDFLDNEENEDILEDIVLTLTLFEDREMIEERLKTYAHLFDDKVMKQLKRRRYTGWGRLSRKLINGIRDKQSGKTILDFLKSDGFANRNFMQLIHDDSLTFKEDIQKAQVSGQGDSLHEHIANLAGSPAIKKGILQTVKVVDELVKVMGRHKPENIVIEMARENQTTQKGQKNSRERMKRIEEGIKELGSQILKEHPVENTQLQNEKLYLYYLQNGRDMYVDQELDINRLSDYDVDHIVPQSFLKDDSIDNKVLTRSDKARGKSDNVPSEEVVKKMKNYWRQLLNAKLITQRKFDNLTKAERGGLSELDKAGFIKRQLVETRQITKHVAQILDSRMNTKYDENDKLIREVKVITLKSKLVSDFRKDFQFYKVREINNYHHAHDAYLNAVVGTALIKKYPKLESEFVYGDYKVYDVRKMIAKSEQEIGKATAKYFFYSNIMNFFKTEITLANGEIRKRPLIETNGETGEIVWDKGRDFATVRKVLSMPQVNIVKKTEVQTGGFSKESILPKRNSDKLIARKKDWDPKKYGGFDSPTVAYSVLVVAKVEKGKSKKLKSVKELLGITIMERSSFEKNPIDFLEAKGYKEVKKDLIIKLPKYSLFELENGRKRMLASAGELQKGNELALPSKYVNFLYLASHYEKLKGSPEDNEQKQLFVEQHKHYLDEIIEQISEFSKRVILADANLDKVLSAYNKHRDKPIREQAENIIHLFTLTNLGAPAAFKYFDTTIDRKRYTSTKEVLDATLIHQSITGLYETRIDLSQLGGDGGEAAAKPAPGSSGGTAPLEEEYRLFLEAPIQNVTLLEQWKREIPKVWAEINPPGLASTQAPIHVQLLSTALPVRVRQYPITLEAKRSLRETIRKFRAAGILRPVHSPWNTPLLPVRKSGTSEYRMVQDLREVNKRVETIHPTVPNPYTLLSLLPPDRIWYSVLDLKDAFFCIPLAPESQLIFAFEWADAEEGESGQLTWTRLPQGFKNSPTLFNEALNRDLQGFRLDHPSVSLLQYVDDLLIAADTQAACLSATRDLLMTLAELGYRVSGKKAQLCQEEVTYLGFKIHKGSRSLSNSRTQAILQIPVPKTKRQVREFLGTIGYCRLWIPGFAELAQPLYAATRPGNDPLVWGEKEEEAFQSLKLALTQPPALALPSLDKPFQLFVEETSGAAKGVLTQALGPWKRPVAYLSKRLDPVAAGWPRCLRAIAAAALLTREASKLTFGQDIEITSSHNLESLLRSPPDKWLTNARITQYQVLLLDPPRVRFKQTAALNPATLLPETDDTLPIHHCLDTLDSLTSTRPDLTDQPLAQAEATLFTDGSSYIRDGKRYAGAAVVTLDSVIWAEPLPIGTSAQKAELIALTKALEWSKDKSVNIYTDSRYAFATLHVHGMIYRERGWLTAGGKAIKNAPEILALLTAVWLPKRVAVMHCKGHQKDDAPTSTGNRRADEVAREVAIRPLSTQATISAGKRTADGSEFEKRTADGSEFESPKKKAKVE

SEQ ID NO: 1146 - protein, 2133 aa, synthetic construct
MPAAKRVKLDGGDKKYSIGLDIGTNSVGWAVITDEYKVPSKKFKVLGNTDRHSIKKNLIGALLFDSGETAEATRLKRTARRRYTRRKNRICYLQEIFSNEMAKVDDSFFHRLEESFLVEEDKKHERHPIFGNIVDEVAYHEKYPTIYHLRKKLVDSTDKADLRLIYLALAHMIKFRGHFLIEGDLNPDNSDVDKLFIQLVQTYNQLFEENPINASGVDAKAILSARLSKSRRLENLIAQLPGEKKNGLFGNLIALSLGLTPNFKSNFDLAEDAKLQLSKDTYDDDLDNLLAQIGDQYADLFLAAKNLSDAILLSDILRVNTEITKAPLSASMIKRYDEHHQDLTLLKALVRQQLPEKYKEIFFDQSKNGYAGYIDGGASQEEFYKFIKPILEKMDGTEELLVKLNREDLLRKQRTFDNGSIPHQIHLGELHAILRRQEDFYPFLKDNREKIEKILTFRIPYYVGPLARGNSRFAWMTRKSEETITPWNFEEVVDKGASAQSFIERMTNFDKNLPNEKVLPKHSLLYEYFTVYNELTKVKYVTEGMRKPAFLSGEQKKAIVDLLFKTNRKVTVKQLKEDYFKKIECFDSVEISGVEDRFNASLGTYHDLLKIIKDKDFLDNEENEDILEDIVLTLTLFEDREMIEERLKTYAHLFDDKVMKQLKRRRYTGWGRLSRKLINGIRDKQSGKTILDFLKSDGFANRNFMQLIHDDSLTFKEDIQKAQVSGQGDSLHEHIANLAGSPAIKKGILQTVKVVDELVKVMGRHKPENIVIEMARENQTTQKGQKNSRERMKRIEEGIKELGSQILKEHPVENTQLQNEKLYLYYLQNGRDMYVDQELDINRLSDYDVDHIVPQSFLKDDSIDNKVLTRSDKARGKSDNVPSEEVVKKMKNYWRQLLNAKLITQRKFDNLTKAERGGLSELDKAGFIKRQLVETRQITKHVAQILDSRMNTKYDENDKLIREVKVITLKSKLVSDFRKDFQFYKVREINNYHHAHDAYLNAVVGTALIKKYPKLESEFVYGDYKVYDVRKMIAKSEQEIGKATAKYFFYSNIMNFFKTEITLANGEIRKRPLIETNGETGEIVWDKGRDFATVRKVLSMPQVNIVKKTEVQTGGFSKESILPKRNSDKLIARKKDWDPKKYGGFDSPTVAYSVLVVAKVEKGKSKKLKSVKELLGITIMERSSFEKNPIDFLEAKGYKEVKKDLIIKLPKYSLFELENGRKRMLASAGELQKGNELALPSKYVNFLYLASHYEKLKGSPEDNEQKQLFVEQHKHYLDEIIEQISEFSKRVILADANLDKVLSAYNKHRDKPIREQAENIIHLFTLTNLGAPAAFKYFDTTIDRKRYTSTKEVLDATLIHQSITGLYETRIDLSQLGGDGGAEAAAKEAAAKEAAAKEAAAKALEAEAAAKEAAAKEAAAKEAAAKAGGTAPLEEEYRLFLEAPIQNVTLLEQWKREIPKVWAEINPPGLASTQAPIHVQLLSTALPVRVRQYPITLEAKRSLRETIRKFRAAGILRPVHSPWNTPLLPVRKSGTSEYRMVQDLREVNKRVETIHPTVPNPYTLLSLLPPDRIWYSVLDLKDAFFCIPLAPESQLIFAFEWADAEEGESGQLTWTRLPQGFKNSPTLFNEALNRDLQGFRLDHPSVSLLQYVDDLLIAADTQAACLSATRDLLMTLAELGYRVSGKKAQLCQEEVTYLGFKIHKGSRSLSNSRTQAILQIPVPKTKRQVREFLGTIGYCRLWIPGFAELAQPLYAATRPGNDPLVWGEKEEEAFQSLKLALTQPPALALPSLDKPFQLFVEETSGAAKGVLTQALGPWKRPVAYLSKRLDPVAAGWPRCLRAIAAAALLTREASKLTFGQDIEITSSHNLESLLRSPPDKWLTNARITQYQVLLLDPPRVRFKQTAALNPATLLPETDDTLPIHHCLDTLDSLTSTRPDLTDQPLAQAEATLFTDGSSYIRDGKRYAGAAVVTLDSVIWAEPLPIGTSAQKAELIALTKALEWSKDKSVNIYTDSRYAFATLHVHGMIYRERGWLTAGGKAIKNAPEILALLTAVWLPKRVAVMHCKGHQKDDAPTSTGNRRADEVAREVAIRPLSTQATISAGKRTADGSEFEKRTADGSEFESPKKKAKVE

SEQ ID NO: 1147 - protein, 2098 aa, synthetic construct
MPAAKRVKLDGGDKKYSIGLDIGTNSVGWAVITDEYKVPSKKFKVLGNTDRHSIKKNLIGALLFDSGETAEATRLKRTARRRYTRRKNRICYLQEIFSNEMAKVDDSFFHRLEESFLVEEDKKHERHPIFGNIVDEVAYHEKYPTIYHLRKKLVDSTDKADLRLIYLALAHMIKFRGHFLIEGDLNPDNSDVDKLFIQLVQTYNQLFEENPINASGVDAKAILSARLSKSRRLENLIAQLPGEKKNGLFGNLIALSLGLTPNFKSNFDLAEDAKLQLSKDTYDDDLDNLLAQIGDQYADLFLAAKNLSDAILLSDILRVNTEITKAPLSASMIKRYDEHHQDLTLLKALVRQQLPEKYKEIFFDQSKNGYAGYIDGGASQEEFYKFIKPILEKMDGTEELLVKLNREDLLRKQRTFDNGSIPHQIHLGELHAILRRQEDFYPFLKDNREKIEKILTFRIPYYVGPLARGNSRFAWMTRKSEETITPWNFEEVVDKGASAQSFIERMTNFDKNLPNEKVLPKHSLLYEYFTVYNELTKVKYVTEGMRKPAFLSGEQKKAIVDLLFKTNRKVTVKQLKEDYFKKIECFDSVEISGVEDRFNASLGTYHDLLKIIKDKDFLDNEENEDILEDIVLTLTLFEDREMIEERLKTYAHLFDDKVMKQLKRRRYTGWGRLSRKLINGIRDKQSGKTILDFLKSDGFANRNFMQLIHDDSLTFKEDIQKAQVSGQGDSLHEHIANLAGSPAIKKGILQTVKVVDELVKVMGRHKPENIVIEMARENQTTQKGQKNSRERMKRIEEGIKELGSQILKEHPVENTQLQNEKLYLYYLQNGRDMYVDQELDINRLSDYDVDHIVPQSFLKDDSIDNKVLTRSDKARGKSDNVPSEEVVKKMKNYWRQLLNAKLITQRKFDNLTKAERGGLSELDKAGFIKRQLVETRQITKHVAQILDSRMNTKYDENDKLIREVKVITLKSKLVSDFRKDFQFYKVREINNYHHAHDAYLNAVVGTALIKKYPKLESEFVYGDYKVYDVRKMIAKSEQEIGKATAKYFFYSNIMNFFKTEITLANGEIRKRPLIETNGETGEIVWDKGRDFATVRKVLSMPQVNIVKKTEVQTGGFSKESILPKRNSDKLIARKKDWDPKKYGGFDSPTVAYSVLVVAKVEKGKSKKLKSVKELLGITIMERSSFEKNPIDFLEAKGYKEVKKDLIIKLPKYSLFELENGRKRMLASAGELQKGNELALPSKYVNFLYLASHYEKLKGSPEDNEQKQLFVEQHKHYLDEIIEQISEFSKRVILADANLDKVLSAYNKHRDKPIREQAENIIHLFTLTNLGAPAAFKYFDTTIDRKRYTSTKEVLDATLIHQSITGLYETRIDLSQLGGDGGGGSEAAAKPAPGGTAPLEEEYRLFLEAPIQNVTLLEQWKREIPKVWAEINPPGLASTQAPIHVQLLSTALPVRVRQYPITLEAKRSLRETIRKFRAAGILRPVHSPWNTPLLPVRKSGTSEYRMVQDLREVNKRVETIHPTVPNPYTLLSLLPPDRIWYSVLDLKDAFFCIPLAPESQLIFAFEWADAEEGESGQLTWTRLPQGFKNSPTLFNEALNRDLQGFRLDHPSVSLLQYVDDLLIAADTQAACLSATRDLLMTLAELGYRVSGKKAQLCQEEVTYLGFKIHKGSRSLSNSRTQAILQIPVPKTKRQVREFLGTIGYCRLWIPGFAELAQPLYAATRPGNDPLVWGEKEEEAFQSLKLALTQPPALALPSLDKPFQLFVEETSGAAKGVLTQALGPWKRPVAYLSKRLDPVAAGWPRCLRAIAAAALLTREASKLTFGQDIEITSSHNLESLLRSPPDKWLTNARITQYQVLLLDPPRVRFKQTAALNPATLLPETDDTLPIHHCLDTLDSLTSTRPDLTDQPLAQAEATLFTDGSSYIRDGKRYAGAAVVTLDSVIWAEPLPIGTSAQKAELIALTKALEWSKDKSVNIYTDSRYAFATLHVHGMIYRERGWLTAGGKAIKNAPEILALLTAVWLPKRVAVMHCKGHQKDDAPTSTGNRRADEVAREVAIRPLSTQATISAGKRTADGSEFEKRTADGSEFESPKKKAKVE

SEQ ID NO: 1148 - protein, 2090 aa, synthetic construct
MPAAKRVKLDGGDKKYSIGLDIGTNSVGWAVITDEYKVPSKKFKVLGNTDRHSIKKNLIGALLFDSGETAEATRLKRTARRRYTRRKNRICYLQEIFSNEMAKVDDSFFHRLEESFLVEEDKKHERHPIFGNIVDEVAYHEKYPTIYHLRKKLVDSTDKADLRLIYLALAHMIKFRGHFLIEGDLNPDNSDVDKLFIQLVQTYNQLFEENPINASGVDAKAILSARLSKSRRLENLIAQLPGEKKNGLFGNLIALSLGLTPNFKSNFDLAEDAKLQLSKDTYDDDLDNLLAQIGDQYADLFLAAKNLSDAILLSDILRVNTEITKAPLSASMIKRYDEHHQDLTLLKALVRQQLPEKYKEIFFDQSKNGYAGYIDGGASQEEFYKFIKPILEKMDGTEELLVKLNREDLLRKQRTFDNGSIPHQIHLGELHAILRRQEDFYPFLKDNREKIEKILTFRIPYYVGPLARGNSRFAWMTRKSEETITPWNFEEVVDKGASAQSFIERMTNFDKNLPNEKVLPKHSLLYEYFTVYNELTKVKYVTEGMRKPAFLSGEQKKAIVDLLFKTNRKVTVKQLKEDYFKKIECFDSVEISGVEDRFNASLGTYHDLLKIIKDKDFLDNEENEDILEDIVLTLTLFEDREMIEERLKTYAHLFDDKVMKQLKRRRYTGWGRLSRKLINGIRDKQSGKTILDFLKSDGFANRNFMQLIHDDSLTFKEDIQKAQVSGQGDSLHEHIANLAGSPAIKKGILQTVKVVDELVKVMGRHKPENIVIEMARENQTTQKGQKNSRERMKRIEEGIKELGSQILKEHPVENTQLQNEKLYLYYLQNGRDMYVDQELDINRLSDYDVDHIVPQSFLKDDSIDNKVLTRSDKARGKSDNVPSEEVVKKMKNYWRQLLNAKLITQRKFDNLTKAERGGLSELDKAGFIKRQLVETRQITKHVAQILDSRMNTKYDENDKLIREVKVITLKSKLVSDFRKDFQFYKVREINNYHHAHDAYLNAVVGTALIKKYPKLESEFVYGDYKVYDVRKMIAKSEQEIGKATAKYFFYSNIMNFFKTEITLANGEIRKRPLIETNGETGEIVWDKGRDFATVRKVLSMPQVNIVKKTEVQTGGFSKESILPKRNSDKLIARKKDWDPKKYGGFDSPTVAYSVLVVAKVEKGKSKKLKSVKELLGITIMERSSFEKNPIDFLEAKGYKEVKKDLIIKLPKYSLFELENGRKRMLASAGELQKGNELALPSKYVNFLYLASHYEKLKGSPEDNEQKQLFVEQHKHYLDEIIEQISEFSKRVILADANLDKVLSAYNKHRDKPIREQAENIIHLFTLTNLGAPAAFKYFDTTIDRKRYTSTKEVLDATLIHQSITGLYETRIDLSQLGGDGGPAPGGTAPLEEEYRLFLEAPIQNVTLLEQWKREIPKVWAEINPPGLASTQAPIHVQLLSTALPVRVRQYPITLEAKRSLRETIRKFRAAGILRPVHSPWNTPLLPVRKSGTSEYRMVQDLREVNKRVETIHPTVPNPYTLLSLLPPDRIWYSVLDLKDAFFCIPLAPESQLIFAFEWADAEEGESGQLTWTRLPQGFKNSPTLFNEALNRDLQGFRLDHPSVSLLQYVDDLLIAADTQAACLSATRDLLMTLAELGYRVSGKKAQLCQEEVTYLGFKIHKGSRSLSNSRTQAILQIPVPKTKRQVREFLGTIGYCRLWIPGFAELAQPLYAATRPGNDPLVWGEKEEEAFQSLKLALTQPPALALPSLDKPFQLFVEETSGAAKGVLTQALGPWKRPVAYLSKRLDPVAAGWPRCLRAIAAAALLTREASKLTFGQDIEITSSHNLESLLRSPPDKWLTNARITQYQVLLLDPPRVRFKQTAALNPATLLPETDDTLPIHHCLDTLDSLTSTRPDLTDQPLAQAEATLFTDGSSYIRDGKRYAGAAVVTLDSVIWAEPLPIGTSAQKAELIALTKALEWSKDKSVNIYTDSRYAFATLHVHGMIYRERGWLTAGGKAIKNAPEILALLTAVWLPKRVAVMHCKGHQKDDAPTSTGNRRADEVAREVAIRPLSTQATISAGKRTADGSEFEKRTADGSEFESPKKKAKVE

SEQ ID NO: 1149 - protein, 2092 aa, synthetic construct
MPAAKRVKLDGGDKKYSIGLDIGTNSVGWAVITDEYKVPSKKFKVLGNTDRHSIKKNLIGALLFDSGETAEATRLKRTARRRYTRRKNRICYLQEIFSNEMAKVDDSFFHRLEESFLVEEDKKHERHPIFGNIVDEVAYHEKYPTIYHLRKKLVDSTDKADLRLIYLALAHMIKFRGHFLIEGDLNPDNSDVDKLFIQLVQTYNQLFEENPINASGVDAKAILSARLSKSRRLENLIAQLPGEKKNGLFGNLIALSLGLTPNFKSNFDLAEDAKLQLSKDTYDDDLDNLLAQIGDQYADLFLAAKNLSDAILLSDILRVNTEITKAPLSASMIKRYDEHHQDLTLLKALVRQQLPEKYKEIFFDQSKNGYAGYIDGGASQEEFYKFIKPILEKMDGTEELLVKLNREDLLRKQRTFDNGSIPHQIHLGELHAILRRQEDFYPFLKDNREKIEKILTFRIPYYVGPLARGNSRFAWMTRKSEETITPWNFEEVVDKGASAQSFIERMTNFDKNLPNEKVLPKHSLLYEYFTVYNELTKVKYVTEGMRKPAFLSGEQKKAIVDLLFKTNRKVTVKQLKEDYFKKIECFDSVEISGVEDRFNASLGTYHDLLKIIKDKDFLDNEENEDILEDIVLTLTLFEDREMIEERLKTYAHLFDDKVMKQLKRRRYTGWGRLSRKLINGIRDKQSGKTILDFLKSDGFANRNFMQLIHDDSLTFKEDIQKAQVSGQGDSLHEHIANLAGSPAIKKGILQTVKVVDELVKVMGRHKPENIVIEMARENQTTQKGQKNSRERMKRIEEGIKELGSQILKEHPVENTQLQNEKLYLYYLQNGRDMYVDQELDINRLSDYDVDHIVPQSFLKDDSIDNKVLTRSDKARGKSDNVPSEEVVKKMKNYWRQLLNAKLITQRKFDNLTKAERGGLSELDKAGFIKRQLVETRQITKHVAQILDSRMNTKYDENDKLIREVKVITLKSKLVSDFRKDFQFYKVREINNYHHAHDAYLNAVVGTALIKKYPKLESEFVYGDYKVYDVRKMIAKSEQEIGKATAKYFFYSNIMNFFKTEITLANGEIRKRPLIETNGETGEIVWDKGRDFATVRKVLSMPQVNIVKKTEVQTGGFSKESILPKRNSDKLIARKKDWDPKKYGGFDSPTVAYSVLVVAKVEKGKSKKLKSVKELLGITIMERSSFEKNPIDFLEAKGYKEVKKDLIIKLPKYSLFELENGRKRMLASAGELQKGNELALPSKYVNFLYLASHYEKLKGSPEDNEQKQLFVEQHKHYLDEIIEQISEFSKRVILADANLDKVLSAYNKHRDKPIREQAENIIHLFTLTNLGAPAAFKYFDTTIDRKRYTSTKEVLDATLIHQSITGLYETRIDLSQLGGDGGPAPAPGGTAPLEEEYRLFLEAPIQNVTLLEQWKREIPKVWAEINPPGLASTQAPIHVQLLSTALPVRVRQYPITLEAKRSLRETIRKFRAAGILRPVHSPWNTPLLPVRKSGTSEYRMVQDLREVNKRVETIHPTVPNPYTLLSLLPPDRIWYSVLDLKDAFFCIPLAPESQLIFAFEWADAEEGESGQLTWTRLPQGFKNSPTLFNEALNRDLQGFRLDHPSVSLLQYVDDLLIAADTQAACLSATRDLLMTLAELGYRVSGKKAQLCQEEVTYLGFKIHKGSRSLSNSRTQAILQIPVPKTKRQVREFLGTIGYCRLWIPGFAELAQPLYAATRPGNDPLVWGEKEEEAFQSLKLALTQPPALALPSLDKPFQLFVEETSGAAKGVLTQALGPWKRPVAYLSKRLDPVAAGWPRCLRAIAAAALLTREASKLTFGQDIEITSSHNLESLLRSPPDKWLTNARITQYQVLLLDPPRVRFKQTAALNPATLLPETDDTLPIHHCLDTLDSLTSTRPDLTDQPLAQAEATLFTDGSSYIRDGKRYAGAAVVTLDSVIWAEPLPIGTSAQKAELIALTKALEWSKDKSVNIYTDSRYAFATLHVHGMIYRERGWLTAGGKAIKNAPEILALLTAVWLPKRVAVMHCKGHQKDDAPTSTGNRRADEVAREVAIRPLSTQATISAGKRTADGSEFEKRTADGSEFESPKKKAKVE

SEQ ID NO: 1150 - protein, 2096 aa, synthetic construct
MPAAKRVKLDGGDKKYSIGLDIGTNSVGWAVITDEYKVPSKKFKVLGNTDRHSIKKNLIGALLFDSGETAEATRLKRTARRRYTRRKNRICYLQEIFSNEMAKVDDSFFHRLEESFLVEEDKKHERHPIFGNIVDEVAYHEKYPTIYHLRKKLVDSTDKADLRLIYLALAHMIKFRGHFLIEGDLNPDNSDVDKLFIQLVQTYNQLFEENPINASGVDAKAILSARLSKSRRLENLIAQLPGEKKNGLFGNLIALSLGLTPNFKSNFDLAEDAKLQLSKDTYDDDLDNLLAQIGDQYADLFLAAKNLSDAILLSDILRVNTEITKAPLSASMIKRYDEHHQDLTLLKALVRQQLPEKYKEIFFDQSKNGYAGYIDGGASQEEFYKFIKPILEKMDGTEELLVKLNREDLLRKQRTFDNGSIPHQIHLGELHAILRRQEDFYPFLKDNREKIEKILTFRIPYYVGPLARGNSRFAWMTRKSEETITPWNFEEVVDKGASAQSFIERMTNFDKNLPNEKVLPKHSLLYEYFTVYNELTKVKYVTEGMRKPAFLSGEQKKAIVDLLFKTNRKVTVKQLKEDYFKKIECFDSVEISGVEDRFNASLGTYHDLLKIIKDKDFLDNEENEDILEDIVLTLTLFEDREMIEERLKTYAHLFDDKVMKQLKRRRYTGWGRLSRKLINGIRDKQSGKTILDFLKSDGFANRNFMQLIHDDSLTFKEDIQKAQVSGQGDSLHEHIANLAGSPAIKKGILQTVKVVDELVKVMGRHKPENIVIEMARENQTTQKGQKNSRERMKRIEEGIKELGSQILKEHPVENTQLQNEKLYLYYLQNGRDMYVDQELDINRLSDYDVDHIVPQSFLKDDSIDNKVLTRSDKARGKSDNVPSEEVVKKMKNYWRQLLNAKLITQRKFDNLTKAERGGLSELDKAGFIKRQLVETRQITKHVAQILDSRMNTKYDENDKLIREVKVITLKSKLVSDFRKDFQFYKVREINNYHHAHDAYLNAVVGTALIKKYPKLESEFVYGDYKVYDVRKMIAKSEQEIGKATAKYFFYSNIMNFFKTEITLANGEIRKRPLIETNGETGEIVWDKGRDFATVRKVLSMPQVNIVKKTEVQTGGFSKESILPKRNSDKLIARKKDWDPKKYGGFDSPTVAYSVLVVAKVEKGKSKKLKSVKELLGITIMERSSFEKNPIDFLEAKGYKEVKKDLIIKLPKYSLFELENGRKRMLASAGELQKGNELALPSKYVNFLYLASHYEKLKGSPEDNEQKQLFVEQHKHYLDEIIEQISEFSKRVILADANLDKVLSAYNKHRDKPIREQAENIIHLFTLTNLGAPAAFKYFDTTIDRKRYTSTKEVLDATLIHQSITGLYETRIDLSQLGGDGGGGSPAPGGGGGTAPLEEEYRLFLEAPIQNVTLLEQWKREIPKVWAEINPPGLASTQAPIHVQLLSTALPVRVRQYPITLEAKRSLRETIRKFRAAGILRPVHSPWNTPLLPVRKSGTSEYRMVQDLREVNKRVETIHPTVPNPYTLLSLLPPDRIWYSVLDLKDAFFCIPLAPESQLIFAFEWADAEEGESGQLTWTRLPQGFKNSPTLFNEALNRDLQGFRLDHPSVSLLQYVDDLLIAADTQAACLSATRDLLMTLAELGYRVSGKKAQLCQEEVTYLGFKIHKGSRSLSNSRTQAILQIPVPKTKRQVREFLGTIGYCRLWIPGFAELAQPLYAATRPGNDPLVWGEKEEEAFQSLKLALTQPPALALPSLDKPFQLFVEETSGAAKGVLTQALGPWKRPVAYLSKRLDPVAAGWPRCLRAIAAAALLTREASKLTFGQDIEITSSHNLESLLRSPPDKWLTNARITQYQVLLLDPPRVRFKQTAALNPATLLPETDDTLPIHHCLDTLDSLTSTRPDLTDQPLAQAEATLFTDGSSYIRDGKRYAGAAVVTLDSVIWAEPLPIGTSAQKAELIALTKALEWSKDKSVNIYTDSRYAFATLHVHGMIYRERGWLTAGGKAIKNAPEILALLTAVWLPKRVAVMHCKGHQKDDAPTSTGNRRADEVAREVAIRPLSTQATISAGKRTADGSEFEKRTADGSEFESPKKKAKVE

SEQ ID NO: 1151 - protein, 2098 aa, synthetic construct
MPAAKRVKLDGGDKKYSIGLDIGTNSVGWAVITDEYKVPSKKFKVLGNTDRHSIKKNLIGALLFDSGETAEATRLKRTARRRYTRRKNRICYLQEIFSNEMAKVDDSFFHRLEESFLVEEDKKHERHPIFGNIVDEVAYHEKYPTIYHLRKKLVDSTDKADLRLIYLALAHMIKFRGHFLIEGDLNPDNSDVDKLFIQLVQTYNQLFEENPINASGVDAKAILSARLSKSRRLENLIAQLPGEKKNGLFGNLIALSLGLTPNFKSNFDLAEDAKLQLSKDTYDDDLDNLLAQIGDQYADLFLAAKNLSDAILLSDILRVNTEITKAPLSASMIKRYDEHHQDLTLLKALVRQQLPEKYKEIFFDQSKNGYAGYIDGGASQEEFYKFIKPILEKMDGTEELLVKLNREDLLRKQRTFDNGSIPHQIHLGELHAILRRQEDFYPFLKDNREKIEKILTFRIPYYVGPLARGNSRFAWMTRKSEETITPWNFEEVVDKGASAQSFIERMTNFDKNLPNEKVLPKHSLLYEYFTVYNELTKVKYVTEGMRKPAFLSGEQKKAIVDLLFKTNRKVTVKQLKEDYFKKIECFDSVEISGVEDRFNASLGTYHDLLKIIKDKDFLDNEENEDILEDIVLTLTLFEDREMIEERLKTYAHLFDDKVMKQLKRRRYTGWGRLSRKLINGIRDKQSGKTILDFLKSDGFANRNFMQLIHDDSLTFKEDIQKAQVSGQGDSLHEHIANLAGSPAIKKGILQTVKVVDELVKVMGRHKPENIVIEMARENQTTQKGQKNSRERMKRIEEGIKELGSQILKEHPVENTQLQNEKLYLYYLQNGRDMYVDQELDINRLSDYDVDHIVPQSFLKDDSIDNKVLTRSDKARGKSDNVPSEEVVKKMKNYWRQLLNAKLITQRKFDNLTKAERGGLSELDKAGFIKRQLVETRQITKHVAQILDSRMNTKYDENDKLIREVKVITLKSKLVSDFRKDFQFYKVREINNYHHAHDAYLNAVVGTALIKKYPKLESEFVYGDYKVYDVRKMIAKSEQEIGKATAKYFFYSNIMNFFKTEITLANGEIRKRPLIETNGETGEIVWDKGRDFATVRKVLSMPQVNIVKKTEVQTGGFSKESILPKRNSDKLIARKKDWDPKKYGGFDSPTVAYSVLVVAKVEKGKSKKLKSVKELLGITIMERSSFEKNPIDFLEAKGYKEVKKDLIIKLPKYSLFELENGRKRMLASAGELQKGNELALPSKYVNFLYLASHYEKLKGSPEDNEQKQLFVEQHKHYLDEIIEQISEFSKRVILADANLDKVLSAYNKHRDKPIREQAENIIHLFTLTNLGAPAAFKYFDTTIDRKRYTSTKEVLDATLIHQSITGLYETRIDLSQLGGDGGGSSGGGEAAAKGGTAPLEEEYRLFLEAPIQNVTLLEQWKREIPKVWAEINPPGLASTQAPIHVQLLSTALPVRVRQYPITLEAKRSLRETIRKFRAAGILRPVHSPWNTPLLPVRKSGTSEYRMVQDLREVNKRVETIHPTVPNPYTLLSLLPPDRIWYSVLDLKDAFFCIPLAPESQLIFAFEWADAEEGESGQLTWTRLPQGFKNSPTLFNEALNRDLQGFRLDHPSVSLLQYVDDLLIAADTQAACLSATRDLLMTLAELGYRVSGKKAQLCQEEVTYLGFKIHKGSRSLSNSRTQAILQIPVPKTKRQVREFLGTIGYCRLWIPGFAELAQPLYAATRPGNDPLVWGEKEEEAFQSLKLALTQPPALALPSLDKPFQLFVEETSGAAKGVLTQALGPWKRPVAYLSKRLDPVAAGWPRCLRAIAAAALLTREASKLTFGQDIEITSSHNLESLLRSPPDKWLTNARITQYQVLLLDPPRVRFKQTAALNPATLLPETDDTLPIHHCLDTLDSLTSTRPDLTDQPLAQAEATLFTDGSSYIRDGKRYAGAAVVTLDSVIWAEPLPIGTSAQKAELIALTKALEWSKDKSVNIYTDSRYAFATLHVHGMIYRERGWLTAGGKAIKNAPEILALLTAVWLPKRVAVMHCKGHQKDDAPTSTGNRRADEVAREVAIRPLSTQATISAGKRTADGSEFEKRTADGSEFESPKKKAKVE

SEQ ID NO: 1152 - protein, 2097 aa, synthetic construct
MPAAKRVKLDGGDKKYSIGLDIGTNSVGWAVITDEYKVPSKKFKVLGNTDRHSIKKNLIGALLFDSGETAEATRLKRTARRRYTRRKNRICYLQEIFSNEMAKVDDSFFHRLEESFLVEEDKKHERHPIFGNIVDEVAYHEKYPTIYHLRKKLVDSTDKADLRLIYLALAHMIKFRGHFLIEGDLNPDNSDVDKLFIQLVQTYNQLFEENPINASGVDAKAILSARLSKSRRLENLIAQLPGEKKNGLFGNLIALSLGLTPNFKSNFDLAEDAKLQLSKDTYDDDLDNLLAQIGDQYADLFLAAKNLSDAILLSDILRVNTEITKAPLSASMIKRYDEHHQDLTLLKALVRQQLPEKYKEIFFDQSKNGYAGYIDGGASQEEFYKFIKPILEKMDGTEELLVKLNREDLLRKQRTFDNGSIPHQIHLGELHAILRRQEDFYPFLKDNREKIEKILTFRIPYYVGPLARGNSRFAWMTRKSEETITPWNFEEVVDKGASAQSFIERMTNFDKNLPNEKVLPKHSLLYEYFTVYNELTKVKYVTEGMRKPAFLSGEQKKAIVDLLFKTNRKVTVKQLKEDYFKKIECFDSVEISGVEDRFNASLGTYHDLLKIIKDKDFLDNEENEDILEDIVLTLTLFEDREMIEERLKTYAHLFDDKVMKQLKRRRYTGWGRLSRKLINGIRDKQSGKTILDFLKSDGFANRNFMQLIHDDSLTFKEDIQKAQVSGQGDSLHEHIANLAGSPAIKKGILQTVKVVDELVKVMGRHKPENIVIEMARENQTTQKGQKNSRERMKRIEEGIKELGSQILKEHPVENTQLQNEKLYLYYLQNGRDMYVDQELDINRLSDYDVDHIVPQSFLKDDSIDNKVLTRSDKARGKSDNVPSEEVVKKMKNYWRQLLNAKLITQRKFDNLTKAERGGLSELDKAGFIKRQLVETRQITKHVAQILDSRMNTKYDENDKLIREVKVITLKSKLVSDFRKDFQFYKVREINNYHHAHDAYLNAVVGTALIKKYPKLESEFVYGDYKVYDVRKMIAKSEQEIGKATAKYFFYSNIMNFFKTEITLANGEIRKRPLIETNGETGEIVWDKGRDFATVRKVLSMPQVNIVKKTEVQTGGFSKESILPKRNSDKLIARKKDWDPKKYGGFDSPTVAYSVLVVAKVEKGKSKKLKSVKELLGITIMERSSFEKNPIDFLEAKGYKEVKKDLIIKLPKYSLFELENGRKRMLASAGELQKGNELALPSKYVNFLYLASHYEKLKGSPEDNEQKQLFVEQHKHYLDEIIEQISEFSKRVILADANLDKVLSAYNKHRDKPIREQAENIIHLFTLTNLGAPAAFKYFDTTIDRKRYTSTKEVLDATLIHQSITGLYETRIDLSQLGGDGGEAAAKEAAAKGGTAPLEEEYRLFLEAPIQNVTLLEQWKREIPKVWAEINPPGLASTQAPIHVQLLSTALPVRVRQYPITLEAKRSLRETIRKFRAAGILRPVHSPWNTPLLPVRKSGTSEYRMVQDLREVNKRVETIHPTVPNPYTLLSLLPPDRIWYSVLDLKDAFFCIPLAPESQLIFAFEWADAEEGESGQLTWTRLPQGFKNSPTLFNEALNRDLQGFRLDHPSVSLLQYVDDLLIAADTQAACLSATRDLLMTLAELGYRVSGKKAQLCQEEVTYLGFKIHKGSRSLSNSRTQAILQIPVPKTKRQVREFLGTIGYCRLWIPGFAELAQPLYAATRPGNDPLVWGEKEEEAFQSLKLALTQPPALALPSLDKPFQLFVEETSGAAKGVLTQALGPWKRPVAYLSKRLDPVAAGWPRCLRAIAAAALLTREASKLTFGQDIEITSSHNLESLLRSPPDKWLTNARITQYQVLLLDPPRVRFKQTAALNPATLLPETDDTLPIHHCLDTLDSLTSTRPDLTDQPLAQAEATLFTDGSSYIRDGKRYAGAAVVTLDSVIWAEPLPIGTSAQKAELIALTKALEWSKDKSVNIYTDSRYAFATLHVHGMIYRERGWLTAGGKAIKNAPEILALLTAVWLPKRVAVMHCKGHQKDDAPTSTGNRRADEVAREVAIRPLSTQATISAGKRTADGSEFEKRTADGSEFESPKKKAKVE

SEQ ID NO: 1153 - protein, 2096 aa, synthetic construct
MPAAKRVKLDGGDKKYSIGLDIGTNSVGWAVITDEYKVPSKKFKVLGNTDRHSIKKNLIGALLFDSGETAEATRLKRTARRRYTRRKNRICYLQEIFSNEMAKVDDSFFHRLEESFLVEEDKKHERHPIFGNIVDEVAYHEKYPTIYHLRKKLVDSTDKADLRLIYLALAHMIKFRGHFLIEGDLNPDNSDVDKLFIQLVQTYNQLFEENPINASGVDAKAILSARLSKSRRLENLIAQLPGEKKNGLFGNLIALSLGLTPNFKSNFDLAEDAKLQLSKDTYDDDLDNLLAQIGDQYADLFLAAKNLSDAILLSDILRVNTEITKAPLSASMIKRYDEHHQDLTLLKALVRQQLPEKYKEIFFDQSKNGYAGYIDGGASQEEFYKFIKPILEKMDGTEELLVKLNREDLLRKQRTFDNGSIPHQIHLGELHAILRRQEDFYPFLKDNREKIEKILTFRIPYYVGPLARGNSRFAWMTRKSEETITPWNFEEVVDKGASAQSFIERMTNFDKNLPNEKVLPKHSLLYEYFTVYNELTKVKYVTEGMRKPAFLSGEQKKAIVDLLFKTNRKVTVKQLKEDYFKKIECFDSVEISGVEDRFNASLGTYHDLLKIIKDKDFLDNEENEDILEDIVLTLTLFEDREMIEERLKTYAHLFDDKVMKQLKRRRYTGWGRLSRKLINGIRDKQSGKTILDFLKSDGFANRNFMQLIHDDSLTFKEDIQKAQVSGQGDSLHEHIANLAGSPAIKKGILQTVKVVDELVKVMGRHKPENIVIEMARENQTTQKGQKNSRERMKRIEEGIKELGSQILKEHPVENTQLQNEKLYLYYLQNGRDMYVDQELDINRLSDYDVDHIVPQSFLKDDSIDNKVLTRSDKARGKSDNVPSEEVVKKMKNYWRQLLNAKLITQRKFDNLTKAERGGLSELDKAGFIKRQLVETRQITKHVAQILDSRMNTKYDENDKLIREVKVITLKSKLVSDFRKDFQFYKVREINNYHHAHDAYLNAVVGTALIKKYPKLESEFVYGDYKVYDVRKMIAKSEQEIGKATAKYFFYSNIMNFFKTEITLANGEIRKRPLIETNGETGEIVWDKGRDFATVRKVLSMPQVNIVKKTEVQTGGFSKESILPKRNSDKLIARKKDWDPKKYGGFDSPTVAYSVLVVAKVEKGKSKKLKSVKELLGITIMERSSFEKNPIDFLEAKGYKEVKKDLIIKLPKYSLFELENGRKRMLASAGELQKGNELALPSKYVNFLYLASHYEKLKGSPEDNEQKQLFVEQHKHYLDEIIEQISEFSKRVILADANLDKVLSAYNKHRDKPIREQAENIIHLFTLTNLGAPAAFKYFDTTIDRKRYTSTKEVLDATLIHQSITGLYETRIDLSQLGGDGGGGSPAPGSSGGTAPLEEEYRLFLEAPIQNVTLLEQWKREIPKVWAEINPPGLASTQAPIHVQLLSTALPVRVRQYPITLEAKRSLRETIRKFRAAGILRPVHSPWNTPLLPVRKSGTSEYRMVQDLREVNKRVETIHPTVPNPYTLLSLLPPDRIWYSVLDLKDAFFCIPLAPESQLIFAFEWADAEEGESGQLTWTRLPQGFKNSPTLFNEALNRDLQGFRLDHPSVSLLQYVDDLLIAADTQAACLSATRDLLMTLAELGYRVSGKKAQLCQEEVTYLGFKIHKGSRSLSNSRTQAILQIPVPKTKRQVREFLGTIGYCRLWIPGFAELAQPLYAATRPGNDPLVWGEKEEEAFQSLKLALTQPPALALPSLDKPFQLFVEETSGAAKGVLTQALGPWKRPVAYLSKRLDPVAAGWPRCLRAIAAAALLTREASKLTFGQDIEITSSHNLESLLRSPPDKWLTNARITQYQVLLLDPPRVRFKQTAALNPATLLPETDDTLPIHHCLDTLDSLTSTRPDLTDQPLAQAEATLFTDGSSYIRDGKRYAGAAVVTLDSVIWAEPLPIGTSAQKAELIALTKALEWSKDKSVNIYTDSRYAFATLHVHGMIYRERGWLTAGGKAIKNAPEILALLTAVWLPKRVAVMHCKGHQKDDAPTSTGNRRADEVAREVAIRPLSTQATISAGKRTADGSEFEKRTADGSEFESPKKKAKVE

SEQ ID NO: 1154 - protein, 2098 aa, synthetic construct
MPAAKRVKLDGGDKKYSIGLDIGTNSVGWAVITDEYKVPSKKFKVLGNTDRHSIKKNLIGALLFDSGETAEATRLKRTARRRYTRRKNRICYLQEIFSNEMAKVDDSFFHRLEESFLVEEDKKHERHPIFGNIVDEVAYHEKYPTIYHLRKKLVDSTDKADLRLIYLALAHMIKFRGHFLIEGDLNPDNSDVDKLFIQLVQTYNQLFEENPINASGVDAKAILSARLSKSRRLENLIAQLPGEKKNGLFGNLIALSLGLTPNFKSNFDLAEDAKLQLSKDTYDDDLDNLLAQIGDQYADLFLAAKNLSDAILLSDILRVNTEITKAPLSASMIKRYDEHHQDLTLLKALVRQQLPEKYKEIFFDQSKNGYAGYIDGGASQEEFYKFIKPILEKMDGTEELLVKLNREDLLRKQRTFDNGSIPHQIHLGELHAILRRQEDFYPFLKDNREKIEKILTFRIPYYVGPLARGNSRFAWMTRKSEETITPWNFEEVVDKGASAQSFIERMTNFDKNLPNEKVLPKHSLLYEYFTVYNELTKVKYVTEGMRKPAFLSGEQKKAIVDLLFKTNRKVTVKQLKEDYFKKIECFDSVEISGVEDRFNASLGTYHDLLKIIKDKDFLDNEENEDILEDIVLTLTLFEDREMIEERLKTYAHLFDDKVMKQLKRRRYTGWGRLSRKLINGIRDKQSGKTILDFLKSDGFANRNFMQLIHDDSLTFKEDIQKAQVSGQGDSLHEHIANLAGSPAIKKGILQTVKVVDELVKVMGRHKPENIVIEMARENQTTQKGQKNSRERMKRIEEGIKELGSQILKEHPVENTQLQNEKLYLYYLQNGRDMYVDQELDINRLSDYDVDHIVPQSFLKDDSIDNKVLTRSDKARGKSDNVPSEEVVKKMKNYWRQLLNAKLITQRKFDNLTKAERGGLSELDKAGFIKRQLVETRQITKHVAQILDSRMNTKYDENDKLIREVKVITLKSKLVSDFRKDFQFYKVREINNYHHAHDAYLNAVVGTALIKKYPKLESEFVYGDYKVYDVRKMIAKSEQEIGKATAKYFFYSNIMNFFKTEITLANGEIRKRPLIETNGETGEIVWDKGRDFATVRKVLSMPQVNIVKKTEVQTGGFSKESILPKRNSDKLIARKKDWDPKKYGGFDSPTVAYSVLVVAKVEKGKSKKLKSVKELLGITIMERSSFEKNPIDFLEAKGYKEVKKDLIIKLPKYSLFELENGRKRMLASAGELQKGNELALPSKYVNFLYLASHYEKLKGSPEDNEQKQLFVEQHKHYLDEIIEQISEFSKRVILADANLDKVLSAYNKHRDKPIREQAENIIHLFTLTNLGAPAAFKYFDTTIDRKRYTSTKEVLDATLIHQSITGLYETRIDLSQLGGDGGGGGEAAAKGGSGGTAPLEEEYRLFLEAPIQNVTLLEQWKREIPKVWAEINPPGLASTQAPIHVQLLSTALPVRVRQYPITLEAKRSLRETIRKFRAAGILRPVHSPWNTPLLPVRKSGTSEYRMVQDLREVNKRVETIHPTVPNPYTLLSLLPPDRIWYSVLDLKDAFFCIPLAPESQLIFAFEWADAEEGESGQLTWTRLPQGFKNSPTLFNEALNRDLQGFRLDHPSVSLLQYVDDLLIAADTQAACLSATRDLLMTLAELGYRVSGKKAQLCQEEVTYLGFKIHKGSRSLSNSRTQAILQIPVPKTKRQVREFLGTIGYCRLWIPGFAELAQPLYAATRPGNDPLVWGEKEEEAFQSLKLALTQPPALALPSLDKPFQLFVEETSGAAKGVLTQALGPWKRPVAYLSKRLDPVAAGWPRCLRAIAAAALLTREASKLTFGQDIEITSSHNLESLLRSPPDKWLTNARITQYQVLLLDPPRVRFKQTAALNPATLLPETDDTLPIHHCLDTLDSLTSTRPDLTDQPLAQAEATLFTDGSSYIRDGKRYAGAAVVTLDSVIWAEPLPIGTSAQKAELIALTKALEWSKDKSVNIYTDSRYAFATLHVHGMIYRERGWLTAGGKAIKNAPEILALLTAVWLPKRVAVMHCKGHQKDDAPTSTGNRRADEVAREVAIRPLSTQATISAGKRTADGSEFEKRTADGSEFESPKKKAKVE

SEQ ID NO: 1155 - protein, 2098 aa, synthetic construct
MPAAKRVKLDGGDKKYSIGLDIGTNSVGWAVITDEYKVPSKKFKVLGNTDRHSIKKNLIGALLFDSGETAEATRLKRTARRRYTRRKNRICYLQEIFSNEMAKVDDSFFHRLEESFLVEEDKKHERHPIFGNIVDEVAYHEKYPTIYHLRKKLVDSTDKADLRLIYLALAHMIKFRGHFLIEGDLNPDNSDVDKLFIQLVQTYNQLFEENPINASGVDAKAILSARLSKSRRLENLIAQLPGEKKNGLFGNLIALSLGLTPNFKSNFDLAEDAKLQLSKDTYDDDLDNLLAQIGDQYADLFLAAKNLSDAILLSDILRVNTEITKAPLSASMIKRYDEHHQDLTLLKALVRQQLPEKYKEIFFDQSKNGYAGYIDGGASQEEFYKFIKPILEKMDGTEELLVKLNREDLLRKQRTFDNGSIPHQIHLGELHAILRRQEDFYPFLKDNREKIEKILTFRIPYYVGPLARGNSRFAWMTRKSEETITPWNFEEVVDKGASAQSFIERMTNFDKNLPNEKVLPKHSLLYEYFTVYNELTKVKYVTEGMRKPAFLSGEQKKAIVDLLFKTNRKVTVKQLKEDYFKKIECFDSVEISGVEDRFNASLGTYHDLLKIIKDKDFLDNEENEDILEDIVLTLTLFEDREMIEERLKTYAHLFDDKVMKQLKRRRYTGWGRLSRKLINGIRDKQSGKTILDFLKSDGFANRNFMQLIHDDSLTFKEDIQKAQVSGQGDSLHEHIANLAGSPAIKKGILQTVKVVDELVKVMGRHKPENIVIEMARENQTTQKGQKNSRERMKRIEEGIKELGSQILKEHPVENTQLQNEKLYLYYLQNGRDMYVDQELDINRLSDYDVDHIVPQSFLKDDSIDNKVLTRSDKARGKSDNVPSEEVVKKMKNYWRQLLNAKLITQRKFDNLTKAERGGLSELDKAGFIKRQLVETRQITKHVAQILDSRMNTKYDENDKLIREVKVITLKSKLVSDFRKDFQFYKVREINNYHHAHDAYLNAVVGTALIKKYPKLESEFVYGDYKVYDVRKMIAKSEQEIGKATAKYFFYSNIMNFFKTEITLANGEIRKRPLIETNGETGEIVWDKGRDFATVRKVLSMPQVNIVKKTEVQTGGFSKESILPKRNSDKLIARKKDWDPKKYGGFDSPTVAYSVLVVAKVEKGKSKKLKSVKELLGITIMERSSFEKNPIDFLEAKGYKEVKKDLIIKLPKYSLFELENGRKRMLASAGELQKGNELALPSKYVNFLYLASHYEKLKGSPEDNEQKQLFVEQHKHYLDEIIEQISEFSKRVILADANLDKVLSAYNKHRDKPIREQAENIIHLFTLTNLGAPAAFKYFDTTIDRKRYTSTKEVLDATLIHQSITGLYETRIDLSQLGGDGGGGGEAAAKPAPGGTAPLEEEYRLFLEAPIQNVTLLEQWKREIPKVWAEINPPGLASTQAPIHVQLLSTALPVRVRQYPITLEAKRSLRETIRKFRAAGILRPVHSPWNTPLLPVRKSGTSEYRMVQDLREVNKRVETIHPTVPNPYTLLSLLPPDRIWYSVLDLKDAFFCIPLAPESQLIFAFEWADAEEGESGQLTWTRLPQGFKNSPTLFNEALNRDLQGFRLDHPSVSLLQYVDDLLIAADTQAACLSATRDLLMTLAELGYRVSGKKAQLCQEEVTYLGFKIHKGSRSLSNSRTQAILQIPVPKTKRQVREFLGTIGYCRLWIPGFAELAQPLYAATRPGNDPLVWGEKEEEAFQSLKLALTQPPALALPSLDKPFQLFVEETSGAAKGVLTQALGPWKRPVAYLSKRLDPVAAGWPRCLRAIAAAALLTREASKLTFGQDIEITSSHNLESLLRSPPDKWLTNARITQYQVLLLDPPRVRFKQTAALNPATLLPETDDTLPIHHCLDTLDSLTSTRPDLTDQPLAQAEATLFTDGSSYIRDGKRYAGAAVVTLDSVIWAEPLPIGTSAQKAELIALTKALEWSKDKSVNIYTDSRYAFATLHVHGMIYRERGWLTAGGKAIKNAPEILALLTAVWLPKRVAVMHCKGHQKDDAPTSTGNRRADEVAREVAIRPLSTQATISAGKRTADGSEFEKRTADGSEFESPKKKAKVE

SEQ ID NO: 1156 - protein, 2098 aa, synthetic construct
MPAAKRVKLDGGDKKYSIGLDIGTNSVGWAVITDEYKVPSKKFKVLGNTDRHSIKKNLIGALLFDSGETAEATRLKRTARRRYTRRKNRICYLQEIFSNEMAKVDDSFFHRLEESFLVEEDKKHERHPIFGNIVDEVAYHEKYPTIYHLRKKLVDSTDKADLRLIYLALAHMIKFRGHFLIEGDLNPDNSDVDKLFIQLVQTYNQLFEENPINASGVDAKAILSARLSKSRRLENLIAQLPGEKKNGLFGNLIALSLGLTPNFKSNFDLAEDAKLQLSKDTYDDDLDNLLAQIGDQYADLFLAAKNLSDAILLSDILRVNTEITKAPLSASMIKRYDEHHQDLTLLKALVRQQLPEKYKEIFFDQSKNGYAGYIDGGASQEEFYKFIKPILEKMDGTEELLVKLNREDLLRKQRTFDNGSIPHQIHLGELHAILRRQEDFYPFLKDNREKIEKILTFRIPYYVGPLARGNSRFAWMTRKSEETITPWNFEEVVDKGASAQSFIERMTNFDKNLPNEKVLPKHSLLYEYFTVYNELTKVKYVTEGMRKPAFLSGEQKKAIVDLLFKTNRKVTVKQLKEDYFKKIECFDSVEISGVEDRFNASLGTYHDLLKIIKDKDFLDNEENEDILEDIVLTLTLFEDREMIEERLKTYAHLFDDKVMKQLKRRRYTGWGRLSRKLINGIRDKQSGKTILDFLKSDGFANRNFMQLIHDDSLTFKEDIQKAQVSGQGDSLHEHIANLAGSPAIKKGILQTVKVVDELVKVMGRHKPENIVIEMARENQTTQKGQKNSRERMKRIEEGIKELGSQILKEHPVENTQLQNEKLYLYYLQNGRDMYVDQELDINRLSDYDVDHIVPQSFLKDDSIDNKVLTRSDKARGKSDNVPSEEVVKKMKNYWRQLLNAKLITQRKFDNLTKAERGGLSELDKAGFIKRQLVETRQITKHVAQILDSRMNTKYDENDKLIREVKVITLKSKLVSDFRKDFQFYKVREINNYHHAHDAYLNAVVGTALIKKYPKLESEFVYGDYKVYDVRKMIAKSEQEIGKATAKYFFYSNIMNFFKTEITLANGEIRKRPLIETNGETGEIVWDKGRDFATVRKVLSMPQVNIVKKTEVQTGGFSKESILPKRNSDKLIARKKDWDPKKYGGFDSPTVAYSVLVVAKVEKGKSKKLKSVKELLGITIMERSSFEKNPIDFLEAKGYKEVKKDLIIKLPKYSLFELENGRKRMLASAGELQKGNELALPSKYVNFLYLASHYEKLKGSPEDNEQKQLFVEQHKHYLDEIIEQISEFSKRVILADANLDKVLSAYNKHRDKPIREQAENIIHLFTLTNLGAPAAFKYFDTTIDRKRYTSTKEVLDATLIHQSITGLYETRIDLSQLGGDGGEAAAKPAPGGSGGTAPLEEEYRLFLEAPIQNVTLLEQWKREIPKVWAEINPPGLASTQAPIHVQLLSTALPVRVRQYPITLEAKRSLRETIRKFRAAGILRPVHSPWNTPLLPVRKSGTSEYRMVQDLREVNKRVETIHPTVPNPYTLLSLLPPDRIWYSVLDLKDAFFCIPLAPESQLIFAFEWADAEEGESGQLTWTRLPQGFKNSPTLFNEALNRDLQGFRLDHPSVSLLQYVDDLLIAADTQAACLSATRDLLMTLAELGYRVSGKKAQLCQEEVTYLGFKIHKGSRSLSNSRTQAILQIPVPKTKRQVREFLGTIGYCRLWIPGFAELAQPLYAATRPGNDPLVWGEKEEEAFQSLKLALTQPPALALPSLDKPFQLFVEETSGAAKGVLTQALGPWKRPVAYLSKRLDPVAAGWPRCLRAIAAAALLTREASKLTFGQDIEITSSHNLESLLRSPPDKWLTNARITQYQVLLLDPPRVRFKQTAALNPATLLPETDDTLPIHHCLDTLDSLTSTRPDLTDQPLAQAEATLFTDGSSYIRDGKRYAGAAVVTLDSVIWAEPLPIGTSAQKAELIALTKALEWSKDKSVNIYTDSRYAFATLHVHGMIYRERGWLTAGGKAIKNAPEILALLTAVWLPKRVAVMHCKGHQKDDAPTSTGNRRADEVAREVAIRPLSTQATISAGKRTADGSEFEKRTADGSEFESPKKKAKVE

SEQ ID NO: 1157 - protein, 2098 aa, synthetic construct
MPAAKRVKLDGGDKKYSIGLDIGTNSVGWAVITDEYKVPSKKFKVLGNTDRHSIKKNLIGALLFDSGETAEATRLKRTARRRYTRRKNRICYLQEIFSNEMAKVDDSFFHRLEESFLVEEDKKHERHPIFGNIVDEVAYHEKYPTIYHLRKKLVDSTDKADLRLIYLALAHMIKFRGHFLIEGDLNPDNSDVDKLFIQLVQTYNQLFEENPINASGVDAKAILSARLSKSRRLENLIAQLPGEKKNGLFGNLIALSLGLTPNFKSNFDLAEDAKLQLSKDTYDDDLDNLLAQIGDQYADLFLAAKNLSDAILLSDILRVNTEITKAPLSASMIKRYDEHHQDLTLLKALVRQQLPEKYKEIFFDQSKNGYAGYIDGGASQEEFYKFIKPILEKMDGTEELLVKLNREDLLRKQRTFDNGSIPHQIHLGELHAILRRQEDFYPFLKDNREKIEKILTFRIPYYVGPLARGNSRFAWMTRKSEETITPWNFEEVVDKGASAQSFIERMTNFDKNLPNEKVLPKHSLLYEYFTVYNELTKVKYVTEGMRKPAFLSGEQKKAIVDLLFKTNRKVTVKQLKEDYFKKIECFDSVEISGVEDRFNASLGTYHDLLKIIKDKDFLDNEENEDILEDIVLTLTLFEDREMIEERLKTYAHLFDDKVMKQLKRRRYTGWGRLSRKLINGIRDKQSGKTILDFLKSDGFANRNFMQLIHDDSLTFKEDIQKAQVSGQGDSLHEHIANLAGSPAIKKGILQTVKVVDELVKVMGRHKPENIVIEMARENQTTQKGQKNSRERMKRIEEGIKELGSQILKEHPVENTQLQNEKLYLYYLQNGRDMYVDQELDINRLSDYDVDHIVPQSFLKDDSIDNKVLTRSDKARGKSDNVPSEEVVKKMKNYWRQLLNAKLITQRKFDNLTKAERGGLSELDKAGFIKRQLVETRQITKHVAQILDSRMNTKYDENDKLIREVKVITLKSKLVSDFRKDFQFYKVREINNYHHAHDAYLNAVVGTALIKKYPKLESEFVYGDYKVYDVRKMIAKSEQEIGKATAKYFFYSNIMNFFKTEITLANGEIRKRPLIETNGETGEIVWDKGRDFATVRKVLSMPQVNIVKKTEVQTGGFSKESILPKRNSDKLIARKKDWDPKKYGGFDSPTVAYSVLVVAKVEKGKSKKLKSVKELLGITIMERSSFEKNPIDFLEAKGYKEVKKDLIIKLPKYSLFELENGRKRMLASAGELQKGNELALPSKYVNFLYLASHYEKLKGSPEDNEQKQLFVEQHKHYLDEIIEQISEFSKRVILADANLDKVLSAYNKHRDKPIREQAENIIHLFTLTNLGAPAAFKYFDTTIDRKRYTSTKEVLDATLIHQSITGLYETRIDLSQLGGDGGEAAAKGGGGGSGGTAPLEEEYRLFLEAPIQNVTLLEQWKREIPKVWAEINPPGLASTQAPIHVQLLSTALPVRVRQYPITLEAKRSLRETIRKFRAAGILRPVHSPWNTPLLPVRKSGTSEYRMVQDLREVNKRVETIHPTVPNPYTLLSLLPPDRIWYSVLDLKDAFFCIPLAPESQLIFAFEWADAEEGESGQLTWTRLPQGFKNSPTLFNEALNRDLQGFRLDHPSVSLLQYVDDLLIAADTQAACLSATRDLLMTLAELGYRVSGKKAQLCQEEVTYLGFKIHKGSRSLSNSRTQAILQIPVPKTKRQVREFLGTIGYCRLWIPGFAELAQPLYAATRPGNDPLVWGEKEEEAFQSLKLALTQPPALALPSLDKPFQLFVEETSGAAKGVLTQALGPWKRPVAYLSKRLDPVAAGWPRCLRAIAAAALLTREASKLTFGQDIEITSSHNLESLLRSPPDKWLTNARITQYQVLLLDPPRVRFKQTAALNPATLLPETDDTLPIHHCLDTLDSLTSTRPDLTDQPLAQAEATLFTDGSSYIRDGKRYAGAAVVTLDSVIWAEPLPIGTSAQKAELIALTKALEWSKDKSVNIYTDSRYAFATLHVHGMIYRERGWLTAGGKAIKNAPEILALLTAVWLPKRVAVMHCKGHQKDDAPTSTGNRRADEVAREVAIRPLSTQATISAGKRTADGSEFEKRTADGSEFESPKKKAKVE

SEQ ID NO: 1158 - protein, 2102 aa, synthetic construct
MPAAKRVKLDGGDKKYSIGLDIGTNSVGWAVITDEYKVPSKKFKVLGNTDRHSIKKNLIGALLFDSGETAEATRLKRTARRRYTRRKNRICYLQEIFSNEMAKVDDSFFHRLEESFLVEEDKKHERHPIFGNIVDEVAYHEKYPTIYHLRKKLVDSTDKADLRLIYLALAHMIKFRGHFLIEGDLNPDNSDVDKLFIQLVQTYNQLFEENPINASGVDAKAILSARLSKSRRLENLIAQLPGEKKNGLFGNLIALSLGLTPNFKSNFDLAEDAKLQLSKDTYDDDLDNLLAQIGDQYADLFLAAKNLSDAILLSDILRVNTEITKAPLSASMIKRYDEHHQDLTLLKALVRQQLPEKYKEIFFDQSKNGYAGYIDGGASQEEFYKFIKPILEKMDGTEELLVKLNREDLLRKQRTFDNGSIPHQIHLGELHAILRRQEDFYPFLKDNREKIEKILTFRIPYYVGPLARGNSRFAWMTRKSEETITPWNFEEVVDKGASAQSFIERMTNFDKNLPNEKVLPKHSLLYEYFTVYNELTKVKYVTEGMRKPAFLSGEQKKAIVDLLFKTNRKVTVKQLKEDYFKKIECFDSVEISGVEDRFNASLGTYHDLLKIIKDKDFLDNEENEDILEDIVLTLTLFEDREMIEERLKTYAHLFDDKVMKQLKRRRYTGWGRLSRKLINGIRDKQSGKTILDFLKSDGFANRNFMQLIHDDSLTFKEDIQKAQVSGQGDSLHEHIANLAGSPAIKKGILQTVKVVDELVKVMGRHKPENIVIEMARENQTTQKGQKNSRERMKRIEEGIKELGSQILKEHPVENTQLQNEKLYLYYLQNGRDMYVDQELDINRLSDYDVDHIVPQSFLKDDSIDNKVLTRSDKARGKSDNVPSEEVVKKMKNYWRQLLNAKLITQRKFDNLTKAERGGLSELDKAGFIKRQLVETRQITKHVAQILDSRMNTKYDENDKLIREVKVITLKSKLVSDFRKDFQFYKVREINNYHHAHDAYLNAVVGTALIKKYPKLESEFVYGDYKVYDVRKMIAKSEQEIGKATAKYFFYSNIMNFFKTEITLANGEIRKRPLIETNGETGEIVWDKGRDFATVRKVLSMPQVNIVKKTEVQTGGFSKESILPKRNSDKLIARKKDWDPKKYGGFDSPTVAYSVLVVAKVEKGKSKKLKSVKELLGITIMERSSFEKNPIDFLEAKGYKEVKKDLIIKLPKYSLFELENGRKRMLASAGELQKGNELALPSKYVNFLYLASHYEKLKGSPEDNEQKQLFVEQHKHYLDEIIEQISEFSKRVILADANLDKVLSAYNKHRDKPIREQAENIIHLFTLTNLGAPAAFKYFDTTIDRKRYTSTKEVLDATLIHQSITGLYETRIDLSQLGGDGGGGGGSEAAAKGGGGSGGTAPLEEEYRLFLEAPIQNVTLLEQWKREIPKVWAEINPPGLASTQAPIHVQLLSTALPVRVRQYPITLEAKRSLRETIRKFRAAGILRPVHSPWNTPLLPVRKSGTSEYRMVQDLREVNKRVETIHPTVPNPYTLLSLLPPDRIWYSVLDLKDAFFCIPLAPESQLIFAFEWADAEEGESGQLTWTRLPQGFKNSPTLFNEALNRDLQGFRLDHPSVSLLQYVDDLLIAADTQAACLSATRDLLMTLAELGYRVSGKKAQLCQEEVTYLGFKIHKGSRSLSNSRTQAILQIPVPKTKRQVREFLGTIGYCRLWIPGFAELAQPLYAATRPGNDPLVWGEKEEEAFQSLKLALTQPPALALPSLDKPFQLFVEETSGAAKGVLTQALGPWKRPVAYLSKRLDPVAAGWPRCLRAIAAAALLTREASKLTFGQDIEITSSHNLESLLRSPPDKWLTNARITQYQVLLLDPPRVRFKQTAALNPATLLPETDDTLPIHHCLDTLDSLTSTRPDLTDQPLAQAEATLFTDGSSYIRDGKRYAGAAVVTLDSVIWAEPLPIGTSAQKAELIALTKALEWSKDKSVNIYTDSRYAFATLHVHGMIYRERGWLTAGGKAIKNAPEILALLTAVWLPKRVAVMHCKGHQKDDAPTSTGNRRADEVAREVAIRPLSTQATISAGKRTADGSEFEKRTADGSEFESPKKKAKVE

SEQ ID NO: 1159 - protein, 2096 aa, synthetic construct
MPAAKRVKLDGGDKKYSIGLDIGTNSVGWAVITDEYKVPSKKFKVLGNTDRHSIKKNLIGALLFDSGETAEATRLKRTARRRYTRRKNRICYLQEIFSNEMAKVDDSFFHRLEESFLVEEDKKHERHPIFGNIVDEVAYHEKYPTIYHLRKKLVDSTDKADLRLIYLALAHMIKFRGHFLIEGDLNPDNSDVDKLFIQLVQTYNQLFEENPINASGVDAKAILSARLSKSRRLENLIAQLPGEKKNGLFGNLIALSLGLTPNFKSNFDLAEDAKLQLSKDTYDDDLDNLLAQIGDQYADLFLAAKNLSDAILLSDILRVNTEITKAPLSASMIKRYDEHHQDLTLLKALVRQQLPEKYKEIFFDQSKNGYAGYIDGGASQEEFYKFIKPILEKMDGTEELLVKLNREDLLRKQRTFDNGSIPHQIHLGELHAILRRQEDFYPFLKDNREKIEKILTFRIPYYVGPLARGNSRFAWMTRKSEETITPWNFEEVVDKGASAQSFIERMTNFDKNLPNEKVLPKHSLLYEYFTVYNELTKVKYVTEGMRKPAFLSGEQKKAIVDLLFKTNRKVTVKQLKEDYFKKIECFDSVEISGVEDRFNASLGTYHDLLKIIKDKDFLDNEENEDILEDIVLTLTLFEDREMIEERLKTYAHLFDDKVMKQLKRRRYTGWGRLSRKLINGIRDKQSGKTILDFLKSDGFANRNFMQLIHDDSLTFKEDIQKAQVSGQGDSLHEHIANLAGSPAIKKGILQTVKVVDELVKVMGRHKPENIVIEMARENQTTQKGQKNSRERMKRIEEGIKELGSQILKEHPVENTQLQNEKLYLYYLQNGRDMYVDQELDINRLSDYDVDHIVPQSFLKDDSIDNKVLTRSDKARGKSDNVPSEEVVKKMKNYWRQLLNAKLITQRKFDNLTKAERGGLSELDKAGFIKRQLVETRQITKHVAQILDSRMNTKYDENDKLIREVKVITLKSKLVSDFRKDFQFYKVREINNYHHAHDAYLNAVVGTALIKKYPKLESEFVYGDYKVYDVRKMIAKSEQEIGKATAKYFFYSNIMNFFKTEITLANGEIRKRPLIETNGETGEIVWDKGRDFATVRKVLSMPQVNIVKKTEVQTGGFSKESILPKRNSDKLIARKKDWDPKKYGGFDSPTVAYSVLVVAKVEKGKSKKLKSVKELLGITIMERSSFEKNPIDFLEAKGYKEVKKDLIIKLPKYSLFELENGRKRMLASAGELQKGNELALPSKYVNFLYLASHYEKLKGSPEDNEQKQLFVEQHKHYLDEIIEQISEFSKRVILADANLDKVLSAYNKHRDKPIREQAENIIHLFTLTNLGAPAAFKYFDTTIDRKRYTSTKEVLDATLIHQSITGLYETRIDLSQLGGDGGPAPGGGGGSGGTAPLEEEYRLFLEAPIQNVTLLEQWKREIPKVWAEINPPGLASTQAPIHVQLLSTALPVRVRQYPITLEAKRSLRETIRKFRAAGILRPVHSPWNTPLLPVRKSGTSEYRMVQDLREVNKRVETIHPTVPNPYTLLSLLPPDRIWYSVLDLKDAFFCIPLAPESQLIFAFEWADAEEGESGQLTWTRLPQGFKNSPTLFNEALNRDLQGFRLDHPSVSLLQYVDDLLIAADTQAACLSATRDLLMTLAELGYRVSGKKAQLCQEEVTYLGFKIHKGSRSLSNSRTQAILQIPVPKTKRQVREFLGTIGYCRLWIPGFAELAQPLYAATRPGNDPLVWGEKEEEAFQSLKLALTQPPALALPSLDKPFQLFVEETSGAAKGVLTQALGPWKRPVAYLSKRLDPVAAGWPRCLRAIAAAALLTREASKLTFGQDIEITSSHNLESLLRSPPDKWLTNARITQYQVLLLDPPRVRFKQTAALNPATLLPETDDTLPIHHCLDTLDSLTSTRPDLTDQPLAQAEATLFTDGSSYIRDGKRYAGAAVVTLDSVIWAEPLPIGTSAQKAELIALTKALEWSKDKSVNIYTDSRYAFATLHVHGMIYRERGWLTAGGKAIKNAPEILALLTAVWLPKRVAVMHCKGHQKDDAPTSTGNRRADEVAREVAIRPLSTQATISAGKRTADGSEFEKRTADGSEFESPKKKAKVE

SEQ ID NO: 1160 - protein, 2098 aa, synthetic construct
MPAAKRVKLDGGDKKYSIGLDIGTNSVGWAVITDEYKVPSKKFKVLGNTDRHSIKKNLIGALLFDSGETAEATRLKRTARRRYTRRKNRICYLQEIFSNEMAKVDDSFFHRLEESFLVEEDKKHERHPIFGNIVDEVAYHEKYPTIYHLRKKLVDSTDKADLRLIYLALAHMIKFRGHFLIEGDLNPDNSDVDKLFIQLVQTYNQLFEENPINASGVDAKAILSARLSKSRRLENLIAQLPGEKKNGLFGNLIALSLGLTPNFKSNFDLAEDAKLQLSKDTYDDDLDNLLAQIGDQYADLFLAAKNLSDAILLSDILRVNTEITKAPLSASMIKRYDEHHQDLTLLKALVRQQLPEKYKEIFFDQSKNGYAGYIDGGASQEEFYKFIKPILEKMDGTEELLVKLNREDLLRKQRTFDNGSIPHQIHLGELHAILRRQEDFYPFLKDNREKIEKILTFRIPYYVGPLARGNSRFAWMTRKSEETITPWNFEEVVDKGASAQSFIERMTNFDKNLPNEKVLPKHSLLYEYFTVYNELTKVKYVTEGMRKPAFLSGEQKKAIVDLLFKTNRKVTVKQLKEDYFKKIECFDSVEISGVEDRFNASLGTYHDLLKIIKDKDFLDNEENEDILEDIVLTLTLFEDREMIEERLKTYAHLFDDKVMKQLKRRRYTGWGRLSRKLINGIRDKQSGKTILDFLKSDGFANRNFMQLIHDDSLTFKEDIQKAQVSGQGDSLHEHIANLAGSPAIKKGILQTVKVVDELVKVMGRHKPENIVIEMARENQTTQKGQKNSRERMKRIEEGIKELGSQILKEHPVENTQLQNEKLYLYYLQNGRDMYVDQELDINRLSDYDVDHIVPQSFLKDDSIDNKVLTRSDKARGKSDNVPSEEVVKKMKNYWRQLLNAKLITQRKFDNLTKAERGGLSELDKAGFIKRQLVETRQITKHVAQILDSRMNTKYDENDKLIREVKVITLKSKLVSDFRKDFQFYKVREINNYHHAHDAYLNAVVGTALIKKYPKLESEFVYGDYKVYDVRKMIAKSEQEIGKATAKYFFYSNIMNFFKTEITLANGEIRKRPLIETNGETGEIVWDKGRDFATVRKVLSMPQVNIVKKTEVQTGGFSKESILPKRNSDKLIARKKDWDPKKYGGFDSPTVAYSVLVVAKVEKGKSKKLKSVKELLGITIMERSSFEKNPIDFLEAKGYKEVKKDLIIKLPKYSLFELENGRKRMLASAGELQKGNELALPSKYVNFLYLASHYEKLKGSPEDNEQKQLFVEQHKHYLDEIIEQISEFSKRVILADANLDKVLSAYNKHRDKPIREQAENIIHLFTLTNLGAPAAFKYFDTTIDRKRYTSTKEVLDATLIHQSITGLYETRIDLSQLGGDGGGGSPAPEAAAKGGTAPLEEEYRLFLEAPIQNVTLLEQWKREIPKVWAEINPPGLASTQAPIHVQLLSTALPVRVRQYPITLEAKRSLRETIRKFRAAGILRPVHSPWNTPLLPVRKSGTSEYRMVQDLREVNKRVETIHPTVPNPYTLLSLLPPDRIWYSVLDLKDAFFCIPLAPESQLIFAFEWADAEEGESGQLTWTRLPQGFKNSPTLFNEALNRDLQGFRLDHPSVSLLQYVDDLLIAADTQAACLSATRDLLMTLAELGYRVSGKKAQLCQEEVTYLGFKIHKGSRSLSNSRTQAILQIPVPKTKRQVREFLGTIGYCRLWIPGFAELAQPLYAATRPGNDPLVWGEKEEEAFQSLKLALTQPPALALPSLDKPFQLFVEETSGAAKGVLTQALGPWKRPVAYLSKRLDPVAAGWPRCLRAIAAAALLTREASKLTFGQDIEITSSHNLESLLRSPPDKWLTNARITQYQVLLLDPPRVRFKQTAALNPATLLPETDDTLPIHHCLDTLDSLTSTRPDLTDQPLAQAEATLFTDGSSYIRDGKRYAGAAVVTLDSVIWAEPLPIGTSAQKAELIALTKALEWSKDKSVNIYTDSRYAFATLHVHGMIYRERGWLTAGGKAIKNAPEILALLTAVWLPKRVAVMHCKGHQKDDAPTSTGNRRADEVAREVAIRPLSTQATISAGKRTADGSEFEKRTADGSEFESPKKKAKVE

SEQ ID NO: 1161 - protein, 2098 aa, synthetic construct
MPAAKRVKLDGGDKKYSIGLDIGTNSVGWAVITDEYKVPSKKFKVLGNTDRHSIKKNLIGALLFDSGETAEATRLKRTARRRYTRRKNRICYLQEIFSNEMAKVDDSFFHRLEESFLVEEDKKHERHPIFGNIVDEVAYHEKYPTIYHLRKKLVDSTDKADLRLIYLALAHMIKFRGHFLIEGDLNPDNSDVDKLFIQLVQTYNQLFEENPINASGVDAKAILSARLSKSRRLENLIAQLPGEKKNGLFGNLIALSLGLTPNFKSNFDLAEDAKLQLSKDTYDDDLDNLLAQIGDQYADLFLAAKNLSDAILLSDILRVNTEITKAPLSASMIKRYDEHHQDLTLLKALVRQQLPEKYKEIFFDQSKNGYAGYIDGGASQEEFYKFIKPILEKMDGTEELLVKLNREDLLRKQRTFDNGSIPHQIHLGELHAILRRQEDFYPFLKDNREKIEKILTFRIPYYVGPLARGNSRFAWMTRKSEETITPWNFEEVVDKGASAQSFIERMTNFDKNLPNEKVLPKHSLLYEYFTVYNELTKVKYVTEGMRKPAFLSGEQKKAIVDLLFKTNRKVTVKQLKEDYFKKIECFDSVEISGVEDRFNASLGTYHDLLKIIKDKDFLDNEENEDILEDIVLTLTLFEDREMIEERLKTYAHLFDDKVMKQLKRRRYTGWGRLSRKLINGIRDKQSGKTILDFLKSDGFANRNFMQLIHDDSLTFKEDIQKAQVSGQGDSLHEHIANLAGSPAIKKGILQTVKVVDELVKVMGRHKPENIVIEMARENQTTQKGQKNSRERMKRIEEGIKELGSQILKEHPVENTQLQNEKLYLYYLQNGRDMYVDQELDINRLSDYDVDHIVPQSFLKDDSIDNKVLTRSDKARGKSDNVPSEEVVKKMKNYWRQLLNAKLITQRKFDNLTKAERGGLSELDKAGFIKRQLVETRQITKHVAQILDSRMNTKYDENDKLIREVKVITLKSKLVSDFRKDFQFYKVREINNYHHAHDAYLNAVVGTALIKKYPKLESEFVYGDYKVYDVRKMIAKSEQEIGKATAKYFFYSNIMNFFKTEITLANGEIRKRPLIETNGETGEIVWDKGRDFATVRKVLSMPQVNIVKKTEVQTGGFSKESILPKRNSDKLIARKKDWDPKKYGGFDSPTVAYSVLVVAKVEKGKSKKLKSVKELLGITIMERSSFEKNPIDFLEAKGYKEVKKDLIIKLPKYSLFELENGRKRMLASAGELQKGNELALPSKYVNFLYLASHYEKLKGSPEDNEQKQLFVEQHKHYLDEIIEQISEFSKRVILADANLDKVLSAYNKHRDKPIREQAENIIHLFTLTNLGAPAAFKYFDTTIDRKRYTSTKEVLDATLIHQSITGLYETRIDLSQLGGDGGPAPEAAAKGGSGGTAPLEEEYRLFLEAPIQNVTLLEQWKREIPKVWAEINPPGLASTQAPIHVQLLSTALPVRVRQYPITLEAKRSLRETIRKFRAAGILRPVHSPWNTPLLPVRKSGTSEYRMVQDLREVNKRVETIHPTVPNPYTLLSLLPPDRIWYSVLDLKDAFFCIPLAPESQLIFAFEWADAEEGESGQLTWTRLPQGFKNSPTLFNEALNRDLQGFRLDHPSVSLLQYVDDLLIAADTQAACLSATRDLLMTLAELGYRVSGKKAQLCQEEVTYLGFKIHKGSRSLSNSRTQAILQIPVPKTKRQVREFLGTIGYCRLWIPGFAELAQPLYAATRPGNDPLVWGEKEEEAFQSLKLALTQPPALALPSLDKPFQLFVEETSGAAKGVLTQALGPWKRPVAYLSKRLDPVAAGWPRCLRAIAAAALLTREASKLTFGQDIEITSSHNLESLLRSPPDKWLTNARITQYQVLLLDPPRVRFKQTAALNPATLLPETDDTLPIHHCLDTLDSLTSTRPDLTDQPLAQAEATLFTDGSSYIRDGKRYAGAAVVTLDSVIWAEPLPIGTSAQKAELIALTKALEWSKDKSVNIYTDSRYAFATLHVHGMIYRERGWLTAGGKAIKNAPEILALLTAVWLPKRVAVMHCKGHQKDDAPTSTGNRRADEVAREVAIRPLSTQATISAGKRTADGSEFEKRTADGSEFESPKKKAKVE

SEQ ID NO: 1162 - protein, 2098 aa, synthetic construct
MPAAKRVKLDGGDKKYSIGLDIGTNSVGWAVITDEYKVPSKKFKVLGNTDRHSIKKNLIGALLFDSGETAEATRLKRTARRRYTRRKNRICYLQEIFSNEMAKVDDSFFHRLEESFLVEEDKKHERHPIFGNIVDEVAYHEKYPTIYHLRKKLVDSTDKADLRLIYLALAHMIKFRGHFLIEGDLNPDNSDVDKLFIQLVQTYNQLFEENPINASGVDAKAILSARLSKSRRLENLIAQLPGEKKNGLFGNLIALSLGLTPNFKSNFDLAEDAKLQLSKDTYDDDLDNLLAQIGDQYADLFLAAKNLSDAILLSDILRVNTEITKAPLSASMIKRYDEHHQDLTLLKALVRQQLPEKYKEIFFDQSKNGYAGYIDGGASQEEFYKFIKPILEKMDGTEELLVKLNREDLLRKQRTFDNGSIPHQIHLGELHAILRRQEDFYPFLKDNREKIEKILTFRIPYYVGPLARGNSRFAWMTRKSEETITPWNFEEVVDKGASAQSFIERMTNFDKNLPNEKVLPKHSLLYEYFTVYNELTKVKYVTEGMRKPAFLSGEQKKAIVDLLFKTNRKVTVKQLKEDYFKKIECFDSVEISGVEDRFNASLGTYHDLLKIIKDKDFLDNEENEDILEDIVLTLTLFEDREMIEERLKTYAHLFDDKVMKQLKRRRYTGWGRLSRKLINGIRDKQSGKTILDFLKSDGFANRNFMQLIHDDSLTFKEDIQKAQVSGQGDSLHEHIANLAGSPAIKKGILQTVKVVDELVKVMGRHKPENIVIEMARENQTTQKGQKNSRERMKRIEEGIKELGSQILKEHPVENTQLQNEKLYLYYLQNGRDMYVDQELDINRLSDYDVDHIVPQSFLKDDSIDNKVLTRSDKARGKSDNVPSEEVVKKMKNYWRQLLNAKLITQRKFDNLTKAERGGLSELDKAGFIKRQLVETRQITKHVAQILDSRMNTKYDENDKLIREVKVITLKSKLVSDFRKDFQFYKVREINNYHHAHDAYLNAVVGTALIKKYPKLESEFVYGDYKVYDVRKMIAKSEQEIGKATAKYFFYSNIMNFFKTEITLANGEIRKRPLIETNGETGEIVWDKGRDFATVRKVLSMPQVNIVKKTEVQTGGFSKESILPKRNSDKLIARKKDWDPKKYGGFDSPTVAYSVLVVAKVEKGKSKKLKSVKELLGITIMERSSFEKNPIDFLEAKGYKEVKKDLIIKLPKYSLFELENGRKRMLASAGELQKGNELALPSKYVNFLYLASHYEKLKGSPEDNEQKQLFVEQHKHYLDEIIEQISEFSKRVILADANLDKVLSAYNKHRDKPIREQAENIIHLFTLTNLGAPAAFKYFDTTIDRKRYTSTKEVLDATLIHQSITGLYETRIDLSQLGGDGGGSSEAAAKGGGGGTAPLEEEYRLFLEAPIQNVTLLEQWKREIPKVWAEINPPGLASTQAPIHVQLLSTALPVRVRQYPITLEAKRSLRETIRKFRAAGILRPVHSPWNTPLLPVRKSGTSEYRMVQDLREVNKRVETIHPTVPNPYTLLSLLPPDRIWYSVLDLKDAFFCIPLAPESQLIFAFEWADAEEGESGQLTWTRLPQGFKNSPTLFNEALNRDLQGFRLDHPSVSLLQYVDDLLIAADTQAACLSATRDLLMTLAELGYRVSGKKAQLCQEEVTYLGFKIHKGSRSLSNSRTQAILQIPVPKTKRQVREFLGTIGYCRLWIPGFAELAQPLYAATRPGNDPLVWGEKEEEAFQSLKLALTQPPALALPSLDKPFQLFVEETSGAAKGVLTQALGPWKRPVAYLSKRLDPVAAGWPRCLRAIAAAALLTREASKLTFGQDIEITSSHNLESLLRSPPDKWLTNARITQYQVLLLDPPRVRFKQTAALNPATLLPETDDTLPIHHCLDTLDSLTSTRPDLTDQPLAQAEATLFTDGSSYIRDGKRYAGAAVVTLDSVIWAEPLPIGTSAQKAELIALTKALEWSKDKSVNIYTDSRYAFATLHVHGMIYRERGWLTAGGKAIKNAPEILALLTAVWLPKRVAVMHCKGHQKDDAPTSTGNRRADEVAREVAIRPLSTQATISAGKRTADGSEFEKRTADGSEFESPKKKAKVE

SEQ ID NO: 1163 - protein, 2096 aa, synthetic construct
MPAAKRVKLDGGDKKYSIGLDIGTNSVGWAVITDEYKVPSKKFKVLGNTDRHSIKKNLIGALLFDSGETAEATRLKRTARRRYTRRKNRICYLQEIFSNEMAKVDDSFFHRLEESFLVEEDKKHERHPIFGNIVDEVAYHEKYPTIYHLRKKLVDSTDKADLRLIYLALAHMIKFRGHFLIEGDLNPDNSDVDKLFIQLVQTYNQLFEENPINASGVDAKAILSARLSKSRRLENLIAQLPGEKKNGLFGNLIALSLGLTPNFKSNFDLAEDAKLQLSKDTYDDDLDNLLAQIGDQYADLFLAAKNLSDAILLSDILRVNTEITKAPLSASMIKRYDEHHQDLTLLKALVRQQLPEKYKEIFFDQSKNGYAGYIDGGASQEEFYKFIKPILEKMDGTEELLVKLNREDLLRKQRTFDNGSIPHQIHLGELHAILRRQEDFYPFLKDNREKIEKILTFRIPYYVGPLARGNSRFAWMTRKSEETITPWNFEEVVDKGASAQSFIERMTNFDKNLPNEKVLPKHSLLYEYFTVYNELTKVKYVTEGMRKPAFLSGEQKKAIVDLLFKTNRKVTVKQLKEDYFKKIECFDSVEISGVEDRFNASLGTYHDLLKIIKDKDFLDNEENEDILEDIVLTLTLFEDREMIEERLKTYAHLFDDKVMKQLKRRRYTGWGRLSRKLINGIRDKQSGKTILDFLKSDGFANRNFMQLIHDDSLTFKEDIQKAQVSGQGDSLHEHIANLAGSPAIKKGILQTVKVVDELVKVMGRHKPENIVIEMARENQTTQKGQKNSRERMKRIEEGIKELGSQILKEHPVENTQLQNEKLYLYYLQNGRDMYVDQELDINRLSDYDVDHIVPQSFLKDDSIDNKVLTRSDKARGKSDNVPSEEVVKKMKNYWRQLLNAKLITQRKFDNLTKAERGGLSELDKAGFIKRQLVETRQITKHVAQILDSRMNTKYDENDKLIREVKVITLKSKLVSDFRKDFQFYKVREINNYHHAHDAYLNAVVGTALIKKYPKLESEFVYGDYKVYDVRKMIAKSEQEIGKATAKYFFYSNIMNFFKTEITLANGEIRKRPLIETNGETGEIVWDKGRDFATVRKVLSMPQVNIVKKTEVQTGGFSKESILPKRNSDKLIARKKDWDPKKYGGFDSPTVAYSVLVVAKVEKGKSKKLKSVKELLGITIMERSSFEKNPIDFLEAKGYKEVKKDLIIKLPKYSLFELENGRKRMLASAGELQKGNELALPSKYVNFLYLASHYEKLKGSPEDNEQKQLFVEQHKHYLDEIIEQISEFSKRVILADANLDKVLSAYNKHRDKPIREQAENIIHLFTLTNLGAPAAFKYFDTTIDRKRYTSTKEVLDATLIHQSITGLYETRIDLSQLGGDGGGGGGGSPAPGGTAPLEEEYRLFLEAPIQNVTLLEQWKREIPKVWAEINPPGLASTQAPIHVQLLSTALPVRVRQYPITLEAKRSLRETIRKFRAAGILRPVHSPWNTPLLPVRKSGTSEYRMVQDLREVNKRVETIHPTVPNPYTLLSLLPPDRIWYSVLDLKDAFFCIPLAPESQLIFAFEWADAEEGESGQLTWTRLPQGFKNSPTLFNEALNRDLQGFRLDHPSVSLLQYVDDLLIAADTQAACLSATRDLLMTLAELGYRVSGKKAQLCQEEVTYLGFKIHKGSRSLSNSRTQAILQIPVPKTKRQVREFLGTIGYCRLWIPGFAELAQPLYAATRPGNDPLVWGEKEEEAFQSLKLALTQPPALALPSLDKPFQLFVEETSGAAKGVLTQALGPWKRPVAYLSKRLDPVAAGWPRCLRAIAAAALLTREASKLTFGQDIEITSSHNLESLLRSPPDKWLTNARITQYQVLLLDPPRVRFKQTAALNPATLLPETDDTLPIHHCLDTLDSLTSTRPDLTDQPLAQAEATLFTDGSSYIRDGKRYAGAAVVTLDSVIWAEPLPIGTSAQKAELIALTKALEWSKDKSVNIYTDSRYAFATLHVHGMIYRERGWLTAGGKAIKNAPEILALLTAVWLPKRVAVMHCKGHQKDDAPTSTGNRRADEVAREVAIRPLSTQATISAGKRTADGSEFEKRTADGSEFESPKKKAKVE

SEQ ID NO: 1164 - protein, 2098 aa, synthetic construct
MPAAKRVKLDGGDKKYSIGLDIGTNSVGWAVITDEYKVPSKKFKVLGNTDRHSIKKNLIGALLFDSGETAEATRLKRTARRRYTRRKNRICYLQEIFSNEMAKVDDSFFHRLEESFLVEEDKKHERHPIFGNIVDEVAYHEKYPTIYHLRKKLVDSTDKADLRLIYLALAHMIKFRGHFLIEGDLNPDNSDVDKLFIQLVQTYNQLFEENPINASGVDAKAILSARLSKSRRLENLIAQLPGEKKNGLFGNLIALSLGLTPNFKSNFDLAEDAKLQLSKDTYDDDLDNLLAQIGDQYADLFLAAKNLSDAILLSDILRVNTEITKAPLSASMIKRYDEHHQDLTLLKALVRQQLPEKYKEIFFDQSKNGYAGYIDGGASQEEFYKFIKPILEKMDGTEELLVKLNREDLLRKQRTFDNGSIPHQIHLGELHAILRRQEDFYPFLKDNREKIEKILTFRIPYYVGPLARGNSRFAWMTRKSEETITPWNFEEVVDKGASAQSFIERMTNFDKNLPNEKVLPKHSLLYEYFTVYNELTKVKYVTEGMRKPAFLSGEQKKAIVDLLFKTNRKVTVKQLKEDYFKKIECFDSVEISGVEDRFNASLGTYHDLLKIIKDKDFLDNEENEDILEDIVLTLTLFEDREMIEERLKTYAHLFDDKVMKQLKRRRYTGWGRLSRKLINGIRDKQSGKTILDFLKSDGFANRNFMQLIHDDSLTFKEDIQKAQVSGQGDSLHEHIANLAGSPAIKKGILQTVKVVDELVKVMGRHKPENIVIEMARENQTTQKGQKNSRERMKRIEEGIKELGSQILKEHPVENTQLQNEKLYLYYLQNGRDMYVDQELDINRLSDYDVDHIVPQSFLKDDSIDNKVLTRSDKARGKSDNVPSEEVVKKMKNYWRQLLNAKLITQRKFDNLTKAERGGLSELDKAGFIKRQLVETRQITKHVAQILDSRMNTKYDENDKLIREVKVITLKSKLVSDFRKDFQFYKVREINNYHHAHDAYLNAVVGTALIKKYPKLESEFVYGDYKVYDVRKMIAKSEQEIGKATAKYFFYSNIMNFFKTEITLANGEIRKRPLIETNGETGEIVWDKGRDFATVRKVLSMPQVNIVKKTEVQTGGFSKESILPKRNSDKLIARKKDWDPKKYGGFDSPTVAYSVLVVAKVEKGKSKKLKSVKELLGITIMERSSFEKNPIDFLEAKGYKEVKKDLIIKLPKYSLFELENGRKRMLASAGELQKGNELALPSKYVNFLYLASHYEKLKGSPEDNEQKQLFVEQHKHYLDEIIEQISEFSKRVILADANLDKVLSAYNKHRDKPIREQAENIIHLFTLTNLGAPAAFKYFDTTIDRKRYTSTKEVLDATLIHQSITGLYETRIDLSQLGGDGGGSSPAPEAAAKGGTAPLEEEYRLFLEAPIQNVTLLEQWKREIPKVWAEINPPGLASTQAPIHVQLLSTALPVRVRQYPITLEAKRSLRETIRKFRAAGILRPVHSPWNTPLLPVRKSGTSEYRMVQDLREVNKRVETIHPTVPNPYTLLSLLPPDRIWYSVLDLKDAFFCIPLAPESQLIFAFEWADAEEGESGQLTWTRLPQGFKNSPTLFNEALNRDLQGFRLDHPSVSLLQYVDDLLIAADTQAACLSATRDLLMTLAELGYRVSGKKAQLCQEEVTYLGFKIHKGSRSLSNSRTQAILQIPVPKTKRQVREFLGTIGYCRLWIPGFAELAQPLYAATRPGNDPLVWGEKEEEAFQSLKLALTQPPALALPSLDKPFQLFVEETSGAAKGVLTQALGPWKRPVAYLSKRLDPVAAGWPRCLRAIAAAALLTREASKLTFGQDIEITSSHNLESLLRSPPDKWLTNARITQYQVLLLDPPRVRFKQTAALNPATLLPETDDTLPIHHCLDTLDSLTSTRPDLTDQPLAQAEATLFTDGSSYIRDGKRYAGAAVVTLDSVIWAEPLPIGTSAQKAELIALTKALEWSKDKSVNIYTDSRYAFATLHVHGMIYRERGWLTAGGKAIKNAPEILALLTAVWLPKRVAVMHCKGHQKDDAPTSTGNRRADEVAREVAIRPLSTQATISAGKRTADGSEFEKRTADGSEFESPKKKAKVE

SEQ ID NO: 1165 - protein, 2096 aa, synthetic construct
MPAAKRVKLDGGDKKYSIGLDIGTNSVGWAVITDEYKVPSKKFKVLGNTDRHSIKKNLIGALLFDSGETAEATRLKRTARRRYTRRKNRICYLQEIFSNEMAKVDDSFFHRLEESFLVEEDKKHERHPIFGNIVDEVAYHEKYPTIYHLRKKLVDSTDKADLRLIYLALAHMIKFRGHFLIEGDLNPDNSDVDKLFIQLVQTYNQLFEENPINASGVDAKAILSARLSKSRRLENLIAQLPGEKKNGLFGNLIALSLGLTPNFKSNFDLAEDAKLQLSKDTYDDDLDNLLAQIGDQYADLFLAAKNLSDAILLSDILRVNTEITKAPLSASMIKRYDEHHQDLTLLKALVRQQLPEKYKEIFFDQSKNGYAGYIDGGASQEEFYKFIKPILEKMDGTEELLVKLNREDLLRKQRTFDNGSIPHQIHLGELHAILRRQEDFYPFLKDNREKIEKILTFRIPYYVGPLARGNSRFAWMTRKSEETITPWNFEEVVDKGASAQSFIERMTNFDKNLPNEKVLPKHSLLYEYFTVYNELTKVKYVTEGMRKPAFLSGEQKKAIVDLLFKTNRKVTVKQLKEDYFKKIECFDSVEISGVEDRFNASLGTYHDLLKIIKDKDFLDNEENEDILEDIVLTLTLFEDREMIEERLKTYAHLFDDKVMKQLKRRRYTGWGRLSRKLINGIRDKQSGKTILDFLKSDGFANRNFMQLIHDDSLTFKEDIQKAQVSGQGDSLHEHIANLAGSPAIKKGILQTVKVVDELVKVMGRHKPENIVIEMARENQTTQKGQKNSRERMKRIEEGIKELGSQILKEHPVENTQLQNEKLYLYYLQNGRDMYVDQELDINRLSDYDVDHIVPQSFLKDDSIDNKVLTRSDKARGKSDNVPSEEVVKKMKNYWRQLLNAKLITQRKFDNLTKAERGGLSELDKAGFIKRQLVETRQITKHVAQILDSRMNTKYDENDKLIREVKVITLKSKLVSDFRKDFQFYKVREINNYHHAHDAYLNAVVGTALIKKYPKLESEFVYGDYKVYDVRKMIAKSEQEIGKATAKYFFYSNIMNFFKTEITLANGEIRKRPLIETNGETGEIVWDKGRDFATVRKVLSMPQVNIVKKTEVQTGGFSKESILPKRNSDKLIARKKDWDPKKYGGFDSPTVAYSVLVVAKVEKGKSKKLKSVKELLGITIMERSSFEKNPIDFLEAKGYKEVKKDLIIKLPKYSLFELENGRKRMLASAGELQKGNELALPSKYVNFLYLASHYEKLKGSPEDNEQKQLFVEQHKHYLDEIIEQISEFSKRVILADANLDKVLSAYNKHRDKPIREQAENIIHLFTLTNLGAPAAFKYFDTTIDRKRYTSTKEVLDATLIHQSITGLYETRIDLSQLGGDGGGSSGGSPAPGGTAPLEEEYRLFLEAPIQNVTLLEQWKREIPKVWAEINPPGLASTQAPIHVQLLSTALPVRVRQYPITLEAKRSLRETIRKFRAAGILRPVHSPWNTPLLPVRKSGTSEYRMVQDLREVNKRVETIHPTVPNPYTLLSLLPPDRIWYSVLDLKDAFFCIPLAPESQLIFAFEWADAEEGESGQLTWTRLPQGFKNSPTLFNEALNRDLQGFRLDHPSVSLLQYVDDLLIAADTQAACLSATRDLLMTLAELGYRVSGKKAQLCQEEVTYLGFKIHKGSRSLSNSRTQAILQIPVPKTKRQVREFLGTIGYCRLWIPGFAELAQPLYAATRPGNDPLVWGEKEEEAFQSLKLALTQPPALALPSLDKPFQLFVEETSGAAKGVLTQALGPWKRPVAYLSKRLDPVAAGWPRCLRAIAAAALLTREASKLTFGQDIEITSSHNLESLLRSPPDKWLTNARITQYQVLLLDPPRVRFKQTAALNPATLLPETDDTLPIHHCLDTLDSLTSTRPDLTDQPLAQAEATLFTDGSSYIRDGKRYAGAAVVTLDSVIWAEPLPIGTSAQKAELIALTKALEWSKDKSVNIYTDSRYAFATLHVHGMIYRERGWLTAGGKAIKNAPEILALLTAVWLPKRVAVMHCKGHQKDDAPTSTGNRRADEVAREVAIRPLSTQATISAGKRTADGSEFEKRTADGSEFESPKKKAKVE

SEQ ID NO: 1166 - protein, 2093 aa, synthetic construct
MPAAKRVKLDGGDKKYSIGLDIGTNSVGWAVITDEYKVPSKKFKVLGNTDRHSIKKNLIGALLFDSGETAEATRLKRTARRRYTRRKNRICYLQEIFSNEMAKVDDSFFHRLEESFLVEEDKKHERHPIFGNIVDEVAYHEKYPTIYHLRKKLVDSTDKADLRLIYLALAHMIKFRGHFLIEGDLNPDNSDVDKLFIQLVQTYNQLFEENPINASGVDAKAILSARLSKSRRLENLIAQLPGEKKNGLFGNLIALSLGLTPNFKSNFDLAEDAKLQLSKDTYDDDLDNLLAQIGDQYADLFLAAKNLSDAILLSDILRVNTEITKAPLSASMIKRYDEHHQDLTLLKALVRQQLPEKYKEIFFDQSKNGYAGYIDGGASQEEFYKFIKPILEKMDGTEELLVKLNREDLLRKQRTFDNGSIPHQIHLGELHAILRRQEDFYPFLKDNREKIEKILTFRIPYYVGPLARGNSRFAWMTRKSEETITPWNFEEVVDKGASAQSFIERMTNFDKNLPNEKVLPKHSLLYEYFTVYNELTKVKYVTEGMRKPAFLSGEQKKAIVDLLFKTNRKVTVKQLKEDYFKKIECFDSVEISGVEDRFNASLGTYHDLLKIIKDKDFLDNEENEDILEDIVLTLTLFEDREMIEERLKTYAHLFDDKVMKQLKRRRYTGWGRLSRKLINGIRDKQSGKTILDFLKSDGFANRNFMQLIHDDSLTFKEDIQKAQVSGQGDSLHEHIANLAGSPAIKKGILQTVKVVDELVKVMGRHKPENIVIEMARENQTTQKGQKNSRERMKRIEEGIKELGSQILKEHPVENTQLQNEKLYLYYLQNGRDMYVDQELDINRLSDYDVDHIVPQSFLKDDSIDNKVLTRSDKARGKSDNVPSEEVVKKMKNYWRQLLNAKLITQRKFDNLTKAERGGLSELDKAGFIKRQLVETRQITKHVAQILDSRMNTKYDENDKLIREVKVITLKSKLVSDFRKDFQFYKVREINNYHHAHDAYLNAVVGTALIKKYPKLESEFVYGDYKVYDVRKMIAKSEQEIGKATAKYFFYSNIMNFFKTEITLANGEIRKRPLIETNGETGEIVWDKGRDFATVRKVLSMPQVNIVKKTEVQTGGFSKESILPKRNSDKLIARKKDWDPKKYGGFDSPTVAYSVLVVAKVEKGKSKKLKSVKELLGITIMERSSFEKNPIDFLEAKGYKEVKKDLIIKLPKYSLFELENGRKRMLASAGELQKGNELALPSKYVNFLYLASHYEKLKGSPEDNEQKQLFVEQHKHYLDEIIEQISEFSKRVILADANLDKVLSAYNKHRDKPIREQAENIIHLFTLTNLGAPAAFKYFDTTIDRKRYTSTKEVLDATLIHQSITGLYETRIDLSQLGGDGGGGSGSSGGTAPLEEEYRLFLEAPIQNVTLLEQWKREIPKVWAEINPPGLASTQAPIHVQLLSTALPVRVRQYPITLEAKRSLRETIRKFRAAGILRPVHSPWNTPLLPVRKSGTSEYRMVQDLREVNKRVETIHPTVPNPYTLLSLLPPDRIWYSVLDLKDAFFCIPLAPESQLIFAFEWADAEEGESGQLTWTRLPQGFKNSPTLFNEALNRDLQGFRLDHPSVSLLQYVDDLLIAADTQAACLSATRDLLMTLAELGYRVSGKKAQLCQEEVTYLGFKIHKGSRSLSNSRTQAILQIPVPKTKRQVREFLGTIGYCRLWIPGFAELAQPLYAATRPGNDPLVWGEKEEEAFQSLKLALTQPPALALPSLDKPFQLFVEETSGAAKGVLTQALGPWKRPVAYLSKRLDPVAAGWPRCLRAIAAAALLTREASKLTFGQDIEITSSHNLESLLRSPPDKWLTNARITQYQVLLLDPPRVRFKQTAALNPATLLPETDDTLPIHHCLDTLDSLTSTRPDLTDQPLAQAEATLFTDGSSYIRDGKRYAGAAVVTLDSVIWAEPLPIGTSAQKAELIALTKALEWSKDKSVNIYTDSRYAFATLHVHGMIYRERGWLTAGGKAIKNAPEILALLTAVWLPKRVAVMHCKGHQKDDAPTSTGNRRADEVAREVAIRPLSTQATISAGKRTADGSEFEKRTADGSEFESPKKKAKVE

SEQ ID NO: 1167 - protein, 2098 aa, synthetic construct
MPAAKRVKLDGGDKKYSIGLDIGTNSVGWAVITDEYKVPSKKFKVLGNTDRHSIKKNLIGALLFDSGETAEATRLKRTARRRYTRRKNRICYLQEIFSNEMAKVDDSFFHRLEESFLVEEDKKHERHPIFGNIVDEVAYHEKYPTIYHLRKKLVDSTDKADLRLIYLALAHMIKFRGHFLIEGDLNPDNSDVDKLFIQLVQTYNQLFEENPINASGVDAKAILSARLSKSRRLENLIAQLPGEKKNGLFGNLIALSLGLTPNFKSNFDLAEDAKLQLSKDTYDDDLDNLLAQIGDQYADLFLAAKNLSDAILLSDILRVNTEITKAPLSASMIKRYDEHHQDLTLLKALVRQQLPEKYKEIFFDQSKNGYAGYIDGGASQEEFYKFIKPILEKMDGTEELLVKLNREDLLRKQRTFDNGSIPHQIHLGELHAILRRQEDFYPFLKDNREKIEKILTFRIPYYVGPLARGNSRFAWMTRKSEETITPWNFEEVVDKGASAQSFIERMTNFDKNLPNEKVLPKHSLLYEYFTVYNELTKVKYVTEGMRKPAFLSGEQKKAIVDLLFKTNRKVTVKQLKEDYFKKIECFDSVEISGVEDRFNASLGTYHDLLKIIKDKDFLDNEENEDILEDIVLTLTLFEDREMIEERLKTYAHLFDDKVMKQLKRRRYTGWGRLSRKLINGIRDKQSGKTILDFLKSDGFANRNFMQLIHDDSLTFKEDIQKAQVSGQGDSLHEHIANLAGSPAIKKGILQTVKVVDELVKVMGRHKPENIVIEMARENQTTQKGQKNSRERMKRIEEGIKELGSQILKEHPVENTQLQNEKLYLYYLQNGRDMYVDQELDINRLSDYDVDHIVPQSFLKDDSIDNKVLTRSDKARGKSDNVPSEEVVKKMKNYWRQLLNAKLITQRKFDNLTKAERGGLSELDKAGFIKRQLVETRQITKHVAQILDSRMNTKYDENDKLIREVKVITLKSKLVSDFRKDFQFYKVREINNYHHAHDAYLNAVVGTALIKKYPKLESEFVYGDYKVYDVRKMIAKSEQEIGKATAKYFFYSNIMNFFKTEITLANGEIRKRPLIETNGETGEIVWDKGRDFATVRKVLSMPQVNIVKKTEVQTGGFSKESILPKRNSDKLIARKKDWDPKKYGGFDSPTVAYSVLVVAKVEKGKSKKLKSVKELLGITIMERSSFEKNPIDFLEAKGYKEVKKDLIIKLPKYSLFELENGRKRMLASAGELQKGNELALPSKYVNFLYLASHYEKLKGSPEDNEQKQLFVEQHKHYLDEIIEQISEFSKRVILADANLDKVLSAYNKHRDKPIREQAENIIHLFTLTNLGAPAAFKYFDTTIDRKRYTSTKEVLDATLIHQSITGLYETRIDLSQLGGDGGEAAAKPAPGGGGGTAPLEEEYRLFLEAPIQNVTLLEQWKREIPKVWAEINPPGLASTQAPIHVQLLSTALPVRVRQYPITLEAKRSLRETIRKFRAAGILRPVHSPWNTPLLPVRKSGTSEYRMVQDLREVNKRVETIHPTVPNPYTLLSLLPPDRIWYSVLDLKDAFFCIPLAPESQLIFAFEWADAEEGESGQLTWTRLPQGFKNSPTLFNEALNRDLQGFRLDHPSVSLLQYVDDLLIAADTQAACLSATRDLLMTLAELGYRVSGKKAQLCQEEVTYLGFKIHKGSRSLSNSRTQAILQIPVPKTKRQVREFLGTIGYCRLWIPGFAELAQPLYAATRPGNDPLVWGEKEEEAFQSLKLALTQPPALALPSLDKPFQLFVEETSGAAKGVLTQALGPWKRPVAYLSKRLDPVAAGWPRCLRAIAAAALLTREASKLTFGQDIEITSSHNLESLLRSPPDKWLTNARITQYQVLLLDPPRVRFKQTAALNPATLLPETDDTLPIHHCLDTLDSLTSTRPDLTDQPLAQAEATLFTDGSSYIRDGKRYAGAAVVTLDSVIWAEPLPIGTSAQKAELIALTKALEWSKDKSVNIYTDSRYAFATLHVHGMIYRERGWLTAGGKAIKNAPEILALLTAVWLPKRVAVMHCKGHQKDDAPTSTGNRRADEVAREVAIRPLSTQATISAGKRTADGSEFEKRTADGSEFESPKKKAKVE

SEQ ID NO: 1168 - protein, 2093 aa, synthetic construct
MPAAKRVKLDGGDKKYSIGLDIGTNSVGWAVITDEYKVPSKKFKVLGNTDRHSIKKNLIGALLFDSGETAEATRLKRTARRRYTRRKNRICYLQEIFSNEMAKVDDSFFHRLEESFLVEEDKKHERHPIFGNIVDEVAYHEKYPTIYHLRKKLVDSTDKADLRLIYLALAHMIKFRGHFLIEGDLNPDNSDVDKLFIQLVQTYNQLFEENPINASGVDAKAILSARLSKSRRLENLIAQLPGEKKNGLFGNLIALSLGLTPNFKSNFDLAEDAKLQLSKDTYDDDLDNLLAQIGDQYADLFLAAKNLSDAILLSDILRVNTEITKAPLSASMIKRYDEHHQDLTLLKALVRQQLPEKYKEIFFDQSKNGYAGYIDGGASQEEFYKFIKPILEKMDGTEELLVKLNREDLLRKQRTFDNGSIPHQIHLGELHAILRRQEDFYPFLKDNREKIEKILTFRIPYYVGPLARGNSRFAWMTRKSEETITPWNFEEVVDKGASAQSFIERMTNFDKNLPNEKVLPKHSLLYEYFTVYNELTKVKYVTEGMRKPAFLSGEQKKAIVDLLFKTNRKVTVKQLKEDYFKKIECFDSVEISGVEDRFNASLGTYHDLLKIIKDKDFLDNEENEDILEDIVLTLTLFEDREMIEERLKTYAHLFDDKVMKQLKRRRYTGWGRLSRKLINGIRDKQSGKTILDFLKSDGFANRNFMQLIHDDSLTFKEDIQKAQVSGQGDSLHEHIANLAGSPAIKKGILQTVKVVDELVKVMGRHKPENIVIEMARENQTTQKGQKNSRERMKRIEEGIKELGSQILKEHPVENTQLQNEKLYLYYLQNGRDMYVDQELDINRLSDYDVDHIVPQSFLKDDSIDNKVLTRSDKARGKSDNVPSEEVVKKMKNYWRQLLNAKLITQRKFDNLTKAERGGLSELDKAGFIKRQLVETRQITKHVAQILDSRMNTKYDENDKLIREVKVITLKSKLVSDFRKDFQFYKVREINNYHHAHDAYLNAVVGTALIKKYPKLESEFVYGDYKVYDVRKMIAKSEQEIGKATAKYFFYSNIMNFFKTEITLANGEIRKRPLIETNGETGEIVWDKGRDFATVRKVLSMPQVNIVKKTEVQTGGFSKESILPKRNSDKLIARKKDWDPKKYGGFDSPTVAYSVLVVAKVEKGKSKKLKSVKELLGITIMERSSFEKNPIDFLEAKGYKEVKKDLIIKLPKYSLFELENGRKRMLASAGELQKGNELALPSKYVNFLYLASHYEKLKGSPEDNEQKQLFVEQHKHYLDEIIEQISEFSKRVILADANLDKVLSAYNKHRDKPIREQAENIIHLFTLTNLGAPAAFKYFDTTIDRKRYTSTKEVLDATLIHQSITGLYETRIDLSQLGGDGGGGGGGSPAPGGTLQLEEEYRLFEPESTQKQEMDIWLKNFPQAWAETGGMGTAHCQAPVLIQLKATATPISIRQYPMPHEAYQGIKPHIRRMLDQGILKPCQSPWNTPLLPVKKPGTEDYRPVQDLREVNKRVEDIHPTVPNPYNLLSTLPPSHPWYTVLDLKDAFFCLRLHSESQLLFAFEWRDPEIGLSGQLTWTRLPQGFKNSPTLFNEALHSDLADFRVRYPALVLLQYVDDLLLAAATRTECLEGTKALLETLGNKGYRASAKKAQICLQEVTYLGYSLKDGQRWLTKARKEAILSIPVPKNSRQVREFLGTAGYCRLWIPGFAELAAPLYPLTRPGTLFQWGTEQQLAFEDIKKALLSSPALGLPDITKPFELFIDENSGFAKGVLVQKLGPWKRPVAYLSKKLDTVASGWPPCLRMVAAIAILVKDAGKLTLGQPLTILTSHPVEALVRQPPNKWLSNARMTHYQAMLLDAERVHFGPTVSLNPATLLPLPSGGNHHDCLQILAETHGTRPDLTDQPLPDADLTWYTDGSSFIRNGEREAGAAVTTESEVIWAAPLPPGTSAQRAELIALTQALKMAEGKKLTVYTDSRYAFATTHVHGEIYRRRGWLTSEGKEIKNKNEILALLEALFLPKRLSIIHCPGHQKGDSPQAKGNRLADDTAKKAATETHSSLTVLPAGKRTADGSEFEKRTADGSEFESPKKKAKVE

SEQ ID NO: 1169 - protein, 2117 aa, synthetic construct
MPAAKRVKLDGGDKKYSIGLDIGTNSVGWAVITDEYKVPSKKFKVLGNTDRHSIKKNLIGALLFDSGETAEATRLKRTARRRYTRRKNRICYLQEIFSNEMAKVDDSFFHRLEESFLVEEDKKHERHPIFGNIVDEVAYHEKYPTIYHLRKKLVDSTDKADLRLIYLALAHMIKFRGHFLIEGDLNPDNSDVDKLFIQLVQTYNQLFEENPINASGVDAKAILSARLSKSRRLENLIAQLPGEKKNGLFGNLIALSLGLTPNFKSNFDLAEDAKLQLSKDTYDDDLDNLLAQIGDQYADLFLAAKNLSDAILLSDILRVNTEITKAPLSASMIKRYDEHHQDLTLLKALVRQQLPEKYKEIFFDQSKNGYAGYIDGGASQEEFYKFIKPILEKMDGTEELLVKLNREDLLRKQRTFDNGSIPHQIHLGELHAILRRQEDFYPFLKDNREKIEKILTFRIPYYVGPLARGNSRFAWMTRKSEETITPWNFEEVVDKGASAQSFIERMTNFDKNLPNEKVLPKHSLLYEYFTVYNELTKVKYVTEGMRKPAFLSGEQKKAIVDLLFKTNRKVTVKQLKEDYFKKIECFDSVEISGVEDRFNASLGTYHDLLKIIKDKDFLDNEENEDILEDIVLTLTLFEDREMIEERLKTYAHLFDDKVMKQLKRRRYTGWGRLSRKLINGIRDKQSGKTILDFLKSDGFANRNFMQLIHDDSLTFKEDIQKAQVSGQGDSLHEHIANLAGSPAIKKGILQTVKVVDELVKVMGRHKPENIVIEMARENQTTQKGQKNSRERMKRIEEGIKELGSQILKEHPVENTQLQNEKLYLYYLQNGRDMYVDQELDINRLSDYDVDHIVPQSFLKDDSIDNKVLTRSDKARGKSDNVPSEEVVKKMKNYWRQLLNAKLITQRKFDNLTKAERGGLSELDKAGFIKRQLVETRQITKHVAQILDSRMNTKYDENDKLIREVKVITLKSKLVSDFRKDFQFYKVREINNYHHAHDAYLNAVVGTALIKKYPKLESEFVYGDYKVYDVRKMIAKSEQEIGKATAKYFFYSNIMNFFKTEITLANGEIRKRPLIETNGETGEIVWDKGRDFATVRKVLSMPQVNIVKKTEVQTGGFSKESILPKRNSDKLIARKKDWDPKKYGGFDSPTVAYSVLVVAKVEKGKSKKLKSVKELLGITIMERSSFEKNPIDFLEAKGYKEVKKDLIIKLPKYSLFELENGRKRMLASAGELQKGNELALPSKYVNFLYLASHYEKLKGSPEDNEQKQLFVEQHKHYLDEIIEQISEFSKRVILADANLDKVLSAYNKHRDKPIREQAENIIHLFTLTNLGAPAAFKYFDTTIDRKRYTSTKEVLDATLIHQSITGLYETRIDLSQLGGDGGSGGSSGGSSGSETPGTSESATPESSGGSSGGSSGGTLQLEEEYRLFEPESTQKQEMDIWLKNFPQAWAETGGMGTAHCQAPVLIQLKATATPISIRQYPMPHEAYQGIKPHIRRMLDQGILKPCQSPWNTPLLPVKKPGTEDYRPVQDLREVNKRVEDIHPTVPNPYNLLSTLPPSHPWYTVLDLKDAFFCLRLHSESQLLFAFEWRDPEIGLSGQLTWTRLPQGFKNSPTLFNEALHSDLADFRVRYPALVLLQYVDDLLLAAATRTECLEGTKALLETLGNKGYRASAKKAQICLQEVTYLGYSLKDGQRWLTKARKEAILSIPVPKNSRQVREFLGTAGYCRLWIPGFAELAAPLYPLTRPGTLFQWGTEQQLAFEDIKKALLSSPALGLPDITKPFELFIDENSGFAKGVLVQKLGPWKRPVAYLSKKLDTVASGWPPCLRMVAAIAILVKDAGKLTLGQPLTILTSHPVEALVRQPPNKWLSNARMTHYQAMLLDAERVHFGPTVSLNPATLLPLPSGGNHHDCLQILAETHGTRPDLTDQPLPDADLTWYTDGSSFIRNGEREAGAAVTTESEVIWAAPLPPGTSAQRAELIALTQALKMAEGKKLTVYTDSRYAFATTHVHGEIYRRRGWLTSEGKEIKNKNEILALLEALFLPKRLSIIHCPGHQKGDSPQAKGNRLADDTAKKAATETHSSLTVLPAGKRTADGSEFEKRTADGSEFESPKKKAKVE

SEQ ID NO: 1170 - protein, 2130 aa, synthetic construct
MPAAKRVKLDGGDKKYSIGLDIGTNSVGWAVITDEYKVPSKKFKVLGNTDRHSIKKNLIGALLFDSGETAEATRLKRTARRRYTRRKNRICYLQEIFSNEMAKVDDSFFHRLEESFLVEEDKKHERHPIFGNIVDEVAYHEKYPTIYHLRKKLVDSTDKADLRLIYLALAHMIKFRGHFLIEGDLNPDNSDVDKLFIQLVQTYNQLFEENPINASGVDAKAILSARLSKSRRLENLIAQLPGEKKNGLFGNLIALSLGLTPNFKSNFDLAEDAKLQLSKDTYDDDLDNLLAQIGDQYADLFLAAKNLSDAILLSDILRVNTEITKAPLSASMIKRYDEHHQDLTLLKALVRQQLPEKYKEIFFDQSKNGYAGYIDGGASQEEFYKFIKPILEKMDGTEELLVKLNREDLLRKQRTFDNGSIPHQIHLGELHAILRRQEDFYPFLKDNREKIEKILTFRIPYYVGPLARGNSRFAWMTRKSEETITPWNFEEVVDKGASAQSFIERMTNFDKNLPNEKVLPKHSLLYEYFTVYNELTKVKYVTEGMRKPAFLSGEQKKAIVDLLFKTNRKVTVKQLKEDYFKKIECFDSVEISGVEDRFNASLGTYHDLLKIIKDKDFLDNEENEDILEDIVLTLTLFEDREMIEERLKTYAHLFDDKVMKQLKRRRYTGWGRLSRKLINGIRDKQSGKTILDFLKSDGFANRNFMQLIHDDSLTFKEDIQKAQVSGQGDSLHEHIANLAGSPAIKKGILQTVKVVDELVKVMGRHKPENIVIEMARENQTTQKGQKNSRERMKRIEEGIKELGSQILKEHPVENTQLQNEKLYLYYLQNGRDMYVDQELDINRLSDYDVDHIVPQSFLKDDSIDNKVLTRSDKARGKSDNVPSEEVVKKMKNYWRQLLNAKLITQRKFDNLTKAERGGLSELDKAGFIKRQLVETRQITKHVAQILDSRMNTKYDENDKLIREVKVITLKSKLVSDFRKDFQFYKVREINNYHHAHDAYLNAVVGTALIKKYPKLESEFVYGDYKVYDVRKMIAKSEQEIGKATAKYFFYSNIMNFFKTEITLANGEIRKRPLIETNGETGEIVWDKGRDFATVRKVLSMPQVNIVKKTEVQTGGFSKESILPKRNSDKLIARKKDWDPKKYGGFDSPTVAYSVLVVAKVEKGKSKKLKSVKELLGITIMERSSFEKNPIDFLEAKGYKEVKKDLIIKLPKYSLFELENGRKRMLASAGELQKGNELALPSKYVNFLYLASHYEKLKGSPEDNEQKQLFVEQHKHYLDEIIEQISEFSKRVILADANLDKVLSAYNKHRDKPIREQAENIIHLFTLTNLGAPAAFKYFDTTIDRKRYTSTKEVLDATLIHQSITGLYETRIDLSQLGGDGGAEAAAKEAAAKEAAAKEAAAKALEAEAAAKEAAAKEAAAKEAAAKAGGTLQLEEEYRLFEPESTQKQEMDIWLKNFPQAWAETGGMGTAHCQAPVLIQLKATATPISIRQYPMPHEAYQGIKPHIRRMLDQGILKPCQSPWNTPLLPVKKPGTEDYRPVQDLREVNKRVEDIHPTVPNPYNLLSTLPPSHPWYTVLDLKDAFFCLRLHSESQLLFAFEWRDPEIGLSGQLTWTRLPQGFKNSPTLFNEALHSDLADFRVRYPALVLLQYVDDLLLAAATRTECLEGTKALLETLGNKGYRASAKKAQICLQEVTYLGYSLKDGQRWLTKARKEAILSIPVPKNSRQVREFLGTAGYCRLWIPGFAELAAPLYPLTRPGTLFQWGTEQQLAFEDIKKALLSSPALGLPDITKPFELFIDENSGFAKGVLVQKLGPWKRPVAYLSKKLDTVASGWPPCLRMVAAIAILVKDAGKLTLGQPLTILTSHPVEALVRQPPNKWLSNARMTHYQAMLLDAERVHFGPTVSLNPATLLPLPSGGNHHDCLQILAETHGTRPDLTDQPLPDADLTWYTDGSSFIRNGEREAGAAVTTESEVIWAAPLPPGTSAQRAELIALTQALKMAEGKKLTVYTDSRYAFATTHVHGEIYRRRGWLTSEGKEIKNKNEILALLEALFLPKRLSIIHCPGHQKGDSPQAKGNRLADDTAKKAATETHSSLTVLPAGKRTADGSEFEKRTADGSEFESPKKKAKVE

SEQ ID NO: 1171 - protein, 2114 aa, synthetic construct
MPAAKRVKLDGGDKKYSIGLDIGTNSVGWAVITDEYKVPSKKFKVLGNTDRHSIKKNLIGALLFDSGETAEATRLKRTARRRYTRRKNRICYLQEIFSNEMAKVDDSFFHRLEESFLVEEDKKHERHPIFGNIVDEVAYHEKYPTIYHLRKKLVDSTDKADLRLIYLALAHMIKFRGHFLIEGDLNPDNSDVDKLFIQLVQTYNQLFEENPINASGVDAKAILSARLSKSRRLENLIAQLPGEKKNGLFGNLIALSLGLTPNFKSNFDLAEDAKLQLSKDTYDDDLDNLLAQIGDQYADLFLAAKNLSDAILLSDILRVNTEITKAPLSASMIKRYDEHHQDLTLLKALVRQQLPEKYKEIFFDQSKNGYAGYIDGGASQEEFYKFIKPILEKMDGTEELLVKLNREDLLRKQRTFDNGSIPHQIHLGELHAILRRQEDFYPFLKDNREKIEKILTFRIPYYVGPLARGNSRFAWMTRKSEETITPWNFEEVVDKGASAQSFIERMTNFDKNLPNEKVLPKHSLLYEYFTVYNELTKVKYVTEGMRKPAFLSGEQKKAIVDLLFKTNRKVTVKQLKEDYFKKIECFDSVEISGVEDRFNASLGTYHDLLKIIKDKDFLDNEENEDILEDIVLTLTLFEDREMIEERLKTYAHLFDDKVMKQLKRRRYTGWGRLSRKLINGIRDKQSGKTILDFLKSDGFANRNFMQLIHDDSLTFKEDIQKAQVSGQGDSLHEHIANLAGSPAIKKGILQTVKVVDELVKVMGRHKPENIVIEMARENQTTQKGQKNSRERMKRIEEGIKELGSQILKEHPVENTQLQNEKLYLYYLQNGRDMYVDQELDINRLSDYDVDHIVPQSFLKDDSIDNKVLTRSDKARGKSDNVPSEEVVKKMKNYWRQLLNAKLITQRKFDNLTKAERGGLSELDKAGFIKRQLVETRQITKHVAQILDSRMNTKYDENDKLIREVKVITLKSKLVSDFRKDFQFYKVREINNYHHAHDAYLNAVVGTALIKKYPKLESEFVYGDYKVYDVRKMIAKSEQEIGKATAKYFFYSNIMNFFKTEITLANGEIRKRPLIETNGETGEIVWDKGRDFATVRKVLSMPQVNIVKKTEVQTGGFSKESILPKRNSDKLIARKKDWDPKKYGGFDSPTVAYSVLVVAKVEKGKSKKLKSVKELLGITIMERSSFEKNPIDFLEAKGYKEVKKDLIIKLPKYSLFELENGRKRMLASAGELQKGNELALPSKYVNFLYLASHYEKLKGSPEDNEQKQLFVEQHKHYLDEIIEQISEFSKRVILADANLDKVLSAYNKHRDKPIREQAENIIHLFTLTNLGAPAAFKYFDTTIDRKRYTSTKEVLDATLIHQSITGLYETRIDLSQLGGDGGEAAAKEAAAKEAAAKEAAAKEAAAKEAAAKGGTLQLEEEYRLFEPESTQKQEMDIWLKNFPQAWAETGGMGTAHCQAPVLIQLKATATPISIRQYPMPHEAYQGIKPHIRRMLDQGILKPCQSPWNTPLLPVKKPGTEDYRPVQDLREVNKRVEDIHPTVPNPYNLLSTLPPSHPWYTVLDLKDAFFCLRLHSESQLLFAFEWRDPEIGLSGQLTWTRLPQGFKNSPTLFNEALHSDLADFRVRYPALVLLQYVDDLLLAAATRTECLEGTKALLETLGNKGYRASAKKAQICLQEVTYLGYSLKDGQRWLTKARKEAILSIPVPKNSRQVREFLGTAGYCRLWIPGFAELAAPLYPLTRPGTLFQWGTEQQLAFEDIKKALLSSPALGLPDITKPFELFIDENSGFAKGVLVQKLGPWKRPVAYLSKKLDTVASGWPPCLRMVAAIAILVKDAGKLTLGQPLTILTSHPVEALVRQPPNKWLSNARMTHYQAMLLDAERVHFGPTVSLNPATLLPLPSGGNHHDCLQILAETHGTRPDLTDQPLPDADLTWYTDGSSFIRNGEREAGAAVTTESEVIWAAPLPPGTSAQRAELIALTQALKMAEGKKLTVYTDSRYAFATTHVHGEIYRRRGWLTSEGKEIKNKNEILALLEALFLPKRLSIIHCPGHQKGDSPQAKGNRLADDTAKKAATETHSSLTVLPAGKRTADGSEFEKRTADGSEFESPKKKAKVE

SEQ ID NO: 1172 - protein, 2092 aa, synthetic construct
MPAAKRVKLDGGDKKYSIGLDIGTNSVGWAVITDEYKVPSKKFKVLGNTDRHSIKKNLIGALLFDSGETAEATRLKRTARRRYTRRKNRICYLQEIFSNEMAKVDDSFFHRLEESFLVEEDKKHERHPIFGNIVDEVAYHEKYPTIYHLRKKLVDSTDKADLRLIYLALAHMIKFRGHFLIEGDLNPDNSDVDKLFIQLVQTYNQLFEENPINASGVDAKAILSARLSKSRRLENLIAQLPGEKKNGLFGNLIALSLGLTPNFKSNFDLAEDAKLQLSKDTYDDDLDNLLAQIGDQYADLFLAAKNLSDAILLSDILRVNTEITKAPLSASMIKRYDEHHQDLTLLKALVRQQLPEKYKEIFFDQSKNGYAGYIDGGASQEEFYKFIKPILEKMDGTEELLVKLNREDLLRKQRTFDNGSIPHQIHLGELHAILRRQEDFYPFLKDNREKIEKILTFRIPYYVGPLARGNSRFAWMTRKSEETITPWNFEEVVDKGASAQSFIERMTNFDKNLPNEKVLPKHSLLYEYFTVYNELTKVKYVTEGMRKPAFLSGEQKKAIVDLLFKTNRKVTVKQLKEDYFKKIECFDSVEISGVEDRFNASLGTYHDLLKIIKDKDFLDNEENEDILEDIVLTLTLFEDREMIEERLKTYAHLFDDKVMKQLKRRRYTGWGRLSRKLINGIRDKQSGKTILDFLKSDGFANRNFMQLIHDDSLTFKEDIQKAQVSGQGDSLHEHIANLAGSPAIKKGILQTVKVVDELVKVMGRHKPENIVIEMARENQTTQKGQKNSRERMKRIEEGIKELGSQILKEHPVENTQLQNEKLYLYYLQNGRDMYVDQELDINRLSDYDVDHIVPQSFLKDDSIDNKVLTRSDKARGKSDNVPSEEVVKKMKNYWRQLLNAKLITQRKFDNLTKAERGGLSELDKAGFIKRQLVETRQITKHVAQILDSRMNTKYDENDKLIREVKVITLKSKLVSDFRKDFQFYKVREINNYHHAHDAYLNAVVGTALIKKYPKLESEFVYGDYKVYDVRKMIAKSEQEIGKATAKYFFYSNIMNFFKTEITLANGEIRKRPLIETNGETGEIVWDKGRDFATVRKVLSMPQVNIVKKTEVQTGGFSKESILPKRNSDKLIARKKDWDPKKYGGFDSPTVAYSVLVVAKVEKGKSKKLKSVKELLGITIMERSSFEKNPIDFLEAKGYKEVKKDLIIKLPKYSLFELENGRKRMLASAGELQKGNELALPSKYVNFLYLASHYEKLKGSPEDNEQKQLFVEQHKHYLDEIIEQISEFSKRVILADANLDKVLSAYNKHRDKPIREQAENIIHLFTLTNLGAPAAFKYFDTTIDRKRYTSTKEVLDATLIHQSITGLYETRIDLSQLGGDGGEAAAKGGSGGTLQLEEEYRLFEPESTQKQEMDIWLKNFPQAWAETGGMGTAHCQAPVLIQLKATATPISIRQYPMPHEAYQGIKPHIRRMLDQGILKPCQSPWNTPLLPVKKPGTEDYRPVQDLREVNKRVEDIHPTVPNPYNLLSTLPPSHPWYTVLDLKDAFFCLRLHSESQLLFAFEWRDPEIGLSGQLTWTRLPQGFKNSPTLFNEALHSDLADFRVRYPALVLLQYVDDLLLAAATRTECLEGTKALLETLGNKGYRASAKKAQICLQEVTYLGYSLKDGQRWLTKARKEAILSIPVPKNSRQVREFLGTAGYCRLWIPGFAELAAPLYPLTRPGTLFQWGTEQQLAFEDIKKALLSSPALGLPDITKPFELFIDENSGFAKGVLVQKLGPWKRPVAYLSKKLDTVASGWPPCLRMVAAIAILVKDAGKLTLGQPLTILTSHPVEALVRQPPNKWLSNARMTHYQAMLLDAERVHFGPTVSLNPATLLPLPSGGNHHDCLQILAETHGTRPDLTDQPLPDADLTWYTDGSSFIRNGEREAGAAVTTESEVIWAAPLPPGTSAQRAELIALTQALKMAEGKKLTVYTDSRYAFATTHVHGEIYRRRGWLTSEGKEIKNKNEILALLEALFLPKRLSIIHCPGHQKGDSPQAKGNRLADDTAKKAATETHSSLTVLPAGKRTADGSEFEKRTADGSEFESPKKKAKVE

SEQ ID NO: 1173 - protein, 2095 aa, synthetic construct
MPAAKRVKLDGGDKKYSIGLDIGTNSVGWAVITDEYKVPSKKFKVLGNTDRHSIKKNLIGALLFDSGETAEATRLKRTARRRYTRRKNRICYLQEIFSNEMAKVDDSFFHRLEESFLVEEDKKHERHPIFGNIVDEVAYHEKYPTIYHLRKKLVDSTDKADLRLIYLALAHMIKFRGHFLIEGDLNPDNSDVDKLFIQLVQTYNQLFEENPINASGVDAKAILSARLSKSRRLENLIAQLPGEKKNGLFGNLIALSLGLTPNFKSNFDLAEDAKLQLSKDTYDDDLDNLLAQIGDQYADLFLAAKNLSDAILLSDILRVNTEITKAPLSASMIKRYDEHHQDLTLLKALVRQQLPEKYKEIFFDQSKNGYAGYIDGGASQEEFYKFIKPILEKMDGTEELLVKLNREDLLRKQRTFDNGSIPHQIHLGELHAILRRQEDFYPFLKDNREKIEKILTFRIPYYVGPLARGNSRFAWMTRKSEETITPWNFEEVVDKGASAQSFIERMTNFDKNLPNEKVLPKHSLLYEYFTVYNELTKVKYVTEGMRKPAFLSGEQKKAIVDLLFKTNRKVTVKQLKEDYFKKIECFDSVEISGVEDRFNASLGTYHDLLKIIKDKDFLDNEENEDILEDIVLTLTLFEDREMIEERLKTYAHLFDDKVMKQLKRRRYTGWGRLSRKLINGIRDKQSGKTILDFLKSDGFANRNFMQLIHDDSLTFKEDIQKAQVSGQGDSLHEHIANLAGSPAIKKGILQTVKVVDELVKVMGRHKPENIVIEMARENQTTQKGQKNSRERMKRIEEGIKELGSQILKEHPVENTQLQNEKLYLYYLQNGRDMYVDQELDINRLSDYDVDHIVPQSFLKDDSIDNKVLTRSDKARGKSDNVPSEEVVKKMKNYWRQLLNAKLITQRKFDNLTKAERGGLSELDKAGFIKRQLVETRQITKHVAQILDSRMNTKYDENDKLIREVKVITLKSKLVSDFRKDFQFYKVREINNYHHAHDAYLNAVVGTALIKKYPKLESEFVYGDYKVYDVRKMIAKSEQEIGKATAKYFFYSNIMNFFKTEITLANGEIRKRPLIETNGETGEIVWDKGRDFATVRKVLSMPQVNIVKKTEVQTGGFSKESILPKRNSDKLIARKKDWDPKKYGGFDSPTVAYSVLVVAKVEKGKSKKLKSVKELLGITIMERSSFEKNPIDFLEAKGYKEVKKDLIIKLPKYSLFELENGRKRMLASAGELQKGNELALPSKYVNFLYLASHYEKLKGSPEDNEQKQLFVEQHKHYLDEIIEQISEFSKRVILADANLDKVLSAYNKHRDKPIREQAENIIHLFTLTNLGAPAAFKYFDTTIDRKRYTSTKEVLDATLIHQSITGLYETRIDLSQLGGDGGPAPAPAPAPAPGGTLQLEEEYRLFEPESTQKQEMDIWLKNFPQAWAETGGMGTAHCQAPVLIQLKATATPISIRQYPMPHEAYQGIKPHIRRMLDQGILKPCQSPWNTPLLPVKKPGTEDYRPVQDLREVNKRVEDIHPTVPNPYNLLSTLPPSHPWYTVLDLKDAFFCLRLHSESQLLFAFEWRDPEIGLSGQLTWTRLPQGFKNSPTLFNEALHSDLADFRVRYPALVLLQYVDDLLLAAATRTECLEGTKALLETLGNKGYRASAKKAQICLQEVTYLGYSLKDGQRWLTKARKEAILSIPVPKNSRQVREFLGTAGYCRLWIPGFAELAAPLYPLTRPGTLFQWGTEQQLAFEDIKKALLSSPALGLPDITKPFELFIDENSGFAKGVLVQKLGPWKRPVAYLSKKLDTVASGWPPCLRMVAAIAILVKDAGKLTLGQPLTILTSHPVEALVRQPPNKWLSNARMTHYQAMLLDAERVHFGPTVSLNPATLLPLPSGGNHHDCLQILAETHGTRPDLTDQPLPDADLTWYTDGSSFIRNGEREAGAAVTTESEVIWAAPLPPGTSAQRAELIALTQALKMAEGKKLTVYTDSRYAFATTHVHGEIYRRRGWLTSEGKEIKNKNEILALLEALFLPKRLSIIHCPGHQKGDSPQAKGNRLADDTAKKAATETHSSLTVLPAGKRTADGSEFEKRTADGSEFESPKKKAKVE

SEQ ID NO: 1174 - protein, 2099 aa, synthetic construct
MPAAKRVKLDGGDKKYSIGLDIGTNSVGWAVITDEYKVPSKKFKVLGNTDRHSIKKNLIGALLFDSGETAEATRLKRTARRRYTRRKNRICYLQEIFSNEMAKVDDSFFHRLEESFLVEEDKKHERHPIFGNIVDEVAYHEKYPTIYHLRKKLVDSTDKADLRLIYLALAHMIKFRGHFLIEGDLNPDNSDVDKLFIQLVQTYNQLFEENPINASGVDAKAILSARLSKSRRLENLIAQLPGEKKNGLFGNLIALSLGLTPNFKSNFDLAEDAKLQLSKDTYDDDLDNLLAQIGDQYADLFLAAKNLSDAILLSDILRVNTEITKAPLSASMIKRYDEHHQDLTLLKALVRQQLPEKYKEIFFDQSKNGYAGYIDGGASQEEFYKFIKPILEKMDGTEELLVKLNREDLLRKQRTFDNGSIPHQIHLGELHAILRRQEDFYPFLKDNREKIEKILTFRIPYYVGPLARGNSRFAWMTRKSEETITPWNFEEVVDKGASAQSFIERMTNFDKNLPNEKVLPKHSLLYEYFTVYNELTKVKYVTEGMRKPAFLSGEQKKAIVDLLFKTNRKVTVKQLKEDYFKKIECFDSVEISGVEDRFNASLGTYHDLLKIIKDKDFLDNEENEDILEDIVLTLTLFEDREMIEERLKTYAHLFDDKVMKQLKRRRYTGWGRLSRKLINGIRDKQSGKTILDFLKSDGFANRNFMQLIHDDSLTFKEDIQKAQVSGQGDSLHEHIANLAGSPAIKKGILQTVKVVDELVKVMGRHKPENIVIEMARENQTTQKGQKNSRERMKRIEEGIKELGSQILKEHPVENTQLQNEKLYLYYLQNGRDMYVDQELDINRLSDYDVDHIVPQSFLKDDSIDNKVLTRSDKARGKSDNVPSEEVVKKMKNYWRQLLNAKLITQRKFDNLTKAERGGLSELDKAGFIKRQLVETRQITKHVAQILDSRMNTKYDENDKLIREVKVITLKSKLVSDFRKDFQFYKVREINNYHHAHDAYLNAVVGTALIKKYPKLESEFVYGDYKVYDVRKMIAKSEQEIGKATAKYFFYSNIMNFFKTEITLANGEIRKRPLIETNGETGEIVWDKGRDFATVRKVLSMPQVNIVKKTEVQTGGFSKESILPKRNSDKLIARKKDWDPKKYGGFDSPTVAYSVLVVAKVEKGKSKKLKSVKELLGITIMERSSFEKNPIDFLEAKGYKEVKKDLIIKLPKYSLFELENGRKRMLASAGELQKGNELALPSKYVNFLYLASHYEKLKGSPEDNEQKQLFVEQHKHYLDEIIEQISEFSKRVILADANLDKVLSAYNKHRDKPIREQAENIIHLFTLTNLGAPAAFKYFDTTIDRKRYTSTKEVLDATLIHQSITGLYETRIDLSQLGGDGGGGGGSGGGGSGGGGSGGTLQLEEEYRLFEPESTQKQEMDIWLKNFPQAWAETGGMGTAHCQAPVLIQLKATATPISIRQYPMPHEAYQGIKPHIRRMLDQGILKPCQSPWNTPLLPVKKPGTEDYRPVQDLREVNKRVEDIHPTVPNPYNLLSTLPPSHPWYTVLDLKDAFFCLRLHSESQLLFAFEWRDPEIGLSGQLTWTRLPQGFKNSPTLFNEALHSDLADFRVRYPALVLLQYVDDLLLAAATRTECLEGTKALLETLGNKGYRASAKKAQICLQEVTYLGYSLKDGQRWLTKARKEAILSIPVPKNSRQVREFLGTAGYCRLWIPGFAELAAPLYPLTRPGTLFQWGTEQQLAFEDIKKALLSSPALGLPDITKPFELFIDENSGFAKGVLVQKLGPWKRPVAYLSKKLDTVASGWPPCLRMVAAIAILVKDAGKLTLGQPLTILTSHPVEALVRQPPNKWLSNARMTHYQAMLLDAERVHFGPTVSLNPATLLPLPSGGNHHDCLQILAETHGTRPDLTDQPLPDADLTWYTDGSSFIRNGEREAGAAVTTESEVIWAAPLPPGTSAQRAELIALTQALKMAEGKKLTVYTDSRYAFATTHVHGEIYRRRGWLTSEGKEIKNKNEILALLEALFLPKRLSIIHCPGHQKGDSPQAKGNRLADDTAKKAATETHSSLTVLPAGKRTADGSEFEKRTADGSEFESPKKKAKVE

SEQ ID NO: 1175 - protein, 2109 aa, synthetic construct
MPAAKRVKLDGGDKKYSIGLDIGTNSVGWAVITDEYKVPSKKFKVLGNTDRHSIKKNLIGALLFDSGETAEATRLKRTARRRYTRRKNRICYLQEIFSNEMAKVDDSFFHRLEESFLVEEDKKHERHPIFGNIVDEVAYHEKYPTIYHLRKKLVDSTDKADLRLIYLALAHMIKFRGHFLIEGDLNPDNSDVDKLFIQLVQTYNQLFEENPINASGVDAKAILSARLSKSRRLENLIAQLPGEKKNGLFGNLIALSLGLTPNFKSNFDLAEDAKLQLSKDTYDDDLDNLLAQIGDQYADLFLAAKNLSDAILLSDILRVNTEITKAPLSASMIKRYDEHHQDLTLLKALVRQQLPEKYKEIFFDQSKNGYAGYIDGGASQEEFYKFIKPILEKMDGTEELLVKLNREDLLRKQRTFDNGSIPHQIHLGELHAILRRQEDFYPFLKDNREKIEKILTFRIPYYVGPLARGNSRFAWMTRKSEETITPWNFEEVVDKGASAQSFIERMTNFDKNLPNEKVLPKHSLLYEYFTVYNELTKVKYVTEGMRKPAFLSGEQKKAIVDLLFKTNRKVTVKQLKEDYFKKIECFDSVEISGVEDRFNASLGTYHDLLKIIKDKDFLDNEENEDILEDIVLTLTLFEDREMIEERLKTYAHLFDDKVMKQLKRRRYTGWGRLSRKLINGIRDKQSGKTILDFLKSDGFANRNFMQLIHDDSLTFKEDIQKAQVSGQGDSLHEHIANLAGSPAIKKGILQTVKVVDELVKVMGRHKPENIVIEMARENQTTQKGQKNSRERMKRIEEGIKELGSQILKEHPVENTQLQNEKLYLYYLQNGRDMYVDQELDINRLSDYDVDHIVPQSFLKDDSIDNKVLTRSDKARGKSDNVPSEEVVKKMKNYWRQLLNAKLITQRKFDNLTKAERGGLSELDKAGFIKRQLVETRQITKHVAQILDSRMNTKYDENDKLIREVKVITLKSKLVSDFRKDFQFYKVREINNYHHAHDAYLNAVVGTALIKKYPKLESEFVYGDYKVYDVRKMIAKSEQEIGKATAKYFFYSNIMNFFKTEITLANGEIRKRPLIETNGETGEIVWDKGRDFATVRKVLSMPQVNIVKKTEVQTGGFSKESILPKRNSDKLIARKKDWDPKKYGGFDSPTVAYSVLVVAKVEKGKSKKLKSVKELLGITIMERSSFEKNPIDFLEAKGYKEVKKDLIIKLPKYSLFELENGRKRMLASAGELQKGNELALPSKYVNFLYLASHYEKLKGSPEDNEQKQLFVEQHKHYLDEIIEQISEFSKRVILADANLDKVLSAYNKHRDKPIREQAENIIHLFTLTNLGAPAAFKYFDTTIDRKRYTSTKEVLDATLIHQSITGLYETRIDLSQLGGDGGEAAAKEAAAKEAAAKEAAAKEAAAKGGTLQLEEEYRLFEPESTQKQEMDIWLKNFPQAWAETGGMGTAHCQAPVLIQLKATATPISIRQYPMPHEAYQGIKPHIRRMLDQGILKPCQSPWNTPLLPVKKPGTEDYRPVQDLREVNKRVEDIHPTVPNPYNLLSTLPPSHPWYTVLDLKDAFFCLRLHSESQLLFAFEWRDPEIGLSGQLTWTRLPQGFKNSPTLFNEALHSDLADFRVRYPALVLLQYVDDLLLAAATRTECLEGTKALLETLGNKGYRASAKKAQICLQEVTYLGYSLKDGQRWLTKARKEAILSIPVPKNSRQVREFLGTAGYCRLWIPGFAELAAPLYPLTRPGTLFQWGTEQQLAFEDIKKALLSSPALGLPDITKPFELFIDENSGFAKGVLVQKLGPWKRPVAYLSKKLDTVASGWPPCLRMVAAIAILVKDAGKLTLGQPLTILTSHPVEALVRQPPNKWLSNARMTHYQAMLLDAERVHFGPTVSLNPATLLPLPSGGNHHDCLQILAETHGTRPDLTDQPLPDADLTWYTDGSSFIRNGEREAGAAVTTESEVIWAAPLPPGTSAQRAELIALTQALKMAEGKKLTVYTDSRYAFATTHVHGEIYRRRGWLTSEGKEIKNKNEILALLEALFLPKRLSIIHCPGHQKGDSPQAKGNRLADDTAKKAATETHSSLTVLPAGKRTADGSEFEKRTADGSEFESPKKKAKVE

SEQ ID NO: 1176 - protein, 2095 aa, synthetic construct
MPAAKRVKLDGGDKKYSIGLDIGTNSVGWAVITDEYKVPSKKFKVLGNTDRHSIKKNLIGALLFDSGETAEATRLKRTARRRYTRRKNRICYLQEIFSNEMAKVDDSFFHRLEESFLVEEDKKHERHPIFGNIVDEVAYHEKYPTIYHLRKKLVDSTDKADLRLIYLALAHMIKFRGHFLIEGDLNPDNSDVDKLFIQLVQTYNQLFEENPINASGVDAKAILSARLSKSRRLENLIAQLPGEKKNGLFGNLIALSLGLTPNFKSNFDLAEDAKLQLSKDTYDDDLDNLLAQIGDQYADLFLAAKNLSDAILLSDILRVNTEITKAPLSASMIKRYDEHHQDLTLLKALVRQQLPEKYKEIFFDQSKNGYAGYIDGGASQEEFYKFIKPILEKMDGTEELLVKLNREDLLRKQRTFDNGSIPHQIHLGELHAILRRQEDFYPFLKDNREKIEKILTFRIPYYVGPLARGNSRFAWMTRKSEETITPWNFEEVVDKGASAQSFIERMTNFDKNLPNEKVLPKHSLLYEYFTVYNELTKVKYVTEGMRKPAFLSGEQKKAIVDLLFKTNRKVTVKQLKEDYFKKIECFDSVEISGVEDRFNASLGTYHDLLKIIKDKDFLDNEENEDILEDIVLTLTLFEDREMIEERLKTYAHLFDDKVMKQLKRRRYTGWGRLSRKLINGIRDKQSGKTILDFLKSDGFANRNFMQLIHDDSLTFKEDIQKAQVSGQGDSLHEHIANLAGSPAIKKGILQTVKVVDELVKVMGRHKPENIVIEMARENQTTQKGQKNSRERMKRIEEGIKELGSQILKEHPVENTQLQNEKLYLYYLQNGRDMYVDQELDINRLSDYDVDHIVPQSFLKDDSIDNKVLTRSDKARGKSDNVPSEEVVKKMKNYWRQLLNAKLITQRKFDNLTKAERGGLSELDKAGFIKRQLVETRQITKHVAQILDSRMNTKYDENDKLIREVKVITLKSKLVSDFRKDFQFYKVREINNYHHAHDAYLNAVVGTALIKKYPKLESEFVYGDYKVYDVRKMIAKSEQEIGKATAKYFFYSNIMNFFKTEITLANGEIRKRPLIETNGETGEIVWDKGRDFATVRKVLSMPQVNIVKKTEVQTGGFSKESILPKRNSDKLIARKKDWDPKKYGGFDSPTVAYSVLVVAKVEKGKSKKLKSVKELLGITIMERSSFEKNPIDFLEAKGYKEVKKDLIIKLPKYSLFELENGRKRMLASAGELQKGNELALPSKYVNFLYLASHYEKLKGSPEDNEQKQLFVEQHKHYLDEIIEQISEFSKRVILADANLDKVLSAYNKHRDKPIREQAENIIHLFTLTNLGAPAAFKYFDTTIDRKRYTSTKEVLDATLIHQSITGLYETRIDLSQLGGDGGGGSPAPEAAAKGGTLQLEEEYRLFEPESTQKQEMDIWLKNFPQAWAETGGMGTAHCQAPVLIQLKATATPISIRQYPMPHEAYQGIKPHIRRMLDQGILKPCQSPWNTPLLPVKKPGTEDYRPVQDLREVNKRVEDIHPTVPNPYNLLSTLPPSHPWYTVLDLKDAFFCLRLHSESQLLFAFEWRDPEIGLSGQLTWTRLPQGFKNSPTLFNEALHSDLADFRVRYPALVLLQYVDDLLLAAATRTECLEGTKALLETLGNKGYRASAKKAQICLQEVTYLGYSLKDGQRWLTKARKEAILSIPVPKNSRQVREFLGTAGYCRLWIPGFAELAAPLYPLTRPGTLFQWGTEQQLAFEDIKKALLSSPALGLPDITKPFELFIDENSGFAKGVLVQKLGPWKRPVAYLSKKLDTVASGWPPCLRMVAAIAILVKDAGKLTLGQPLTILTSHPVEALVRQPPNKWLSNARMTHYQAMLLDAERVHFGPTVSLNPATLLPLPSGGNHHDCLQILAETHGTRPDLTDQPLPDADLTWYTDGSSFIRNGEREAGAAVTTESEVIWAAPLPPGTSAQRAELIALTQALKMAEGKKLTVYTDSRYAFATTHVHGEIYRRRGWLTSEGKEIKNKNEILALLEALFLPKRLSIIHCPGHQKGDSPQAKGNRLADDTAKKAATETHSSLTVLPAGKRTADGSEFEKRTADGSEFESPKKKAKVE

SEQ ID NO: 1177 - protein, 2102 aa, synthetic construct
MPAAKRVKLDGGDKKYSIGLDIGTNSVGWAVITDEYKVPSKKFKVLGNTDRHSIKKNLIGALLFDSGETAEATRLKRTARRRYTRRKNRICYLQEIFSNEMAKVDDSFFHRLEESFLVEEDKKHERHPIFGNIVDEVAYHEKYPTIYHLRKKLVDSTDKADLRLIYLALAHMIKFRGHFLIEGDLNPDNSDVDKLFIQLVQTYNQLFEENPINASGVDAKAILSARLSKSRRLENLIAQLPGEKKNGLFGNLIALSLGLTPNFKSNFDLAEDAKLQLSKDTYDDDLDNLLAQIGDQYADLFLAAKNLSDAILLSDILRVNTEITKAPLSASMIKRYDEHHQDLTLLKALVRQQLPEKYKEIFFDQSKNGYAGYIDGGASQEEFYKFIKPILEKMDGTEELLVKLNREDLLRKQRTFDNGSIPHQIHLGELHAILRRQEDFYPFLKDNREKIEKILTFRIPYYVGPLARGNSRFAWMTRKSEETITPWNFEEVVDKGASAQSFIERMTNFDKNLPNEKVLPKHSLLYEYFTVYNELTKVKYVTEGMRKPAFLSGEQKKAIVDLLFKTNRKVTVKQLKEDYFKKIECFDSVEISGVEDRFNASLGTYHDLLKIIKDKDFLDNEENEDILEDIVLTLTLFEDREMIEERLKTYAHLFDDKVMKQLKRRRYTGWGRLSRKLINGIRDKQSGKTILDFLKSDGFANRNFMQLIHDDSLTFKEDIQKAQVSGQGDSLHEHIANLAGSPAIKKGILQTVKVVDELVKVMGRHKPENIVIEMARENQTTQKGQKNSRERMKRIEEGIKELGSQILKEHPVENTQLQNEKLYLYYLQNGRDMYVDQELDINRLSDYDVDHIVPQSFLKDDSIDNKVLTRSDKARGKSDNVPSEEVVKKMKNYWRQLLNAKLITQRKFDNLTKAERGGLSELDKAGFIKRQLVETRQITKHVAQILDSRMNTKYDENDKLIREVKVITLKSKLVSDFRKDFQFYKVREINNYHHAHDAYLNAVVGTALIKKYPKLESEFVYGDYKVYDVRKMIAKSEQEIGKATAKYFFYSNIMNFFKTEITLANGEIRKRPLIETNGETGEIVWDKGRDFATVRKVLSMPQVNIVKKTEVQTGGFSKESILPKRNSDKLIARKKDWDPKKYGGFDSPTVAYSVLVVAKVEKGKSKKLKSVKELLGITIMERSSFEKNPIDFLEAKGYKEVKKDLIIKLPKYSLFELENGRKRMLASAGELQKGNELALPSKYVNFLYLASHYEKLKGSPEDNEQKQLFVEQHKHYLDEIIEQISEFSKRVILADANLDKVLSAYNKHRDKPIREQAENIIHLFTLTNLGAPAAFKYFDTTIDRKRYTSTKEVLDATLIHQSITGLYETRIDLSQLGGDGGGGSGGSGGSGGSGGSGGSGGTLQLEEEYRLFEPESTQKQEMDIWLKNFPQAWAETGGMGTAHCQAPVLIQLKATATPISIRQYPMPHEAYQGIKPHIRRMLDQGILKPCQSPWNTPLLPVKKPGTEDYRPVQDLREVNKRVEDIHPTVPNPYNLLSTLPPSHPWYTVLDLKDAFFCLRLHSESQLLFAFEWRDPEIGLSGQLTWTRLPQGFKNSPTLFNEALHSDLADFRVRYPALVLLQYVDDLLLAAATRTECLEGTKALLETLGNKGYRASAKKAQICLQEVTYLGYSLKDGQRWLTKARKEAILSIPVPKNSRQVREFLGTAGYCRLWIPGFAELAAPLYPLTRPGTLFQWGTEQQLAFEDIKKALLSSPALGLPDITKPFELFIDENSGFAKGVLVQKLGPWKRPVAYLSKKLDTVASGWPPCLRMVAAIAILVKDAGKLTLGQPLTILTSHPVEALVRQPPNKWLSNARMTHYQAMLLDAERVHFGPTVSLNPATLLPLPSGGNHHDCLQILAETHGTRPDLTDQPLPDADLTWYTDGSSFIRNGEREAGAAVTTESEVIWAAPLPPGTSAQRAELIALTQALKMAEGKKLTVYTDSRYAFATTHVHGEIYRRRGWLTSEGKEIKNKNEILALLEALFLPKRLSIIHCPGHQKGDSPQAKGNRLADDTAKKAATETHSSLTVLPAGKRTADGSEFEKRTADGSEFESPKKKAKVE

SEQ ID NO: 1178 - protein, 2095 aa, synthetic construct
MPAAKRVKLDGGDKKYSIGLDIGTNSVGWAVITDEYKVPSKKFKVLGNTDRHSIKKNLIGALLFDSGETAEATRLKRTARRRYTRRKNRICYLQEIFSNEMAKVDDSFFHRLEESFLVEEDKKHERHPIFGNIVDEVAYHEKYPTIYHLRKKLVDSTDKADLRLIYLALAHMIKFRGHFLIEGDLNPDNSDVDKLFIQLVQTYNQLFEENPINASGVDAKAILSARLSKSRRLENLIAQLPGEKKNGLFGNLIALSLGLTPNFKSNFDLAEDAKLQLSKDTYDDDLDNLLAQIGDQYADLFLAAKNLSDAILLSDILRVNTEITKAPLSASMIKRYDEHHQDLTLLKALVRQQLPEKYKEIFFDQSKNGYAGYIDGGASQEEFYKFIKPILEKMDGTEELLVKLNREDLLRKQRTFDNGSIPHQIHLGELHAILRRQEDFYPFLKDNREKIEKILTFRIPYYVGPLARGNSRFAWMTRKSEETITPWNFEEVVDKGASAQSFIERMTNFDKNLPNEKVLPKHSLLYEYFTVYNELTKVKYVTEGMRKPAFLSGEQKKAIVDLLFKTNRKVTVKQLKEDYFKKIECFDSVEISGVEDRFNASLGTYHDLLKIIKDKDFLDNEENEDILEDIVLTLTLFEDREMIEERLKTYAHLFDDKVMKQLKRRRYTGWGRLSRKLINGIRDKQSGKTILDFLKSDGFANRNFMQLIHDDSLTFKEDIQKAQVSGQGDSLHEHIANLAGSPAIKKGILQTVKVVDELVKVMGRHKPENIVIEMARENQTTQKGQKNSRERMKRIEEGIKELGSQILKEHPVENTQLQNEKLYLYYLQNGRDMYVDQELDINRLSDYDVDHIVPQSFLKDDSIDNKVLTRSDKARGKSDNVPSEEVVKKMKNYWRQLLNAKLITQRKFDNLTKAERGGLSELDKAGFIKRQLVETRQITKHVAQILDSRMNTKYDENDKLIREVKVITLKSKLVSDFRKDFQFYKVREINNYHHAHDAYLNAVVGTALIKKYPKLESEFVYGDYKVYDVRKMIAKSEQEIGKATAKYFFYSNIMNFFKTEITLANGEIRKRPLIETNGETGEIVWDKGRDFATVRKVLSMPQVNIVKKTEVQTGGFSKESILPKRNSDKLIARKKDWDPKKYGGFDSPTVAYSVLVVAKVEKGKSKKLKSVKELLGITIMERSSFEKNPIDFLEAKGYKEVKKDLIIKLPKYSLFELENGRKRMLASAGELQKGNELALPSKYVNFLYLASHYEKLKGSPEDNEQKQLFVEQHKHYLDEIIEQISEFSKRVILADANLDKVLSAYNKHRDKPIREQAENIIHLFTLTNLGAPAAFKYFDTTIDRKRYTSTKEVLDATLIHQSITGLYETRIDLSQLGGDGGEAAAKGGSGSSGGTLQLEEEYRLFEPESTQKQEMDIWLKNFPQAWAETGGMGTAHCQAPVLIQLKATATPISIRQYPMPHEAYQGIKPHIRRMLDQGILKPCQSPWNTPLLPVKKPGTEDYRPVQDLREVNKRVEDIHPTVPNPYNLLSTLPPSHPWYTVLDLKDAFFCLRLHSESQLLFAFEWRDPEIGLSGQLTWTRLPQGFKNSPTLFNEALHSDLADFRVRYPALVLLQYVDDLLLAAATRTECLEGTKALLETLGNKGYRASAKKAQICLQEVTYLGYSLKDGQRWLTKARKEAILSIPVPKNSRQVREFLGTAGYCRLWIPGFAELAAPLYPLTRPGTLFQWGTEQQLAFEDIKKALLSSPALGLPDITKPFELFIDENSGFAKGVLVQKLGPWKRPVAYLSKKLDTVASGWPPCLRMVAAIAILVKDAGKLTLGQPLTILTSHPVEALVRQPPNKWLSNARMTHYQAMLLDAERVHFGPTVSLNPATLLPLPSGGNHHDCLQILAETHGTRPDLTDQPLPDADLTWYTDGSSFIRNGEREAGAAVTTESEVIWAAPLPPGTSAQRAELIALTQALKMAEGKKLTVYTDSRYAFATTHVHGEIYRRRGWLTSEGKEIKNKNEILALLEALFLPKRLSIIHCPGHQKGDSPQAKGNRLADDTAKKAATETHSSLTVLPAGKRTADGSEFEKRTADGSEFESPKKKAKVE

SEQ ID NO: 1179 - protein, 2095 aa, synthetic construct
MPAAKRVKLDGGDKKYSIGLDIGTNSVGWAVITDEYKVPSKKFKVLGNTDRHSIKKNLIGALLFDSGETAEATRLKRTARRRYTRRKNRICYLQEIFSNEMAKVDDSFFHRLEESFLVEEDKKHERHPIFGNIVDEVAYHEKYPTIYHLRKKLVDSTDKADLRLIYLALAHMIKFRGHFLIEGDLNPDNSDVDKLFIQLVQTYNQLFEENPINASGVDAKAILSARLSKSRRLENLIAQLPGEKKNGLFGNLIALSLGLTPNFKSNFDLAEDAKLQLSKDTYDDDLDNLLAQIGDQYADLFLAAKNLSDAILLSDILRVNTEITKAPLSASMIKRYDEHHQDLTLLKALVRQQLPEKYKEIFFDQSKNGYAGYIDGGASQEEFYKFIKPILEKMDGTEELLVKLNREDLLRKQRTFDNGSIPHQIHLGELHAILRRQEDFYPFLKDNREKIEKILTFRIPYYVGPLARGNSRFAWMTRKSEETITPWNFEEVVDKGASAQSFIERMTNFDKNLPNEKVLPKHSLLYEYFTVYNELTKVKYVTEGMRKPAFLSGEQKKAIVDLLFKTNRKVTVKQLKEDYFKKIECFDSVEISGVEDRFNASLGTYHDLLKIIKDKDFLDNEENEDILEDIVLTLTLFEDREMIEERLKTYAHLFDDKVMKQLKRRRYTGWGRLSRKLINGIRDKQSGKTILDFLKSDGFANRNFMQLIHDDSLTFKEDIQKAQVSGQGDSLHEHIANLAGSPAIKKGILQTVKVVDELVKVMGRHKPENIVIEMARENQTTQKGQKNSRERMKRIEEGIKELGSQILKEHPVENTQLQNEKLYLYYLQNGRDMYVDQELDINRLSDYDVDHIVPQSFLKDDSIDNKVLTRSDKARGKSDNVPSEEVVKKMKNYWRQLLNAKLITQRKFDNLTKAERGGLSELDKAGFIKRQLVETRQITKHVAQILDSRMNTKYDENDKLIREVKVITLKSKLVSDFRKDFQFYKVREINNYHHAHDAYLNAVVGTALIKKYPKLESEFVYGDYKVYDVRKMIAKSEQEIGKATAKYFFYSNIMNFFKTEITLANGEIRKRPLIETNGETGEIVWDKGRDFATVRKVLSMPQVNIVKKTEVQTGGFSKESILPKRNSDKLIARKKDWDPKKYGGFDSPTVAYSVLVVAKVEKGKSKKLKSVKELLGITIMERSSFEKNPIDFLEAKGYKEVKKDLIIKLPKYSLFELENGRKRMLASAGELQKGNELALPSKYVNFLYLASHYEKLKGSPEDNEQKQLFVEQHKHYLDEIIEQISEFSKRVILADANLDKVLSAYNKHRDKPIREQAENIIHLFTLTNLGAPAAFKYFDTTIDRKRYTSTKEVLDATLIHQSITGLYETRIDLSQLGGDGGGGGEAAAKPAPGGTLQLEEEYRLFEPESTQKQEMDIWLKNFPQAWAETGGMGTAHCQAPVLIQLKATATPISIRQYPMPHEAYQGIKPHIRRMLDQGILKPCQSPWNTPLLPVKKPGTEDYRPVQDLREVNKRVEDIHPTVPNPYNLLSTLPPSHPWYTVLDLKDAFFCLRLHSESQLLFAFEWRDPEIGLSGQLTWTRLPQGFKNSPTLFNEALHSDLADFRVRYPALVLLQYVDDLLLAAATRTECLEGTKALLETLGNKGYRASAKKAQICLQEVTYLGYSLKDGQRWLTKARKEAILSIPVPKNSRQVREFLGTAGYCRLWIPGFAELAAPLYPLTRPGTLFQWGTEQQLAFEDIKKALLSSPALGLPDITKPFELFIDENSGFAKGVLVQKLGPWKRPVAYLSKKLDTVASGWPPCLRMVAAIAILVKDAGKLTLGQPLTILTSHPVEALVRQPPNKWLSNARMTHYQAMLLDAERVHFGPTVSLNPATLLPLPSGGNHHDCLQILAETHGTRPDLTDQPLPDADLTWYTDGSSFIRNGEREAGAAVTTESEVIWAAPLPPGTSAQRAELIALTQALKMAEGKKLTVYTDSRYAFATTHVHGEIYRRRGWLTSEGKEIKNKNEILALLEALFLPKRLSIIHCPGHQKGDSPQAKGNRLADDTAKKAATETHSSLTVLPAGKRTADGSEFEKRTADGSEFESPKKKAKVE

SEQ ID NO: 1180 - protein, 2094 aa, synthetic construct
MPAAKRVKLDGGDKKYSIGLDIGTNSVGWAVITDEYKVPSKKFKVLGNTDRHSIKKNLIGALLFDSGETAEATRLKRTARRRYTRRKNRICYLQEIFSNEMAKVDDSFFHRLEESFLVEEDKKHERHPIFGNIVDEVAYHEKYPTIYHLRKKLVDSTDKADLRLIYLALAHMIKFRGHFLIEGDLNPDNSDVDKLFIQLVQTYNQLFEENPINASGVDAKAILSARLSKSRRLENLIAQLPGEKKNGLFGNLIALSLGLTPNFKSNFDLAEDAKLQLSKDTYDDDLDNLLAQIGDQYADLFLAAKNLSDAILLSDILRVNTEITKAPLSASMIKRYDEHHQDLTLLKALVRQQLPEKYKEIFFDQSKNGYAGYIDGGASQEEFYKFIKPILEKMDGTEELLVKLNREDLLRKQRTFDNGSIPHQIHLGELHAILRRQEDFYPFLKDNREKIEKILTFRIPYYVGPLARGNSRFAWMTRKSEETITPWNFEEVVDKGASAQSFIERMTNFDKNLPNEKVLPKHSLLYEYFTVYNELTKVKYVTEGMRKPAFLSGEQKKAIVDLLFKTNRKVTVKQLKEDYFKKIECFDSVEISGVEDRFNASLGTYHDLLKIIKDKDFLDNEENEDILEDIVLTLTLFEDREMIEERLKTYAHLFDDKVMKQLKRRRYTGWGRLSRKLINGIRDKQSGKTILDFLKSDGFANRNFMQLIHDDSLTFKEDIQKAQVSGQGDSLHEHIANLAGSPAIKKGILQTVKVVDELVKVMGRHKPENIVIEMARENQTTQKGQKNSRERMKRIEEGIKELGSQILKEHPVENTQLQNEKLYLYYLQNGRDMYVDQELDINRLSDYDVDHIVPQSFLKDDSIDNKVLTRSDKARGKSDNVPSEEVVKKMKNYWRQLLNAKLITQRKFDNLTKAERGGLSELDKAGFIKRQLVETRQITKHVAQILDSRMNTKYDENDKLIREVKVITLKSKLVSDFRKDFQFYKVREINNYHHAHDAYLNAVVGTALIKKYPKLESEFVYGDYKVYDVRKMIAKSEQEIGKATAKYFFYSNIMNFFKTEITLANGEIRKRPLIETNGETGEIVWDKGRDFATVRKVLSMPQVNIVKKTEVQTGGFSKESILPKRNSDKLIARKKDWDPKKYGGFDSPTVAYSVLVVAKVEKGKSKKLKSVKELLGITIMERSSFEKNPIDFLEAKGYKEVKKDLIIKLPKYSLFELENGRKRMLASAGELQKGNELALPSKYVNFLYLASHYEKLKGSPEDNEQKQLFVEQHKHYLDEIIEQISEFSKRVILADANLDKVLSAYNKHRDKPIREQAENIIHLFTLTNLGAPAAFKYFDTTIDRKRYTSTKEVLDATLIHQSITGLYETRIDLSQLGGDGGGGGGSGGGGSGGTLQLEEEYRLFEPESTQKQEMDIWLKNFPQAWAETGGMGTAHCQAPVLIQLKATATPISIRQYPMPHEAYQGIKPHIRRMLDQGILKPCQSPWNTPLLPVKKPGTEDYRPVQDLREVNKRVEDIHPTVPNPYNLLSTLPPSHPWYTVLDLKDAFFCLRLHSESQLLFAFEWRDPEIGLSGQLTWTRLPQGFKNSPTLFNEALHSDLADFRVRYPALVLLQYVDDLLLAAATRTECLEGTKALLETLGNKGYRASAKKAQICLQEVTYLGYSLKDGQRWLTKARKEAILSIPVPKNSRQVREFLGTAGYCRLWIPGFAELAAPLYPLTRPGTLFQWGTEQQLAFEDIKKALLSSPALGLPDITKPFELFIDENSGFAKGVLVQKLGPWKRPVAYLSKKLDTVASGWPPCLRMVAAIAILVKDAGKLTLGQPLTILTSHPVEALVRQPPNKWLSNARMTHYQAMLLDAERVHFGPTVSLNPATLLPLPSGGNHHDCLQILAETHGTRPDLTDQPLPDADLTWYTDGSSFIRNGEREAGAAVTTESEVIWAAPLPPGTSAQRAELIALTQALKMAEGKKLTVYTDSRYAFATTHVHGEIYRRRGWLTSEGKEIKNKNEILALLEALFLPKRLSIIHCPGHQKGDSPQAKGNRLADDTAKKAATETHSSLTVLPAGKRTADGSEFEKRTADGSEFESPKKKAKVE

SEQ ID NO: 1181 - protein, 2091 aa, synthetic construct
MPAAKRVKLDGGDKKYSIGLDIGTNSVGWAVITDEYKVPSKKFKVLGNTDRHSIKKNLIGALLFDSGETAEATRLKRTARRRYTRRKNRICYLQEIFSNEMAKVDDSFFHRLEESFLVEEDKKHERHPIFGNIVDEVAYHEKYPTIYHLRKKLVDSTDKADLRLIYLALAHMIKFRGHFLIEGDLNPDNSDVDKLFIQLVQTYNQLFEENPINASGVDAKAILSARLSKSRRLENLIAQLPGEKKNGLFGNLIALSLGLTPNFKSNFDLAEDAKLQLSKDTYDDDLDNLLAQIGDQYADLFLAAKNLSDAILLSDILRVNTEITKAPLSASMIKRYDEHHQDLTLLKALVRQQLPEKYKEIFFDQSKNGYAGYIDGGASQEEFYKFIKPILEKMDGTEELLVKLNREDLLRKQRTFDNGSIPHQIHLGELHAILRRQEDFYPFLKDNREKIEKILTFRIPYYVGPLARGNSRFAWMTRKSEETITPWNFEEVVDKGASAQSFIERMTNFDKNLPNEKVLPKHSLLYEYFTVYNELTKVKYVTEGMRKPAFLSGEQKKAIVDLLFKTNRKVTVKQLKEDYFKKIECFDSVEISGVEDRFNASLGTYHDLLKIIKDKDFLDNEENEDILEDIVLTLTLFEDREMIEERLKTYAHLFDDKVMKQLKRRRYTGWGRLSRKLINGIRDKQSGKTILDFLKSDGFANRNFMQLIHDDSLTFKEDIQKAQVSGQGDSLHEHIANLAGSPAIKKGILQTVKVVDELVKVMGRHKPENIVIEMARENQTTQKGQKNSRERMKRIEEGIKELGSQILKEHPVENTQLQNEKLYLYYLQNGRDMYVDQELDINRLSDYDVDHIVPQSFLKDDSIDNKVLTRSDKARGKSDNVPSEEVVKKMKNYWRQLLNAKLITQRKFDNLTKAERGGLSELDKAGFIKRQLVETRQITKHVAQILDSRMNTKYDENDKLIREVKVITLKSKLVSDFRKDFQFYKVREINNYHHAHDAYLNAVVGTALIKKYPKLESEFVYGDYKVYDVRKMIAKSEQEIGKATAKYFFYSNIMNFFKTEITLANGEIRKRPLIETNGETGEIVWDKGRDFATVRKVLSMPQVNIVKKTEVQTGGFSKESILPKRNSDKLIARKKDWDPKKYGGFDSPTVAYSVLVVAKVEKGKSKKLKSVKELLGITIMERSSFEKNPIDFLEAKGYKEVKKDLIIKLPKYSLFELENGRKRMLASAGELQKGNELALPSKYVNFLYLASHYEKLKGSPEDNEQKQLFVEQHKHYLDEIIEQISEFSKRVILADANLDKVLSAYNKHRDKPIREQAENIIHLFTLTNLGAPAAFKYFDTTIDRKRYTSTKEVLDATLIHQSITGLYETRIDLSQLGGDGGGGGGGGGGGTLQLEEEYRLFEPESTQKQEMDIWLKNFPQAWAETGGMGTAHCQAPVLIQLKATATPISIRQYPMPHEAYQGIKPHIRRMLDQGILKPCQSPWNTPLLPVKKPGTEDYRPVQDLREVNKRVEDIHPTVPNPYNLLSTLPPSHPWYTVLDLKDAFFCLRLHSESQLLFAFEWRDPEIGLSGQLTWTRLPQGFKNSPTLFNEALHSDLADFRVRYPALVLLQYVDDLLLAAATRTECLEGTKALLETLGNKGYRASAKKAQICLQEVTYLGYSLKDGQRWLTKARKEAILSIPVPKNSRQVREFLGTAGYCRLWIPGFAELAAPLYPLTRPGTLFQWGTEQQLAFEDIKKALLSSPALGLPDITKPFELFIDENSGFAKGVLVQKLGPWKRPVAYLSKKLDTVASGWPPCLRMVAAIAILVKDAGKLTLGQPLTILTSHPVEALVRQPPNKWLSNARMTHYQAMLLDAERVHFGPTVSLNPATLLPLPSGGNHHDCLQILAETHGTRPDLTDQPLPDADLTWYTDGSSFIRNGEREAGAAVTTESEVIWAAPLPPGTSAQRAELIALTQALKMAEGKKLTVYTDSRYAFATTHVHGEIYRRRGWLTSEGKEIKNKNEILALLEALFLPKRLSIIHCPGHQKGDSPQAKGNRLADDTAKKAATETHSSLTVLPAGKRTADGSEFEKRTADGSEFESPKKKAKVE

SEQ ID NO: 1182 - protein, 2093 aa, synthetic construct
MPAAKRVKLDGGDKKYSIGLDIGTNSVGWAVITDEYKVPSKKFKVLGNTDRHSIKKNLIGALLFDSGETAEATRLKRTARRRYTRRKNRICYLQEIFSNEMAKVDDSFFHRLEESFLVEEDKKHERHPIFGNIVDEVAYHEKYPTIYHLRKKLVDSTDKADLRLIYLALAHMIKFRGHFLIEGDLNPDNSDVDKLFIQLVQTYNQLFEENPINASGVDAKAILSARLSKSRRLENLIAQLPGEKKNGLFGNLIALSLGLTPNFKSNFDLAEDAKLQLSKDTYDDDLDNLLAQIGDQYADLFLAAKNLSDAILLSDILRVNTEITKAPLSASMIKRYDEHHQDLTLLKALVRQQLPEKYKEIFFDQSKNGYAGYIDGGASQEEFYKFIKPILEKMDGTEELLVKLNREDLLRKQRTFDNGSIPHQIHLGELHAILRRQEDFYPFLKDNREKIEKILTFRIPYYVGPLARGNSRFAWMTRKSEETITPWNFEEVVDKGASAQSFIERMTNFDKNLPNEKVLPKHSLLYEYFTVYNELTKVKYVTEGMRKPAFLSGEQKKAIVDLLFKTNRKVTVKQLKEDYFKKIECFDSVEISGVEDRFNASLGTYHDLLKIIKDKDFLDNEENEDILEDIVLTLTLFEDREMIEERLKTYAHLFDDKVMKQLKRRRYTGWGRLSRKLINGIRDKQSGKTILDFLKSDGFANRNFMQLIHDDSLTFKEDIQKAQVSGQGDSLHEHIANLAGSPAIKKGILQTVKVVDELVKVMGRHKPENIVIEMARENQTTQKGQKNSRERMKRIEEGIKELGSQILKEHPVENTQLQNEKLYLYYLQNGRDMYVDQELDINRLSDYDVDHIVPQSFLKDDSIDNKVLTRSDKARGKSDNVPSEEVVKKMKNYWRQLLNAKLITQRKFDNLTKAERGGLSELDKAGFIKRQLVETRQITKHVAQILDSRMNTKYDENDKLIREVKVITLKSKLVSDFRKDFQFYKVREINNYHHAHDAYLNAVVGTALIKKYPKLESEFVYGDYKVYDVRKMIAKSEQEIGKATAKYFFYSNIMNFFKTEITLANGEIRKRPLIETNGETGEIVWDKGRDFATVRKVLSMPQVNIVKKTEVQTGGFSKESILPKRNSDKLIARKKDWDPKKYGGFDSPTVAYSVLVVAKVEKGKSKKLKSVKELLGITIMERSSFEKNPIDFLEAKGYKEVKKDLIIKLPKYSLFELENGRKRMLASAGELQKGNELALPSKYVNFLYLASHYEKLKGSPEDNEQKQLFVEQHKHYLDEIIEQISEFSKRVILADANLDKVLSAYNKHRDKPIREQAENIIHLFTLTNLGAPAAFKYFDTTIDRKRYTSTKEVLDATLIHQSITGLYETRIDLSQLGGDGGGGGPAPGGSGGTLQLEEEYRLFEPESTQKQEMDIWLKNFPQAWAETGGMGTAHCQAPVLIQLKATATPISIRQYPMPHEAYQGIKPHIRRMLDQGILKPCQSPWNTPLLPVKKPGTEDYRPVQDLREVNKRVEDIHPTVPNPYNLLSTLPPSHPWYTVLDLKDAFFCLRLHSESQLLFAFEWRDPEIGLSGQLTWTRLPQGFKNSPTLFNEALHSDLADFRVRYPALVLLQYVDDLLLAAATRTECLEGTKALLETLGNKGYRASAKKAQICLQEVTYLGYSLKDGQRWLTKARKEAILSIPVPKNSRQVREFLGTAGYCRLWIPGFAELAAPLYPLTRPGTLFQWGTEQQLAFEDIKKALLSSPALGLPDITKPFELFIDENSGFAKGVLVQKLGPWKRPVAYLSKKLDTVASGWPPCLRMVAAIAILVKDAGKLTLGQPLTILTSHPVEALVRQPPNKWLSNARMTHYQAMLLDAERVHFGPTVSLNPATLLPLPSGGNHHDCLQILAETHGTRPDLTDQPLPDADLTWYTDGSSFIRNGEREAGAAVTTESEVIWAAPLPPGTSAQRAELIALTQALKMAEGKKLTVYTDSRYAFATTHVHGEIYRRRGWLTSEGKEIKNKNEILALLEALFLPKRLSIIHCPGHQKGDSPQAKGNRLADDTAKKAATETHSSLTVLPAGKRTADGSEFEKRTADGSEFESPKKKAKVE

SEQ ID NO: 1183 - protein, 2089 aa, synthetic construct
MPAAKRVKLDGGDKKYSIGLDIGTNSVGWAVITDEYKVPSKKFKVLGNTDRHSIKKNLIGALLFDSGETAEATRLKRTARRRYTRRKNRICYLQEIFSNEMAKVDDSFFHRLEESFLVEEDKKHERHPIFGNIVDEVAYHEKYPTIYHLRKKLVDSTDKADLRLIYLALAHMIKFRGHFLIEGDLNPDNSDVDKLFIQLVQTYNQLFEENPINASGVDAKAILSARLSKSRRLENLIAQLPGEKKNGLFGNLIALSLGLTPNFKSNFDLAEDAKLQLSKDTYDDDLDNLLAQIGDQYADLFLAAKNLSDAILLSDILRVNTEITKAPLSASMIKRYDEHHQDLTLLKALVRQQLPEKYKEIFFDQSKNGYAGYIDGGASQEEFYKFIKPILEKMDGTEELLVKLNREDLLRKQRTFDNGSIPHQIHLGELHAILRRQEDFYPFLKDNREKIEKILTFRIPYYVGPLARGNSRFAWMTRKSEETITPWNFEEVVDKGASAQSFIERMTNFDKNLPNEKVLPKHSLLYEYFTVYNELTKVKYVTEGMRKPAFLSGEQKKAIVDLLFKTNRKVTVKQLKEDYFKKIECFDSVEISGVEDRFNASLGTYHDLLKIIKDKDFLDNEENEDILEDIVLTLTLFEDREMIEERLKTYAHLFDDKVMKQLKRRRYTGWGRLSRKLINGIRDKQSGKTILDFLKSDGFANRNFMQLIHDDSLTFKEDIQKAQVSGQGDSLHEHIANLAGSPAIKKGILQTVKVVDELVKVMGRHKPENIVIEMARENQTTQKGQKNSRERMKRIEEGIKELGSQILKEHPVENTQLQNEKLYLYYLQNGRDMYVDQELDINRLSDYDVDHIVPQSFLKDDSIDNKVLTRSDKARGKSDNVPSEEVVKKMKNYWRQLLNAKLITQRKFDNLTKAERGGLSELDKAGFIKRQLVETRQITKHVAQILDSRMNTKYDENDKLIREVKVITLKSKLVSDFRKDFQFYKVREINNYHHAHDAYLNAVVGTALIKKYPKLESEFVYGDYKVYDVRKMIAKSEQEIGKATAKYFFYSNIMNFFKTEITLANGEIRKRPLIETNGETGEIVWDKGRDFATVRKVLSMPQVNIVKKTEVQTGGFSKESILPKRNSDKLIARKKDWDPKKYGGFDSPTVAYSVLVVAKVEKGKSKKLKSVKELLGITIMERSSFEKNPIDFLEAKGYKEVKKDLIIKLPKYSLFELENGRKRMLASAGELQKGNELALPSKYVNFLYLASHYEKLKGSPEDNEQKQLFVEQHKHYLDEIIEQISEFSKRVILADANLDKVLSAYNKHRDKPIREQAENIIHLFTLTNLGAPAAFKYFDTTIDRKRYTSTKEVLDATLIHQSITGLYETRIDLSQLGGDGGEAAAKGGTLQLEEEYRLFEPESTQKQEMDIWLKNFPQAWAETGGMGTAHCQAPVLIQLKATATPISIRQYPMPHEAYQGIKPHIRRMLDQGILKPCQSPWNTPLLPVKKPGTEDYRPVQDLREVNKRVEDIHPTVPNPYNLLSTLPPSHPWYTVLDLKDAFFCLRLHSESQLLFAFEWRDPEIGLSGQLTWTRLPQGFKNSPTLFNEALHSDLADFRVRYPALVLLQYVDDLLLAAATRTECLEGTKALLETLGNKGYRASAKKAQICLQEVTYLGYSLKDGQRWLTKARKEAILSIPVPKNSRQVREFLGTAGYCRLWIPGFAELAAPLYPLTRPGTLFQWGTEQQLAFEDIKKALLSSPALGLPDITKPFELFIDENSGFAKGVLVQKLGPWKRPVAYLSKKLDTVASGWPPCLRMVAAIAILVKDAGKLTLGQPLTILTSHPVEALVRQPPNKWLSNARMTHYQAMLLDAERVHFGPTVSLNPATLLPLPSGGNHHDCLQILAETHGTRPDLTDQPLPDADLTWYTDGSSFIRNGEREAGAAVTTESEVIWAAPLPPGTSAQRAELIALTQALKMAEGKKLTVYTDSRYAFATTHVHGEIYRRRGWLTSEGKEIKNKNEILALLEALFLPKRLSIIHCPGHQKGDSPQAKGNRLADDTAKKAATETHSSLTVLPAGKRTADGSEFEKRTADGSEFESPKKKAKVE

SEQ ID NO: 1184 - protein, 2090 aa, synthetic construct
MPAAKRVKLDGGDKKYSIGLDIGTNSVGWAVITDEYKVPSKKFKVLGNTDRHSIKKNLIGALLFDSGETAEATRLKRTARRRYTRRKNRICYLQEIFSNEMAKVDDSFFHRLEESFLVEEDKKHERHPIFGNIVDEVAYHEKYPTIYHLRKKLVDSTDKADLRLIYLALAHMIKFRGHFLIEGDLNPDNSDVDKLFIQLVQTYNQLFEENPINASGVDAKAILSARLSKSRRLENLIAQLPGEKKNGLFGNLIALSLGLTPNFKSNFDLAEDAKLQLSKDTYDDDLDNLLAQIGDQYADLFLAAKNLSDAILLSDILRVNTEITKAPLSASMIKRYDEHHQDLTLLKALVRQQLPEKYKEIFFDQSKNGYAGYIDGGASQEEFYKFIKPILEKMDGTEELLVKLNREDLLRKQRTFDNGSIPHQIHLGELHAILRRQEDFYPFLKDNREKIEKILTFRIPYYVGPLARGNSRFAWMTRKSEETITPWNFEEVVDKGASAQSFIERMTNFDKNLPNEKVLPKHSLLYEYFTVYNELTKVKYVTEGMRKPAFLSGEQKKAIVDLLFKTNRKVTVKQLKEDYFKKIECFDSVEISGVEDRFNASLGTYHDLLKIIKDKDFLDNEENEDILEDIVLTLTLFEDREMIEERLKTYAHLFDDKVMKQLKRRRYTGWGRLSRKLINGIRDKQSGKTILDFLKSDGFANRNFMQLIHDDSLTFKEDIQKAQVSGQGDSLHEHIANLAGSPAIKKGILQTVKVVDELVKVMGRHKPENIVIEMARENQTTQKGQKNSRERMKRIEEGIKELGSQILKEHPVENTQLQNEKLYLYYLQNGRDMYVDQELDINRLSDYDVDHIVPQSFLKDDSIDNKVLTRSDKARGKSDNVPSEEVVKKMKNYWRQLLNAKLITQRKFDNLTKAERGGLSELDKAGFIKRQLVETRQITKHVAQILDSRMNTKYDENDKLIREVKVITLKSKLVSDFRKDFQFYKVREINNYHHAHDAYLNAVVGTALIKKYPKLESEFVYGDYKVYDVRKMIAKSEQEIGKATAKYFFYSNIMNFFKTEITLANGEIRKRPLIETNGETGEIVWDKGRDFATVRKVLSMPQVNIVKKTEVQTGGFSKESILPKRNSDKLIARKKDWDPKKYGGFDSPTVAYSVLVVAKVEKGKSKKLKSVKELLGITIMERSSFEKNPIDFLEAKGYKEVKKDLIIKLPKYSLFELENGRKRMLASAGELQKGNELALPSKYVNFLYLASHYEKLKGSPEDNEQKQLFVEQHKHYLDEIIEQISEFSKRVILADANLDKVLSAYNKHRDKPIREQAENIIHLFTLTNLGAPAAFKYFDTTIDRKRYTSTKEVLDATLIHQSITGLYETRIDLSQLGGDGGGGSGGGGGTLQLEEEYRLFEPESTQKQEMDIWLKNFPQAWAETGGMGTAHCQAPVLIQLKATATPISIRQYPMPHEAYQGIKPHIRRMLDQGILKPCQSPWNTPLLPVKKPGTEDYRPVQDLREVNKRVEDIHPTVPNPYNLLSTLPPSHPWYTVLDLKDAFFCLRLHSESQLLFAFEWRDPEIGLSGQLTWTRLPQGFKNSPTLFNEALHSDLADFRVRYPALVLLQYVDDLLLAAATRTECLEGTKALLETLGNKGYRASAKKAQICLQEVTYLGYSLKDGQRWLTKARKEAILSIPVPKNSRQVREFLGTAGYCRLWIPGFAELAAPLYPLTRPGTLFQWGTEQQLAFEDIKKALLSSPALGLPDITKPFELFIDENSGFAKGVLVQKLGPWKRPVAYLSKKLDTVASGWPPCLRMVAAIAILVKDAGKLTLGQPLTILTSHPVEALVRQPPNKWLSNARMTHYQAMLLDAERVHFGPTVSLNPATLLPLPSGGNHHDCLQILAETHGTRPDLTDQPLPDADLTWYTDGSSFIRNGEREAGAAVTTESEVIWAAPLPPGTSAQRAELIALTQALKMAEGKKLTVYTDSRYAFATTHVHGEIYRRRGWLTSEGKEIKNKNEILALLEALFLPKRLSIIHCPGHQKGDSPQAKGNRLADDTAKKAATETHSSLTVLPAGKRTADGSEFEKRTADGSEFESPKKKAKVE

SEQ ID NO: 1185 - protein, 2095 aa, synthetic construct
MPAAKRVKLDGGDKKYSIGLDIGTNSVGWAVITDEYKVPSKKFKVLGNTDRHSIKKNLIGALLFDSGETAEATRLKRTARRRYTRRKNRICYLQEIFSNEMAKVDDSFFHRLEESFLVEEDKKHERHPIFGNIVDEVAYHEKYPTIYHLRKKLVDSTDKADLRLIYLALAHMIKFRGHFLIEGDLNPDNSDVDKLFIQLVQTYNQLFEENPINASGVDAKAILSARLSKSRRLENLIAQLPGEKKNGLFGNLIALSLGLTPNFKSNFDLAEDAKLQLSKDTYDDDLDNLLAQIGDQYADLFLAAKNLSDAILLSDILRVNTEITKAPLSASMIKRYDEHHQDLTLLKALVRQQLPEKYKEIFFDQSKNGYAGYIDGGASQEEFYKFIKPILEKMDGTEELLVKLNREDLLRKQRTFDNGSIPHQIHLGELHAILRRQEDFYPFLKDNREKIEKILTFRIPYYVGPLARGNSRFAWMTRKSEETITPWNFEEVVDKGASAQSFIERMTNFDKNLPNEKVLPKHSLLYEYFTVYNELTKVKYVTEGMRKPAFLSGEQKKAIVDLLFKTNRKVTVKQLKEDYFKKIECFDSVEISGVEDRFNASLGTYHDLLKIIKDKDFLDNEENEDILEDIVLTLTLFEDREMIEERLKTYAHLFDDKVMKQLKRRRYTGWGRLSRKLINGIRDKQSGKTILDFLKSDGFANRNFMQLIHDDSLTFKEDIQKAQVSGQGDSLHEHIANLAGSPAIKKGILQTVKVVDELVKVMGRHKPENIVIEMARENQTTQKGQKNSRERMKRIEEGIKELGSQILKEHPVENTQLQNEKLYLYYLQNGRDMYVDQELDINRLSDYDVDHIVPQSFLKDDSIDNKVLTRSDKARGKSDNVPSEEVVKKMKNYWRQLLNAKLITQRKFDNLTKAERGGLSELDKAGFIKRQLVETRQITKHVAQILDSRMNTKYDENDKLIREVKVITLKSKLVSDFRKDFQFYKVREINNYHHAHDAYLNAVVGTALIKKYPKLESEFVYGDYKVYDVRKMIAKSEQEIGKATAKYFFYSNIMNFFKTEITLANGEIRKRPLIETNGETGEIVWDKGRDFATVRKVLSMPQVNIVKKTEVQTGGFSKESILPKRNSDKLIARKKDWDPKKYGGFDSPTVAYSVLVVAKVEKGKSKKLKSVKELLGITIMERSSFEKNPIDFLEAKGYKEVKKDLIIKLPKYSLFELENGRKRMLASAGELQKGNELALPSKYVNFLYLASHYEKLKGSPEDNEQKQLFVEQHKHYLDEIIEQISEFSKRVILADANLDKVLSAYNKHRDKPIREQAENIIHLFTLTNLGAPAAFKYFDTTIDRKRYTSTKEVLDATLIHQSITGLYETRIDLSQLGGDGGEAAAKPAPGGGGGTLQLEEEYRLFEPESTQKQEMDIWLKNFPQAWAETGGMGTAHCQAPVLIQLKATATPISIRQYPMPHEAYQGIKPHIRRMLDQGILKPCQSPWNTPLLPVKKPGTEDYRPVQDLREVNKRVEDIHPTVPNPYNLLSTLPPSHPWYTVLDLKDAFFCLRLHSESQLLFAFEWRDPEIGLSGQLTWTRLPQGFKNSPTLFNEALHSDLADFRVRYPALVLLQYVDDLLLAAATRTECLEGTKALLETLGNKGYRASAKKAQICLQEVTYLGYSLKDGQRWLTKARKEAILSIPVPKNSRQVREFLGTAGYCRLWIPGFAELAAPLYPLTRPGTLFQWGTEQQLAFEDIKKALLSSPALGLPDITKPFELFIDENSGFAKGVLVQKLGPWKRPVAYLSKKLDTVASGWPPCLRMVAAIAILVKDAGKLTLGQPLTILTSHPVEALVRQPPNKWLSNARMTHYQAMLLDAERVHFGPTVSLNPATLLPLPSGGNHHDCLQILAETHGTRPDLTDQPLPDADLTWYTDGSSFIRNGEREAGAAVTTESEVIWAAPLPPGTSAQRAELIALTQALKMAEGKKLTVYTDSRYAFATTHVHGEIYRRRGWLTSEGKEIKNKNEILALLEALFLPKRLSIIHCPGHQKGDSPQAKGNRLADDTAKKAATETHSSLTVLPAGKRTADGSEFEKRTADGSEFESPKKKAKVE

SEQ ID NO: 1186 - protein, 2095 aa, synthetic construct
MPAAKRVKLDGGDKKYSIGLDIGTNSVGWAVITDEYKVPSKKFKVLGNTDRHSIKKNLIGALLFDSGETAEATRLKRTARRRYTRRKNRICYLQEIFSNEMAKVDDSFFHRLEESFLVEEDKKHERHPIFGNIVDEVAYHEKYPTIYHLRKKLVDSTDKADLRLIYLALAHMIKFRGHFLIEGDLNPDNSDVDKLFIQLVQTYNQLFEENPINASGVDAKAILSARLSKSRRLENLIAQLPGEKKNGLFGNLIALSLGLTPNFKSNFDLAEDAKLQLSKDTYDDDLDNLLAQIGDQYADLFLAAKNLSDAILLSDILRVNTEITKAPLSASMIKRYDEHHQDLTLLKALVRQQLPEKYKEIFFDQSKNGYAGYIDGGASQEEFYKFIKPILEKMDGTEELLVKLNREDLLRKQRTFDNGSIPHQIHLGELHAILRRQEDFYPFLKDNREKIEKILTFRIPYYVGPLARGNSRFAWMTRKSEETITPWNFEEVVDKGASAQSFIERMTNFDKNLPNEKVLPKHSLLYEYFTVYNELTKVKYVTEGMRKPAFLSGEQKKAIVDLLFKTNRKVTVKQLKEDYFKKIECFDSVEISGVEDRFNASLGTYHDLLKIIKDKDFLDNEENEDILEDIVLTLTLFEDREMIEERLKTYAHLFDDKVMKQLKRRRYTGWGRLSRKLINGIRDKQSGKTILDFLKSDGFANRNFMQLIHDDSLTFKEDIQKAQVSGQGDSLHEHIANLAGSPAIKKGILQTVKVVDELVKVMGRHKPENIVIEMARENQTTQKGQKNSRERMKRIEEGIKELGSQILKEHPVENTQLQNEKLYLYYLQNGRDMYVDQELDINRLSDYDVDHIVPQSFLKDDSIDNKVLTRSDKARGKSDNVPSEEVVKKMKNYWRQLLNAKLITQRKFDNLTKAERGGLSELDKAGFIKRQLVETRQITKHVAQILDSRMNTKYDENDKLIREVKVITLKSKLVSDFRKDFQFYKVREINNYHHAHDAYLNAVVGTALIKKYPKLESEFVYGDYKVYDVRKMIAKSEQEIGKATAKYFFYSNIMNFFKTEITLANGEIRKRPLIETNGETGEIVWDKGRDFATVRKVLSMPQVNIVKKTEVQTGGFSKESILPKRNSDKLIARKKDWDPKKYGGFDSPTVAYSVLVVAKVEKGKSKKLKSVKELLGITIMERSSFEKNPIDFLEAKGYKEVKKDLIIKLPKYSLFELENGRKRMLASAGELQKGNELALPSKYVNFLYLASHYEKLKGSPEDNEQKQLFVEQHKHYLDEIIEQISEFSKRVILADANLDKVLSAYNKHRDKPIREQAENIIHLFTLTNLGAPAAFKYFDTTIDRKRYTSTKEVLDATLIHQSITGLYETRIDLSQLGGDGGGGGPAPEAAAKGGTLQLEEEYRLFEPESTQKQEMDIWLKNFPQAWAETGGMGTAHCQAPVLIQLKATATPISIRQYPMPHEAYQGIKPHIRRMLDQGILKPCQSPWNTPLLPVKKPGTEDYRPVQDLREVNKRVEDIHPTVPNPYNLLSTLPPSHPWYTVLDLKDAFFCLRLHSESQLLFAFEWRDPEIGLSGQLTWTRLPQGFKNSPTLFNEALHSDLADFRVRYPALVLLQYVDDLLLAAATRTECLEGTKALLETLGNKGYRASAKKAQICLQEVTYLGYSLKDGQRWLTKARKEAILSIPVPKNSRQVREFLGTAGYCRLWIPGFAELAAPLYPLTRPGTLFQWGTEQQLAFEDIKKALLSSPALGLPDITKPFELFIDENSGFAKGVLVQKLGPWKRPVAYLSKKLDTVASGWPPCLRMVAAIAILVKDAGKLTLGQPLTILTSHPVEALVRQPPNKWLSNARMTHYQAMLLDAERVHFGPTVSLNPATLLPLPSGGNHHDCLQILAETHGTRPDLTDQPLPDADLTWYTDGSSFIRNGEREAGAAVTTESEVIWAAPLPPGTSAQRAELIALTQALKMAEGKKLTVYTDSRYAFATTHVHGEIYRRRGWLTSEGKEIKNKNEILALLEALFLPKRLSIIHCPGHQKGDSPQAKGNRLADDTAKKAATETHSSLTVLPAGKRTADGSEFEKRTADGSEFESPKKKAKVE

SEQ ID NO: 1187 - protein, 2095 aa, synthetic construct
MPAAKRVKLDGGDKKYSIGLDIGTNSVGWAVITDEYKVPSKKFKVLGNTDRHSIKKNLIGALLFDSGETAEATRLKRTARRRYTRRKNRICYLQEIFSNEMAKVDDSFFHRLEESFLVEEDKKHERHPIFGNIVDEVAYHEKYPTIYHLRKKLVDSTDKADLRLIYLALAHMIKFRGHFLIEGDLNPDNSDVDKLFIQLVQTYNQLFEENPINASGVDAKAILSARLSKSRRLENLIAQLPGEKKNGLFGNLIALSLGLTPNFKSNFDLAEDAKLQLSKDTYDDDLDNLLAQIGDQYADLFLAAKNLSDAILLSDILRVNTEITKAPLSASMIKRYDEHHQDLTLLKALVRQQLPEKYKEIFFDQSKNGYAGYIDGGASQEEFYKFIKPILEKMDGTEELLVKLNREDLLRKQRTFDNGSIPHQIHLGELHAILRRQEDFYPFLKDNREKIEKILTFRIPYYVGPLARGNSRFAWMTRKSEETITPWNFEEVVDKGASAQSFIERMTNFDKNLPNEKVLPKHSLLYEYFTVYNELTKVKYVTEGMRKPAFLSGEQKKAIVDLLFKTNRKVTVKQLKEDYFKKIECFDSVEISGVEDRFNASLGTYHDLLKIIKDKDFLDNEENEDILEDIVLTLTLFEDREMIEERLKTYAHLFDDKVMKQLKRRRYTGWGRLSRKLINGIRDKQSGKTILDFLKSDGFANRNFMQLIHDDSLTFKEDIQKAQVSGQGDSLHEHIANLAGSPAIKKGILQTVKVVDELVKVMGRHKPENIVIEMARENQTTQKGQKNSRERMKRIEEGIKELGSQILKEHPVENTQLQNEKLYLYYLQNGRDMYVDQELDINRLSDYDVDHIVPQSFLKDDSIDNKVLTRSDKARGKSDNVPSEEVVKKMKNYWRQLLNAKLITQRKFDNLTKAERGGLSELDKAGFIKRQLVETRQITKHVAQILDSRMNTKYDENDKLIREVKVITLKSKLVSDFRKDFQFYKVREINNYHHAHDAYLNAVVGTALIKKYPKLESEFVYGDYKVYDVRKMIAKSEQEIGKATAKYFFYSNIMNFFKTEITLANGEIRKRPLIETNGETGEIVWDKGRDFATVRKVLSMPQVNIVKKTEVQTGGFSKESILPKRNSDKLIARKKDWDPKKYGGFDSPTVAYSVLVVAKVEKGKSKKLKSVKELLGITIMERSSFEKNPIDFLEAKGYKEVKKDLIIKLPKYSLFELENGRKRMLASAGELQKGNELALPSKYVNFLYLASHYEKLKGSPEDNEQKQLFVEQHKHYLDEIIEQISEFSKRVILADANLDKVLSAYNKHRDKPIREQAENIIHLFTLTNLGAPAAFKYFDTTIDRKRYTSTKEVLDATLIHQSITGLYETRIDLSQLGGDGGGGGGGSEAAAKGGTLQLEEEYRLFEPESTQKQEMDIWLKNFPQAWAETGGMGTAHCQAPVLIQLKATATPISIRQYPMPHEAYQGIKPHIRRMLDQGILKPCQSPWNTPLLPVKKPGTEDYRPVQDLREVNKRVEDIHPTVPNPYNLLSTLPPSHPWYTVLDLKDAFFCLRLHSESQLLFAFEWRDPEIGLSGQLTWTRLPQGFKNSPTLFNEALHSDLADFRVRYPALVLLQYVDDLLLAAATRTECLEGTKALLETLGNKGYRASAKKAQICLQEVTYLGYSLKDGQRWLTKARKEAILSIPVPKNSRQVREFLGTAGYCRLWIPGFAELAAPLYPLTRPGTLFQWGTEQQLAFEDIKKALLSSPALGLPDITKPFELFIDENSGFAKGVLVQKLGPWKRPVAYLSKKLDTVASGWPPCLRMVAAIAILVKDAGKLTLGQPLTILTSHPVEALVRQPPNKWLSNARMTHYQAMLLDAERVHFGPTVSLNPATLLPLPSGGNHHDCLQILAETHGTRPDLTDQPLPDADLTWYTDGSSFIRNGEREAGAAVTTESEVIWAAPLPPGTSAQRAELIALTQALKMAEGKKLTVYTDSRYAFATTHVHGEIYRRRGWLTSEGKEIKNKNEILALLEALFLPKRLSIIHCPGHQKGDSPQAKGNRLADDTAKKAATETHSSLTVLPAGKRTADGSEFEKRTADGSEFESPKKKAKVE

SEQ ID NO: 1188 - protein, 2090 aa, synthetic construct
MPAAKRVKLDGGDKKYSIGLDIGTNSVGWAVITDEYKVPSKKFKVLGNTDRHSIKKNLIGALLFDSGETAEATRLKRTARRRYTRRKNRICYLQEIFSNEMAKVDDSFFHRLEESFLVEEDKKHERHPIFGNIVDEVAYHEKYPTIYHLRKKLVDSTDKADLRLIYLALAHMIKFRGHFLIEGDLNPDNSDVDKLFIQLVQTYNQLFEENPINASGVDAKAILSARLSKSRRLENLIAQLPGEKKNGLFGNLIALSLGLTPNFKSNFDLAEDAKLQLSKDTYDDDLDNLLAQIGDQYADLFLAAKNLSDAILLSDILRVNTEITKAPLSASMIKRYDEHHQDLTLLKALVRQQLPEKYKEIFFDQSKNGYAGYIDGGASQEEFYKFIKPILEKMDGTEELLVKLNREDLLRKQRTFDNGSIPHQIHLGELHAILRRQEDFYPFLKDNREKIEKILTFRIPYYVGPLARGNSRFAWMTRKSEETITPWNFEEVVDKGASAQSFIERMTNFDKNLPNEKVLPKHSLLYEYFTVYNELTKVKYVTEGMRKPAFLSGEQKKAIVDLLFKTNRKVTVKQLKEDYFKKIECFDSVEISGVEDRFNASLGTYHDLLKIIKDKDFLDNEENEDILEDIVLTLTLFEDREMIEERLKTYAHLFDDKVMKQLKRRRYTGWGRLSRKLINGIRDKQSGKTILDFLKSDGFANRNFMQLIHDDSLTFKEDIQKAQVSGQGDSLHEHIANLAGSPAIKKGILQTVKVVDELVKVMGRHKPENIVIEMARENQTTQKGQKNSRERMKRIEEGIKELGSQILKEHPVENTQLQNEKLYLYYLQNGRDMYVDQELDINRLSDYDVDHIVPQSFLKDDSIDNKVLTRSDKARGKSDNVPSEEVVKKMKNYWRQLLNAKLITQRKFDNLTKAERGGLSELDKAGFIKRQLVETRQITKHVAQILDSRMNTKYDENDKLIREVKVITLKSKLVSDFRKDFQFYKVREINNYHHAHDAYLNAVVGTALIKKYPKLESEFVYGDYKVYDVRKMIAKSEQEIGKATAKYFFYSNIMNFFKTEITLANGEIRKRPLIETNGETGEIVWDKGRDFATVRKVLSMPQVNIVKKTEVQTGGFSKESILPKRNSDKLIARKKDWDPKKYGGFDSPTVAYSVLVVAKVEKGKSKKLKSVKELLGITIMERSSFEKNPIDFLEAKGYKEVKKDLIIKLPKYSLFELENGRKRMLASAGELQKGNELALPSKYVNFLYLASHYEKLKGSPEDNEQKQLFVEQHKHYLDEIIEQISEFSKRVILADANLDKVLSAYNKHRDKPIREQAENIIHLFTLTNLGAPAAFKYFDTTIDRKRYTSTKEVLDATLIHQSITGLYETRIDLSQLGGDGGGGGGGGGGTLQLEEEYRLFEPESTQKQEMDIWLKNFPQAWAETGGMGTAHCQAPVLIQLKATATPISIRQYPMPHEAYQGIKPHIRRMLDQGILKPCQSPWNTPLLPVKKPGTEDYRPVQDLREVNKRVEDIHPTVPNPYNLLSTLPPSHPWYTVLDLKDAFFCLRLHSESQLLFAFEWRDPEIGLSGQLTWTRLPQGFKNSPTLFNEALHSDLADFRVRYPALVLLQYVDDLLLAAATRTECLEGTKALLETLGNKGYRASAKKAQICLQEVTYLGYSLKDGQRWLTKARKEAILSIPVPKNSRQVREFLGTAGYCRLWIPGFAELAAPLYPLTRPGTLFQWGTEQQLAFEDIKKALLSSPALGLPDITKPFELFIDENSGFAKGVLVQKLGPWKRPVAYLSKKLDTVASGWPPCLRMVAAIAILVKDAGKLTLGQPLTILTSHPVEALVRQPPNKWLSNARMTHYQAMLLDAERVHFGPTVSLNPATLLPLPSGGNHHDCLQILAETHGTRPDLTDQPLPDADLTWYTDGSSFIRNGEREAGAAVTTESEVIWAAPLPPGTSAQRAELIALTQALKMAEGKKLTVYTDSRYAFATTHVHGEIYRRRGWLTSEGKEIKNKNEILALLEALFLPKRLSIIHCPGHQKGDSPQAKGNRLADDTAKKAATETHSSLTVLPAGKRTADGSEFEKRTADGSEFESPKKKAKVE

SEQ ID NO: 1189 - protein, 2093 aa, synthetic construct
MPAAKRVKLDGGDKKYSIGLDIGTNSVGWAVITDEYKVPSKKFKVLGNTDRHSIKKNLIGALLFDSGETAEATRLKRTARRRYTRRKNRICYLQEIFSNEMAKVDDSFFHRLEESFLVEEDKKHERHPIFGNIVDEVAYHEKYPTIYHLRKKLVDSTDKADLRLIYLALAHMIKFRGHFLIEGDLNPDNSDVDKLFIQLVQTYNQLFEENPINASGVDAKAILSARLSKSRRLENLIAQLPGEKKNGLFGNLIALSLGLTPNFKSNFDLAEDAKLQLSKDTYDDDLDNLLAQIGDQYADLFLAAKNLSDAILLSDILRVNTEITKAPLSASMIKRYDEHHQDLTLLKALVRQQLPEKYKEIFFDQSKNGYAGYIDGGASQEEFYKFIKPILEKMDGTEELLVKLNREDLLRKQRTFDNGSIPHQIHLGELHAILRRQEDFYPFLKDNREKIEKILTFRIPYYVGPLARGNSRFAWMTRKSEETITPWNFEEVVDKGASAQSFIERMTNFDKNLPNEKVLPKHSLLYEYFTVYNELTKVKYVTEGMRKPAFLSGEQKKAIVDLLFKTNRKVTVKQLKEDYFKKIECFDSVEISGVEDRFNASLGTYHDLLKIIKDKDFLDNEENEDILEDIVLTLTLFEDREMIEERLKTYAHLFDDKVMKQLKRRRYTGWGRLSRKLINGIRDKQSGKTILDFLKSDGFANRNFMQLIHDDSLTFKEDIQKAQVSGQGDSLHEHIANLAGSPAIKKGILQTVKVVDELVKVMGRHKPENIVIEMARENQTTQKGQKNSRERMKRIEEGIKELGSQILKEHPVENTQLQNEKLYLYYLQNGRDMYVDQELDINRLSDYDVDHIVPQSFLKDDSIDNKVLTRSDKARGKSDNVPSEEVVKKMKNYWRQLLNAKLITQRKFDNLTKAERGGLSELDKAGFIKRQLVETRQITKHVAQILDSRMNTKYDENDKLIREVKVITLKSKLVSDFRKDFQFYKVREINNYHHAHDAYLNAVVGTALIKKYPKLESEFVYGDYKVYDVRKMIAKSEQEIGKATAKYFFYSNIMNFFKTEITLANGEIRKRPLIETNGETGEIVWDKGRDFATVRKVLSMPQVNIVKKTEVQTGGFSKESILPKRNSDKLIARKKDWDPKKYGGFDSPTVAYSVLVVAKVEKGKSKKLKSVKELLGITIMERSSFEKNPIDFLEAKGYKEVKKDLIIKLPKYSLFELENGRKRMLASAGELQKGNELALPSKYVNFLYLASHYEKLKGSPEDNEQKQLFVEQHKHYLDEIIEQISEFSKRVILADANLDKVLSAYNKHRDKPIREQAENIIHLFTLTNLGAPAAFKYFDTTIDRKRYTSTKEVLDATLIHQSITGLYETRIDLSQLGGDGGGGGGSSPAPGGTLQLEEEYRLFEPESTQKQEMDIWLKNFPQAWAETGGMGTAHCQAPVLIQLKATATPISIRQYPMPHEAYQGIKPHIRRMLDQGILKPCQSPWNTPLLPVKKPGTEDYRPVQDLREVNKRVEDIHPTVPNPYNLLSTLPPSHPWYTVLDLKDAFFCLRLHSESQLLFAFEWRDPEIGLSGQLTWTRLPQGFKNSPTLFNEALHSDLADFRVRYPALVLLQYVDDLLLAAATRTECLEGTKALLETLGNKGYRASAKKAQICLQEVTYLGYSLKDGQRWLTKARKEAILSIPVPKNSRQVREFLGTAGYCRLWIPGFAELAAPLYPLTRPGTLFQWGTEQQLAFEDIKKALLSSPALGLPDITKPFELFIDENSGFAKGVLVQKLGPWKRPVAYLSKKLDTVASGWPPCLRMVAAIAILVKDAGKLTLGQPLTILTSHPVEALVRQPPNKWLSNARMTHYQAMLLDAERVHFGPTVSLNPATLLPLPSGGNHHDCLQILAETHGTRPDLTDQPLPDADLTWYTDGSSFIRNGEREAGAAVTTESEVIWAAPLPPGTSAQRAELIALTQALKMAEGKKLTVYTDSRYAFATTHVHGEIYRRRGWLTSEGKEIKNKNEILALLEALFLPKRLSIIHCPGHQKGDSPQAKGNRLADDTAKKAATETHSSLTVLPAGKRTADGSEFEKRTADGSEFESPKKKAKVE

SEQ ID NO: 1190 - protein, 2093 aa, synthetic construct
MPAAKRVKLDGGDKKYSIGLDIGTNSVGWAVITDEYKVPSKKFKVLGNTDRHSIKKNLIGALLFDSGETAEATRLKRTARRRYTRRKNRICYLQEIFSNEMAKVDDSFFHRLEESFLVEEDKKHERHPIFGNIVDEVAYHEKYPTIYHLRKKLVDSTDKADLRLIYLALAHMIKFRGHFLIEGDLNPDNSDVDKLFIQLVQTYNQLFEENPINASGVDAKAILSARLSKSRRLENLIAQLPGEKKNGLFGNLIALSLGLTPNFKSNFDLAEDAKLQLSKDTYDDDLDNLLAQIGDQYADLFLAAKNLSDAILLSDILRVNTEITKAPLSASMIKRYDEHHQDLTLLKALVRQQLPEKYKEIFFDQSKNGYAGYIDGGASQEEFYKFIKPILEKMDGTEELLVKLNREDLLRKQRTFDNGSIPHQIHLGELHAILRRQEDFYPFLKDNREKIEKILTFRIPYYVGPLARGNSRFAWMTRKSEETITPWNFEEVVDKGASAQSFIERMTNFDKNLPNEKVLPKHSLLYEYFTVYNELTKVKYVTEGMRKPAFLSGEQKKAIVDLLFKTNRKVTVKQLKEDYFKKIECFDSVEISGVEDRFNASLGTYHDLLKIIKDKDFLDNEENEDILEDIVLTLTLFEDREMIEERLKTYAHLFDDKVMKQLKRRRYTGWGRLSRKLINGIRDKQSGKTILDFLKSDGFANRNFMQLIHDDSLTFKEDIQKAQVSGQGDSLHEHIANLAGSPAIKKGILQTVKVVDELVKVMGRHKPENIVIEMARENQTTQKGQKNSRERMKRIEEGIKELGSQILKEHPVENTQLQNEKLYLYYLQNGRDMYVDQELDINRLSDYDVDHIVPQSFLKDDSIDNKVLTRSDKARGKSDNVPSEEVVKKMKNYWRQLLNAKLITQRKFDNLTKAERGGLSELDKAGFIKRQLVETRQITKHVAQILDSRMNTKYDENDKLIREVKVITLKSKLVSDFRKDFQFYKVREINNYHHAHDAYLNAVVGTALIKKYPKLESEFVYGDYKVYDVRKMIAKSEQEIGKATAKYFFYSNIMNFFKTEITLANGEIRKRPLIETNGETGEIVWDKGRDFATVRKVLSMPQVNIVKKTEVQTGGFSKESILPKRNSDKLIARKKDWDPKKYGGFDSPTVAYSVLVVAKVEKGKSKKLKSVKELLGITIMERSSFEKNPIDFLEAKGYKEVKKDLIIKLPKYSLFELENGRKRMLASAGELQKGNELALPSKYVNFLYLASHYEKLKGSPEDNEQKQLFVEQHKHYLDEIIEQISEFSKRVILADANLDKVLSAYNKHRDKPIREQAENIIHLFTLTNLGAPAAFKYFDTTIDRKRYTSTKEVLDATLIHQSITGLYETRIDLSQLGGDGGGGSGGGPAPGGTLQLEEEYRLFEPESTQKQEMDIWLKNFPQAWAETGGMGTAHCQAPVLIQLKATATPISIRQYPMPHEAYQGIKPHIRRMLDQGILKPCQSPWNTPLLPVKKPGTEDYRPVQDLREVNKRVEDIHPTVPNPYNLLSTLPPSHPWYTVLDLKDAFFCLRLHSESQLLFAFEWRDPEIGLSGQLTWTRLPQGFKNSPTLFNEALHSDLADFRVRYPALVLLQYVDDLLLAAATRTECLEGTKALLETLGNKGYRASAKKAQICLQEVTYLGYSLKDGQRWLTKARKEAILSIPVPKNSRQVREFLGTAGYCRLWIPGFAELAAPLYPLTRPGTLFQWGTEQQLAFEDIKKALLSSPALGLPDITKPFELFIDENSGFAKGVLVQKLGPWKRPVAYLSKKLDTVASGWPPCLRMVAAIAILVKDAGKLTLGQPLTILTSHPVEALVRQPPNKWLSNARMTHYQAMLLDAERVHFGPTVSLNPATLLPLPSGGNHHDCLQILAETHGTRPDLTDQPLPDADLTWYTDGSSFIRNGEREAGAAVTTESEVIWAAPLPPGTSAQRAELIALTQALKMAEGKKLTVYTDSRYAFATTHVHGEIYRRRGWLTSEGKEIKNKNEILALLEALFLPKRLSIIHCPGHQKGDSPQAKGNRLADDTAKKAATETHSSLTVLPAGKRTADGSEFEKRTADGSEFESPKKKAKVE

SEQ ID NO: 1191 - protein, 2095 aa, synthetic construct
MPAAKRVKLDGGDKKYSIGLDIGTNSVGWAVITDEYKVPSKKFKVLGNTDRHSIKKNLIGALLFDSGETAEATRLKRTARRRYTRRKNRICYLQEIFSNEMAKVDDSFFHRLEESFLVEEDKKHERHPIFGNIVDEVAYHEKYPTIYHLRKKLVDSTDKADLRLIYLALAHMIKFRGHFLIEGDLNPDNSDVDKLFIQLVQTYNQLFEENPINASGVDAKAILSARLSKSRRLENLIAQLPGEKKNGLFGNLIALSLGLTPNFKSNFDLAEDAKLQLSKDTYDDDLDNLLAQIGDQYADLFLAAKNLSDAILLSDILRVNTEITKAPLSASMIKRYDEHHQDLTLLKALVRQQLPEKYKEIFFDQSKNGYAGYIDGGASQEEFYKFIKPILEKMDGTEELLVKLNREDLLRKQRTFDNGSIPHQIHLGELHAILRRQEDFYPFLKDNREKIEKILTFRIPYYVGPLARGNSRFAWMTRKSEETITPWNFEEVVDKGASAQSFIERMTNFDKNLPNEKVLPKHSLLYEYFTVYNELTKVKYVTEGMRKPAFLSGEQKKAIVDLLFKTNRKVTVKQLKEDYFKKIECFDSVEISGVEDRFNASLGTYHDLLKIIKDKDFLDNEENEDILEDIVLTLTLFEDREMIEERLKTYAHLFDDKVMKQLKRRRYTGWGRLSRKLINGIRDKQSGKTILDFLKSDGFANRNFMQLIHDDSLTFKEDIQKAQVSGQGDSLHEHIANLAGSPAIKKGILQTVKVVDELVKVMGRHKPENIVIEMARENQTTQKGQKNSRERMKRIEEGIKELGSQILKEHPVENTQLQNEKLYLYYLQNGRDMYVDQELDINRLSDYDVDHIVPQSFLKDDSIDNKVLTRSDKARGKSDNVPSEEVVKKMKNYWRQLLNAKLITQRKFDNLTKAERGGLSELDKAGFIKRQLVETRQITKHVAQILDSRMNTKYDENDKLIREVKVITLKSKLVSDFRKDFQFYKVREINNYHHAHDAYLNAVVGTALIKKYPKLESEFVYGDYKVYDVRKMIAKSEQEIGKATAKYFFYSNIMNFFKTEITLANGEIRKRPLIETNGETGEIVWDKGRDFATVRKVLSMPQVNIVKKTEVQTGGFSKESILPKRNSDKLIARKKDWDPKKYGGFDSPTVAYSVLVVAKVEKGKSKKLKSVKELLGITIMERSSFEKNPIDFLEAKGYKEVKKDLIIKLPKYSLFELENGRKRMLASAGELQKGNELALPSKYVNFLYLASHYEKLKGSPEDNEQKQLFVEQHKHYLDEIIEQISEFSKRVILADANLDKVLSAYNKHRDKPIREQAENIIHLFTLTNLGAPAAFKYFDTTIDRKRYTSTKEVLDATLIHQSITGLYETRIDLSQLGGDGGGSSPAPEAAAKGGTLQLEEEYRLFEPESTQKQEMDIWLKNFPQAWAETGGMGTAHCQAPVLIQLKATATPISIRQYPMPHEAYQGIKPHIRRMLDQGILKPCQSPWNTPLLPVKKPGTEDYRPVQDLREVNKRVEDIHPTVPNPYNLLSTLPPSHPWYTVLDLKDAFFCLRLHSESQLLFAFEWRDPEIGLSGQLTWTRLPQGFKNSPTLFNEALHSDLADFRVRYPALVLLQYVDDLLLAAATRTECLEGTKALLETLGNKGYRASAKKAQICLQEVTYLGYSLKDGQRWLTKARKEAILSIPVPKNSRQVREFLGTAGYCRLWIPGFAELAAPLYPLTRPGTLFQWGTEQQLAFEDIKKALLSSPALGLPDITKPFELFIDENSGFAKGVLVQKLGPWKRPVAYLSKKLDTVASGWPPCLRMVAAIAILVKDAGKLTLGQPLTILTSHPVEALVRQPPNKWLSNARMTHYQAMLLDAERVHFGPTVSLNPATLLPLPSGGNHHDCLQILAETHGTRPDLTDQPLPDADLTWYTDGSSFIRNGEREAGAAVTTESEVIWAAPLPPGTSAQRAELIALTQALKMAEGKKLTVYTDSRYAFATTHVHGEIYRRRGWLTSEGKEIKNKNEILALLEALFLPKRLSIIHCPGHQKGDSPQAKGNRLADDTAKKAATETHSSLTVLPAGKRTADGSEFEKRTADGSEFESPKKKAKVE

SEQ ID NO: 1192 - protein, 2093 aa, synthetic construct
MPAAKRVKLDGGDKKYSIGLDIGTNSVGWAVITDEYKVPSKKFKVLGNTDRHSIKKNLIGALLFDSGETAEATRLKRTARRRYTRRKNRICYLQEIFSNEMAKVDDSFFHRLEESFLVEEDKKHERHPIFGNIVDEVAYHEKYPTIYHLRKKLVDSTDKADLRLIYLALAHMIKFRGHFLIEGDLNPDNSDVDKLFIQLVQTYNQLFEENPINASGVDAKAILSARLSKSRRLENLIAQLPGEKKNGLFGNLIALSLGLTPNFKSNFDLAEDAKLQLSKDTYDDDLDNLLAQIGDQYADLFLAAKNLSDAILLSDILRVNTEITKAPLSASMIKRYDEHHQDLTLLKALVRQQLPEKYKEIFFDQSKNGYAGYIDGGASQEEFYKFIKPILEKMDGTEELLVKLNREDLLRKQRTFDNGSIPHQIHLGELHAILRRQEDFYPFLKDNREKIEKILTFRIPYYVGPLARGNSRFAWMTRKSEETITPWNFEEVVDKGASAQSFIERMTNFDKNLPNEKVLPKHSLLYEYFTVYNELTKVKYVTEGMRKPAFLSGEQKKAIVDLLFKTNRKVTVKQLKEDYFKKIECFDSVEISGVEDRFNASLGTYHDLLKIIKDKDFLDNEENEDILEDIVLTLTLFEDREMIEERLKTYAHLFDDKVMKQLKRRRYTGWGRLSRKLINGIRDKQSGKTILDFLKSDGFANRNFMQLIHDDSLTFKEDIQKAQVSGQGDSLHEHIANLAGSPAIKKGILQTVKVVDELVKVMGRHKPENIVIEMARENQTTQKGQKNSRERMKRIEEGIKELGSQILKEHPVENTQLQNEKLYLYYLQNGRDMYVDQELDINRLSDYDVDHIVPQSFLKDDSIDNKVLTRSDKARGKSDNVPSEEVVKKMKNYWRQLLNAKLITQRKFDNLTKAERGGLSELDKAGFIKRQLVETRQITKHVAQILDSRMNTKYDENDKLIREVKVITLKSKLVSDFRKDFQFYKVREINNYHHAHDAYLNAVVGTALIKKYPKLESEFVYGDYKVYDVRKMIAKSEQEIGKATAKYFFYSNIMNFFKTEITLANGEIRKRPLIETNGETGEIVWDKGRDFATVRKVLSMPQVNIVKKTEVQTGGFSKESILPKRNSDKLIARKKDWDPKKYGGFDSPTVAYSVLVVAKVEKGKSKKLKSVKELLGITIMERSSFEKNPIDFLEAKGYKEVKKDLIIKLPKYSLFELENGRKRMLASAGELQKGNELALPSKYVNFLYLASHYEKLKGSPEDNEQKQLFVEQHKHYLDEIIEQISEFSKRVILADANLDKVLSAYNKHRDKPIREQAENIIHLFTLTNLGAPAAFKYFDTTIDRKRYTSTKEVLDATLIHQSITGLYETRIDLSQLGGDGGPAPGSSGGGGGTLQLEEEYRLFEPESTQKQEMDIWLKNFPQAWAETGGMGTAHCQAPVLIQLKATATPISIRQYPMPHEAYQGIKPHIRRMLDQGILKPCQSPWNTPLLPVKKPGTEDYRPVQDLREVNKRVEDIHPTVPNPYNLLSTLPPSHPWYTVLDLKDAFFCLRLHSESQLLFAFEWRDPEIGLSGQLTWTRLPQGFKNSPTLFNEALHSDLADFRVRYPALVLLQYVDDLLLAAATRTECLEGTKALLETLGNKGYRASAKKAQICLQEVTYLGYSLKDGQRWLTKARKEAILSIPVPKNSRQVREFLGTAGYCRLWIPGFAELAAPLYPLTRPGTLFQWGTEQQLAFEDIKKALLSSPALGLPDITKPFELFIDENSGFAKGVLVQKLGPWKRPVAYLSKKLDTVASGWPPCLRMVAAIAILVKDAGKLTLGQPLTILTSHPVEALVRQPPNKWLSNARMTHYQAMLLDAERVHFGPTVSLNPATLLPLPSGGNHHDCLQILAETHGTRPDLTDQPLPDADLTWYTDGSSFIRNGEREAGAAVTTESEVIWAAPLPPGTSAQRAELIALTQALKMAEGKKLTVYTDSRYAFATTHVHGEIYRRRGWLTSEGKEIKNKNEILALLEALFLPKRLSIIHCPGHQKGDSPQAKGNRLADDTAKKAATETHSSLTVLPAGKRTADGSEFEKRTADGSEFESPKKKAKVE

SEQ ID NO: 1193 - protein, 2090 aa, synthetic construct
MPAAKRVKLDGGDKKYSIGLDIGTNSVGWAVITDEYKVPSKKFKVLGNTDRHSIKKNLIGALLFDSGETAEATRLKRTARRRYTRRKNRICYLQEIFSNEMAKVDDSFFHRLEESFLVEEDKKHERHPIFGNIVDEVAYHEKYPTIYHLRKKLVDSTDKADLRLIYLALAHMIKFRGHFLIEGDLNPDNSDVDKLFIQLVQTYNQLFEENPINASGVDAKAILSARLSKSRRLENLIAQLPGEKKNGLFGNLIALSLGLTPNFKSNFDLAEDAKLQLSKDTYDDDLDNLLAQIGDQYADLFLAAKNLSDAILLSDILRVNTEITKAPLSASMIKRYDEHHQDLTLLKALVRQQLPEKYKEIFFDQSKNGYAGYIDGGASQEEFYKFIKPILEKMDGTEELLVKLNREDLLRKQRTFDNGSIPHQIHLGELHAILRRQEDFYPFLKDNREKIEKILTFRIPYYVGPLARGNSRFAWMTRKSEETITPWNFEEVVDKGASAQSFIERMTNFDKNLPNEKVLPKHSLLYEYFTVYNELTKVKYVTEGMRKPAFLSGEQKKAIVDLLFKTNRKVTVKQLKEDYFKKIECFDSVEISGVEDRFNASLGTYHDLLKIIKDKDFLDNEENEDILEDIVLTLTLFEDREMIEERLKTYAHLFDDKVMKQLKRRRYTGWGRLSRKLINGIRDKQSGKTILDFLKSDGFANRNFMQLIHDDSLTFKEDIQKAQVSGQGDSLHEHIANLAGSPAIKKGILQTVKVVDELVKVMGRHKPENIVIEMARENQTTQKGQKNSRERMKRIEEGIKELGSQILKEHPVENTQLQNEKLYLYYLQNGRDMYVDQELDINRLSDYDVDHIVPQSFLKDDSIDNKVLTRSDKARGKSDNVPSEEVVKKMKNYWRQLLNAKLITQRKFDNLTKAERGGLSELDKAGFIKRQLVETRQITKHVAQILDSRMNTKYDENDKLIREVKVITLKSKLVSDFRKDFQFYKVREINNYHHAHDAYLNAVVGTALIKKYPKLESEFVYGDYKVYDVRKMIAKSEQEIGKATAKYFFYSNIMNFFKTEITLANGEIRKRPLIETNGETGEIVWDKGRDFATVRKVLSMPQVNIVKKTEVQTGGFSKESILPKRNSDKLIARKKDWDPKKYGGFDSPTVAYSVLVVAKVEKGKSKKLKSVKELLGITIMERSSFEKNPIDFLEAKGYKEVKKDLIIKLPKYSLFELENGRKRMLASAGELQKGNELALPSKYVNFLYLASHYEKLKGSPEDNEQKQLFVEQHKHYLDEIIEQISEFSKRVILADANLDKVLSAYNKHRDKPIREQAENIIHLFTLTNLGAPAAFKYFDTTIDRKRYTSTKEVLDATLIHQSITGLYETRIDLSQLGGDGGGGSGGSGGTLQLEEEYRLFEPESTQKQEMDIWLKNFPQAWAETGGMGTAHCQAPVLIQLKATATPISIRQYPMPHEAYQGIKPHIRRMLDQGILKPCQSPWNTPLLPVKKPGTEDYRPVQDLREVNKRVEDIHPTVPNPYNLLSTLPPSHPWYTVLDLKDAFFCLRLHSESQLLFAFEWRDPEIGLSGQLTWTRLPQGFKNSPTLFNEALHSDLADFRVRYPALVLLQYVDDLLLAAATRTECLEGTKALLETLGNKGYRASAKKAQICLQEVTYLGYSLKDGQRWLTKARKEAILSIPVPKNSRQVREFLGTAGYCRLWIPGFAELAAPLYPLTRPGTLFQWGTEQQLAFEDIKKALLSSPALGLPDITKPFELFIDENSGFAKGVLVQKLGPWKRPVAYLSKKLDTVASGWPPCLRMVAAIAILVKDAGKLTLGQPLTILTSHPVEALVRQPPNKWLSNARMTHYQAMLLDAERVHFGPTVSLNPATLLPLPSGGNHHDCLQILAETHGTRPDLTDQPLPDADLTWYTDGSSFIRNGEREAGAAVTTESEVIWAAPLPPGTSAQRAELIALTQALKMAEGKKLTVYTDSRYAFATTHVHGEIYRRRGWLTSEGKEIKNKNEILALLEALFLPKRLSIIHCPGHQKGDSPQAKGNRLADDTAKKAATETHSSLTVLPAGKRTADGSEFEKRTADGSEFESPKKKAKVE

SEQ ID NO: 1194 - protein, 2093 aa, synthetic construct
MPAAKRVKLDGGDKKYSIGLDIGTNSVGWAVITDEYKVPSKKFKVLGNTDRHSIKKNLIGALLFDSGETAEATRLKRTARRRYTRRKNRICYLQEIFSNEMAKVDDSFFHRLEESFLVEEDKKHERHPIFGNIVDEVAYHEKYPTIYHLRKKLVDSTDKADLRLIYLALAHMIKFRGHFLIEGDLNPDNSDVDKLFIQLVQTYNQLFEENPINASGVDAKAILSARLSKSRRLENLIAQLPGEKKNGLFGNLIALSLGLTPNFKSNFDLAEDAKLQLSKDTYDDDLDNLLAQIGDQYADLFLAAKNLSDAILLSDILRVNTEITKAPLSASMIKRYDEHHQDLTLLKALVRQQLPEKYKEIFFDQSKNGYAGYIDGGASQEEFYKFIKPILEKMDGTEELLVKLNREDLLRKQRTFDNGSIPHQIHLGELHAILRRQEDFYPFLKDNREKIEKILTFRIPYYVGPLARGNSRFAWMTRKSEETITPWNFEEVVDKGASAQSFIERMTNFDKNLPNEKVLPKHSLLYEYFTVYNELTKVKYVTEGMRKPAFLSGEQKKAIVDLLFKTNRKVTVKQLKEDYFKKIECFDSVEISGVEDRFNASLGTYHDLLKIIKDKDFLDNEENEDILEDIVLTLTLFEDREMIEERLKTYAHLFDDKVMKQLKRRRYTGWGRLSRKLINGIRDKQSGKTILDFLKSDGFANRNFMQLIHDDSLTFKEDIQKAQVSGQGDSLHEHIANLAGSPAIKKGILQTVKVVDELVKVMGRHKPENIVIEMARENQTTQKGQKNSRERMKRIEEGIKELGSQILKEHPVENTQLQNEKLYLYYLQNGRDMYVDQELDINRLSDYDVDHIVPQSFLKDDSIDNKVLTRSDKARGKSDNVPSEEVVKKMKNYWRQLLNAKLITQRKFDNLTKAERGGLSELDKAGFIKRQLVETRQITKHVAQILDSRMNTKYDENDKLIREVKVITLKSKLVSDFRKDFQFYKVREINNYHHAHDAYLNAVVGTALIKKYPKLESEFVYGDYKVYDVRKMIAKSEQEIGKATAKYFFYSNIMNFFKTEITLANGEIRKRPLIETNGETGEIVWDKGRDFATVRKVLSMPQVNIVKKTEVQTGGFSKESILPKRNSDKLIARKKDWDPKKYGGFDSPTVAYSVLVVAKVEKGKSKKLKSVKELLGITIMERSSFEKNPIDFLEAKGYKEVKKDLIIKLPKYSLFELENGRKRMLASAGELQKGNELALPSKYVNFLYLASHYEKLKGSPEDNEQKQLFVEQHKHYLDEIIEQISEFSKRVILADANLDKVLSAYNKHRDKPIREQAENIIHLFTLTNLGAPAAFKYFDTTIDRKRYTSTKEVLDATLIHQSITGLYETRIDLSQLGGDGGGGSPAPGGGGGTLQLEEEYRLFEPESTQKQEMDIWLKNFPQAWAETGGMGTAHCQAPVLIQLKATATPISIRQYPMPHEAYQGIKPHIRRMLDQGILKPCQSPWNTPLLPVKKPGTEDYRPVQDLREVNKRVEDIHPTVPNPYNLLSTLPPSHPWYTVLDLKDAFFCLRLHSESQLLFAFEWRDPEIGLSGQLTWTRLPQGFKNSPTLFNEALHSDLADFRVRYPALVLLQYVDDLLLAAATRTECLEGTKALLETLGNKGYRASAKKAQICLQEVTYLGYSLKDGQRWLTKARKEAILSIPVPKNSRQVREFLGTAGYCRLWIPGFAELAAPLYPLTRPGTLFQWGTEQQLAFEDIKKALLSSPALGLPDITKPFELFIDENSGFAKGVLVQKLGPWKRPVAYLSKKLDTVASGWPPCLRMVAAIAILVKDAGKLTLGQPLTILTSHPVEALVRQPPNKWLSNARMTHYQAMLLDAERVHFGPTVSLNPATLLPLPSGGNHHDCLQILAETHGTRPDLTDQPLPDADLTWYTDGSSFIRNGEREAGAAVTTESEVIWAAPLPPGTSAQRAELIALTQALKMAEGKKLTVYTDSRYAFATTHVHGEIYRRRGWLTSEGKEIKNKNEILALLEALFLPKRLSIIHCPGHQKGDSPQAKGNRLADDTAKKAATETHSSLTVLPAGKRTADGSEFEKRTADGSEFESPKKKAKVE

SEQ ID NO: 1195 - protein, 2089 aa, synthetic construct
MPAAKRVKLDGGDKKYSIGLDIGTNSVGWAVITDEYKVPSKKFKVLGNTDRHSIKKNLIGALLFDSGETAEATRLKRTARRRYTRRKNRICYLQEIFSNEMAKVDDSFFHRLEESFLVEEDKKHERHPIFGNIVDEVAYHEKYPTIYHLRKKLVDSTDKADLRLIYLALAHMIKFRGHFLIEGDLNPDNSDVDKLFIQLVQTYNQLFEENPINASGVDAKAILSARLSKSRRLENLIAQLPGEKKNGLFGNLIALSLGLTPNFKSNFDLAEDAKLQLSKDTYDDDLDNLLAQIGDQYADLFLAAKNLSDAILLSDILRVNTEITKAPLSASMIKRYDEHHQDLTLLKALVRQQLPEKYKEIFFDQSKNGYAGYIDGGASQEEFYKFIKPILEKMDGTEELLVKLNREDLLRKQRTFDNGSIPHQIHLGELHAILRRQEDFYPFLKDNREKIEKILTFRIPYYVGPLARGNSRFAWMTRKSEETITPWNFEEVVDKGASAQSFIERMTNFDKNLPNEKVLPKHSLLYEYFTVYNELTKVKYVTEGMRKPAFLSGEQKKAIVDLLFKTNRKVTVKQLKEDYFKKIECFDSVEISGVEDRFNASLGTYHDLLKIIKDKDFLDNEENEDILEDIVLTLTLFEDREMIEERLKTYAHLFDDKVMKQLKRRRYTGWGRLSRKLINGIRDKQSGKTILDFLKSDGFANRNFMQLIHDDSLTFKEDIQKAQVSGQGDSLHEHIANLAGSPAIKKGILQTVKVVDELVKVMGRHKPENIVIEMARENQTTQKGQKNSRERMKRIEEGIKELGSQILKEHPVENTQLQNEKLYLYYLQNGRDMYVDQELDINRLSDYDVDHIVPQSFLKDDSIDNKVLTRSDKARGKSDNVPSEEVVKKMKNYWRQLLNAKLITQRKFDNLTKAERGGLSELDKAGFIKRQLVETRQITKHVAQILDSRMNTKYDENDKLIREVKVITLKSKLVSDFRKDFQFYKVREINNYHHAHDAYLNAVVGTALIKKYPKLESEFVYGDYKVYDVRKMIAKSEQEIGKATAKYFFYSNIMNFFKTEITLANGEIRKRPLIETNGETGEIVWDKGRDFATVRKVLSMPQVNIVKKTEVQTGGFSKESILPKRNSDKLIARKKDWDPKKYGGFDSPTVAYSVLVVAKVEKGKSKKLKSVKELLGITIMERSSFEKNPIDFLEAKGYKEVKKDLIIKLPKYSLFELENGRKRMLASAGELQKGNELALPSKYVNFLYLASHYEKLKGSPEDNEQKQLFVEQHKHYLDEIIEQISEFSKRVILADANLDKVLSAYNKHRDKPIREQAENIIHLFTLTNLGAPAAFKYFDTTIDRKRYTSTKEVLDATLIHQSITGLYETRIDLSQLGGDGGGGGGGGGTLQLEEEYRLFEPESTQKQEMDIWLKNFPQAWAETGGMGTAHCQAPVLIQLKATATPISIRQYPMPHEAYQGIKPHIRRMLDQGILKPCQSPWNTPLLPVKKPGTEDYRPVQDLREVNKRVEDIHPTVPNPYNLLSTLPPSHPWYTVLDLKDAFFCLRLHSESQLLFAFEWRDPEIGLSGQLTWTRLPQGFKNSPTLFNEALHSDLADFRVRYPALVLLQYVDDLLLAAATRTECLEGTKALLETLGNKGYRASAKKAQICLQEVTYLGYSLKDGQRWLTKARKEAILSIPVPKNSRQVREFLGTAGYCRLWIPGFAELAAPLYPLTRPGTLFQWGTEQQLAFEDIKKALLSSPALGLPDITKPFELFIDENSGFAKGVLVQKLGPWKRPVAYLSKKLDTVASGWPPCLRMVAAIAILVKDAGKLTLGQPLTILTSHPVEALVRQPPNKWLSNARMTHYQAMLLDAERVHFGPTVSLNPATLLPLPSGGNHHDCLQILAETHGTRPDLTDQPLPDADLTWYTDGSSFIRNGEREAGAAVTTESEVIWAAPLPPGTSAQRAELIALTQALKMAEGKKLTVYTDSRYAFATTHVHGEIYRRRGWLTSEGKEIKNKNEILALLEALFLPKRLSIIHCPGHQKGDSPQAKGNRLADDTAKKAATETHSSLTVLPAGKRTADGSEFEKRTADGSEFESPKKKAKVE

SEQ ID NO: 1196 - protein, 2093 aa, synthetic construct
MPAAKRVKLDGGDKKYSIGLDIGTNSVGWAVITDEYKVPSKKFKVLGNTDRHSIKKNLIGALLFDSGETAEATRLKRTARRRYTRRKNRICYLQEIFSNEMAKVDDSFFHRLEESFLVEEDKKHERHPIFGNIVDEVAYHEKYPTIYHLRKKLVDSTDKADLRLIYLALAHMIKFRGHFLIEGDLNPDNSDVDKLFIQLVQTYNQLFEENPINASGVDAKAILSARLSKSRRLENLIAQLPGEKKNGLFGNLIALSLGLTPNFKSNFDLAEDAKLQLSKDTYDDDLDNLLAQIGDQYADLFLAAKNLSDAILLSDILRVNTEITKAPLSASMIKRYDEHHQDLTLLKALVRQQLPEKYKEIFFDQSKNGYAGYIDGGASQEEFYKFIKPILEKMDGTEELLVKLNREDLLRKQRTFDNGSIPHQIHLGELHAILRRQEDFYPFLKDNREKIEKILTFRIPYYVGPLARGNSRFAWMTRKSEETITPWNFEEVVDKGASAQSFIERMTNFDKNLPNEKVLPKHSLLYEYFTVYNELTKVKYVTEGMRKPAFLSGEQKKAIVDLLFKTNRKVTVKQLKEDYFKKIECFDSVEISGVEDRFNASLGTYHDLLKIIKDKDFLDNEENEDILEDIVLTLTLFEDREMIEERLKTYAHLFDDKVMKQLKRRRYTGWGRLSRKLINGIRDKQSGKTILDFLKSDGFANRNFMQLIHDDSLTFKEDIQKAQVSGQGDSLHEHIANLAGSPAIKKGILQTVKVVDELVKVMGRHKPENIVIEMARENQTTQKGQKNSRERMKRIEEGIKELGSQILKEHPVENTQLQNEKLYLYYLQNGRDMYVDQELDINRLSDYDVDHIVPQSFLKDDSIDNKVLTRSDKARGKSDNVPSEEVVKKMKNYWRQLLNAKLITQRKFDNLTKAERGGLSELDKAGFIKRQLVETRQITKHVAQILDSRMNTKYDENDKLIREVKVITLKSKLVSDFRKDFQFYKVREINNYHHAHDAYLNAVVGTALIKKYPKLESEFVYGDYKVYDVRKMIAKSEQEIGKATAKYFFYSNIMNFFKTEITLANGEIRKRPLIETNGETGEIVWDKGRDFATVRKVLSMPQVNIVKKTEVQTGGFSKESILPKRNSDKLIARKKDWDPKKYGGFDSPTVAYSVLVVAKVEKGKSKKLKSVKELLGITIMERSSFEKNPIDFLEAKGYKEVKKDLIIKLPKYSLFELENGRKRMLASAGELQKGNELALPSKYVNFLYLASHYEKLKGSPEDNEQKQLFVEQHKHYLDEIIEQISEFSKRVILADANLDKVLSAYNKHRDKPIREQAENIIHLFTLTNLGAPAAFKYFDTTIDRKRYTSTKEVLDATLIHQSITGLYETRIDLSQLGGDGGPAPGGSGGGGGTLQLEEEYRLFEPESTQKQEMDIWLKNFPQAWAETGGMGTAHCQAPVLIQLKATATPISIRQYPMPHEAYQGIKPHIRRMLDQGILKPCQSPWNTPLLPVKKPGTEDYRPVQDLREVNKRVEDIHPTVPNPYNLLSTLPPSHPWYTVLDLKDAFFCLRLHSESQLLFAFEWRDPEIGLSGQLTWTRLPQGFKNSPTLFNEALHSDLADFRVRYPALVLLQYVDDLLLAAATRTECLEGTKALLETLGNKGYRASAKKAQICLQEVTYLGYSLKDGQRWLTKARKEAILSIPVPKNSRQVREFLGTAGYCRLWIPGFAELAAPLYPLTRPGTLFQWGTEQQLAFEDIKKALLSSPALGLPDITKPFELFIDENSGFAKGVLVQKLGPWKRPVAYLSKKLDTVASGWPPCLRMVAAIAILVKDAGKLTLGQPLTILTSHPVEALVRQPPNKWLSNARMTHYQAMLLDAERVHFGPTVSLNPATLLPLPSGGNHHDCLQILAETHGTRPDLTDQPLPDADLTWYTDGSSFIRNGEREAGAAVTTESEVIWAAPLPPGTSAQRAELIALTQALKMAEGKKLTVYTDSRYAFATTHVHGEIYRRRGWLTSEGKEIKNKNEILALLEALFLPKRLSIIHCPGHQKGDSPQAKGNRLADDTAKKAATETHSSLTVLPAGKRTADGSEFEKRTADGSEFESPKKKAKVE

SEQ ID NO: 1197 - protein, 2130 aa, synthetic construct
MPAAKRVKLDGGDKKYSIGLDIGTNSVGWAVITDEYKVPSKKFKVLGNTDRHSIKKNLIGALLFDSGETAEATRLKRTARRRYTRRKNRICYLQEIFSNEMAKVDDSFFHRLEESFLVEEDKKHERHPIFGNIVDEVAYHEKYPTIYHLRKKLVDSTDKADLRLIYLALAHMIKFRGHFLIEGDLNPDNSDVDKLFIQLVQTYNQLFEENPINASGVDAKAILSARLSKSRRLENLIAQLPGEKKNGLFGNLIALSLGLTPNFKSNFDLAEDAKLQLSKDTYDDDLDNLLAQIGDQYADLFLAAKNLSDAILLSDILRVNTEITKAPLSASMIKRYDEHHQDLTLLKALVRQQLPEKYKEIFFDQSKNGYAGYIDGGASQEEFYKFIKPILEKMDGTEELLVKLNREDLLRKQRTFDNGSIPHQIHLGELHAILRRQEDFYPFLKDNREKIEKILTFRIPYYVGPLARGNSRFAWMTRKSEETITPWNFEEVVDKGASAQSFIERMTNFDKNLPNEKVLPKHSLLYEYFTVYNELTKVKYVTEGMRKPAFLSGEQKKAIVDLLFKTNRKVTVKQLKEDYFKKIECFDSVEISGVEDRFNASLGTYHDLLKIIKDKDFLDNEENEDILEDIVLTLTLFEDREMIEERLKTYAHLFDDKVMKQLKRRRYTGWGRLSRKLINGIRDKQSGKTILDFLKSDGFANRNFMQLIHDDSLTFKEDIQKAQVSGQGDSLHEHIANLAGSPAIKKGILQTVKVVDELVKVMGRHKPENIVIEMARENQTTQKGQKNSRERMKRIEEGIKELGSQILKEHPVENTQLQNEKLYLYYLQNGRDMYVDQELDINRLSDYDVDHIVPQSFLKDDSIDNKVLTRSDKARGKSDNVPSEEVVKKMKNYWRQLLNAKLITQRKFDNLTKAERGGLSELDKAGFIKRQLVETRQITKHVAQILDSRMNTKYDENDKLIREVKVITLKSKLVSDFRKDFQFYKVREINNYHHAHDAYLNAVVGTALIKKYPKLESEFVYGDYKVYDVRKMIAKSEQEIGKATAKYFFYSNIMNFFKTEITLANGEIRKRPLIETNGETGEIVWDKGRDFATVRKVLSMPQVNIVKKTEVQTGGFSKESILPKRNSDKLIARKKDWDPKKYGGFDSPTVAYSVLVVAKVEKGKSKKLKSVKELLGITIMERSSFEKNPIDFLEAKGYKEVKKDLIIKLPKYSLFELENGRKRMLASAGELQKGNELALPSKYVNFLYLASHYEKLKGSPEDNEQKQLFVEQHKHYLDEIIEQISEFSKRVILADANLDKVLSAYNKHRDKPIREQAENIIHLFTLTNLGAPAAFKYFDTTIDRKRYTSTKEVLDATLIHQSITGLYETRIDLSQLGGDGGAEAAAKEAAAKEAAAKEAAAKALEAEAAAKEAAAKEAAAKEAAAKAGGTLQLEEEYRLFEPESTQKQEMDIWLKNFPQAWAETGGMGTAHCQAPVLIQLKATATPISIRQYPMPHEAYQGIKPHIRRMLDQGILKPCQSPWNTPLLPVKKPGTEDYRPVQDLREVNKRVEDIHPTVPNPYNLLSTLPPSHPWYTVLDLKDAFFCLRLHSESQLLFAFEWRDPEIGLSGQLTWTRLPQGFKNSPTLFNEALHSDLADFRVRYPALVLLQYVDDLLLAAATRTECLEGTKALLETLGNKGYRASAKKAQICLQEVTYLGYSLKDGQRWLTKARKEAILSIPVPKNSRQVREFLGKAGYCRLFIPGFAELAAPLYPLTRPGTLFQWGTEQQLAFEDIKKALLSSPALGLPDITKPFELFIDENSGFAKGVLVQKLGPWKRPVAYLSKKLDTVASGWPPCLRMVAAIAILVKDAGKLTLGQPLTILTSHPVEALVRQPPNKWLSNARMTHYQAMLLDAERVHFGPTVSLNPATLLPLPSGGNHHDCLQILAETHGTRPDLTDQPLPDADLTWYTDGSSFIRNGEREAGAAVTTESEVIWAAPLPPGTSAQRAELIALTQALKMAEGKKLTVYTDSRYAFATTHVHGEIYRRRGWLTSEGKEIKNKNEILALLEALFLPKRLSIIHCPGHQKGDSPQAKGNRLADDTAKKAATETHSSLTVLPAGKRTADGSEFEKRTADGSEFESPKKKAKVE

SEQ ID NO: 1198 - protein, 2104 aa, synthetic construct
MPAAKRVKLDGGDKKYSIGLDIGTNSVGWAVITDEYKVPSKKFKVLGNTDRHSIKKNLIGALLFDSGETAEATRLKRTARRRYTRRKNRICYLQEIFSNEMAKVDDSFFHRLEESFLVEEDKKHERHPIFGNIVDEVAYHEKYPTIYHLRKKLVDSTDKADLRLIYLALAHMIKFRGHFLIEGDLNPDNSDVDKLFIQLVQTYNQLFEENPINASGVDAKAILSARLSKSRRLENLIAQLPGEKKNGLFGNLIALSLGLTPNFKSNFDLAEDAKLQLSKDTYDDDLDNLLAQIGDQYADLFLAAKNLSDAILLSDILRVNTEITKAPLSASMIKRYDEHHQDLTLLKALVRQQLPEKYKEIFFDQSKNGYAGYIDGGASQEEFYKFIKPILEKMDGTEELLVKLNREDLLRKQRTFDNGSIPHQIHLGELHAILRRQEDFYPFLKDNREKIEKILTFRIPYYVGPLARGNSRFAWMTRKSEETITPWNFEEVVDKGASAQSFIERMTNFDKNLPNEKVLPKHSLLYEYFTVYNELTKVKYVTEGMRKPAFLSGEQKKAIVDLLFKTNRKVTVKQLKEDYFKKIECFDSVEISGVEDRFNASLGTYHDLLKIIKDKDFLDNEENEDILEDIVLTLTLFEDREMIEERLKTYAHLFDDKVMKQLKRRRYTGWGRLSRKLINGIRDKQSGKTILDFLKSDGFANRNFMQLIHDDSLTFKEDIQKAQVSGQGDSLHEHIANLAGSPAIKKGILQTVKVVDELVKVMGRHKPENIVIEMARENQTTQKGQKNSRERMKRIEEGIKELGSQILKEHPVENTQLQNEKLYLYYLQNGRDMYVDQELDINRLSDYDVDHIVPQSFLKDDSIDNKVLTRSDKARGKSDNVPSEEVVKKMKNYWRQLLNAKLITQRKFDNLTKAERGGLSELDKAGFIKRQLVETRQITKHVAQILDSRMNTKYDENDKLIREVKVITLKSKLVSDFRKDFQFYKVREINNYHHAHDAYLNAVVGTALIKKYPKLESEFVYGDYKVYDVRKMIAKSEQEIGKATAKYFFYSNIMNFFKTEITLANGEIRKRPLIETNGETGEIVWDKGRDFATVRKVLSMPQVNIVKKTEVQTGGFSKESILPKRNSDKLIARKKDWDPKKYGGFDSPTVAYSVLVVAKVEKGKSKKLKSVKELLGITIMERSSFEKNPIDFLEAKGYKEVKKDLIIKLPKYSLFELENGRKRMLASAGELQKGNELALPSKYVNFLYLASHYEKLKGSPEDNEQKQLFVEQHKHYLDEIIEQISEFSKRVILADANLDKVLSAYNKHRDKPIREQAENIIHLFTLTNLGAPAAFKYFDTTIDRKRYTSTKEVLDATLIHQSITGLYETRIDLSQLGGDGGEAAAKEAAAKEAAAKEAAAKGGTLQLEEEYRLFEPESTQKQEMDIWLKNFPQAWAETGGMGTAHCQAPVLIQLKATATPISIRQYPMPHEAYQGIKPHIRRMLDQGILKPCQSPWNTPLLPVKKPGTEDYRPVQDLREVNKRVEDIHPTVPNPYNLLSTLPPSHPWYTVLDLKDAFFCLRLHSESQLLFAFEWRDPEIGLSGQLTWTRLPQGFKNSPTLFNEALHSDLADFRVRYPALVLLQYVDDLLLAAATRTECLEGTKALLETLGNKGYRASAKKAQICLQEVTYLGYSLKDGQRWLTKARKEAILSIPVPKNSRQVREFLGKAGYCRLFIPGFAELAAPLYPLTRPGTLFQWGTEQQLAFEDIKKALLSSPALGLPDITKPFELFIDENSGFAKGVLVQKLGPWKRPVAYLSKKLDTVASGWPPCLRMVAAIAILVKDAGKLTLGQPLTILTSHPVEALVRQPPNKWLSNARMTHYQAMLLDAERVHFGPTVSLNPATLLPLPSGGNHHDCLQILAETHGTRPDLTDQPLPDADLTWYTDGSSFIRNGEREAGAAVTTESEVIWAAPLPPGTSAQRAELIALTQALKMAEGKKLTVYTDSRYAFATTHVHGEIYRRRGWLTSEGKEIKNKNEILALLEALFLPKRLSIIHCPGHQKGDSPQAKGNRLADDTAKKAATETHSSLTVLPAGKRTADGSEFEKRTADGSEFESPKKKAKVE

SEQ ID NO: 1199 - protein, 2114 aa, synthetic construct
MPAAKRVKLDGGDKKYSIGLDIGTNSVGWAVITDEYKVPSKKFKVLGNTDRHSIKKNLIGALLFDSGETAEATRLKRTARRRYTRRKNRICYLQEIFSNEMAKVDDSFFHRLEESFLVEEDKKHERHPIFGNIVDEVAYHEKYPTIYHLRKKLVDSTDKADLRLIYLALAHMIKFRGHFLIEGDLNPDNSDVDKLFIQLVQTYNQLFEENPINASGVDAKAILSARLSKSRRLENLIAQLPGEKKNGLFGNLIALSLGLTPNFKSNFDLAEDAKLQLSKDTYDDDLDNLLAQIGDQYADLFLAAKNLSDAILLSDILRVNTEITKAPLSASMIKRYDEHHQDLTLLKALVRQQLPEKYKEIFFDQSKNGYAGYIDGGASQEEFYKFIKPILEKMDGTEELLVKLNREDLLRKQRTFDNGSIPHQIHLGELHAILRRQEDFYPFLKDNREKIEKILTFRIPYYVGPLARGNSRFAWMTRKSEETITPWNFEEVVDKGASAQSFIERMTNFDKNLPNEKVLPKHSLLYEYFTVYNELTKVKYVTEGMRKPAFLSGEQKKAIVDLLFKTNRKVTVKQLKEDYFKKIECFDSVEISGVEDRFNASLGTYHDLLKIIKDKDFLDNEENEDILEDIVLTLTLFEDREMIEERLKTYAHLFDDKVMKQLKRRRYTGWGRLSRKLINGIRDKQSGKTILDFLKSDGFANRNFMQLIHDDSLTFKEDIQKAQVSGQGDSLHEHIANLAGSPAIKKGILQTVKVVDELVKVMGRHKPENIVIEMARENQTTQKGQKNSRERMKRIEEGIKELGSQILKEHPVENTQLQNEKLYLYYLQNGRDMYVDQELDINRLSDYDVDHIVPQSFLKDDSIDNKVLTRSDKARGKSDNVPSEEVVKKMKNYWRQLLNAKLITQRKFDNLTKAERGGLSELDKAGFIKRQLVETRQITKHVAQILDSRMNTKYDENDKLIREVKVITLKSKLVSDFRKDFQFYKVREINNYHHAHDAYLNAVVGTALIKKYPKLESEFVYGDYKVYDVRKMIAKSEQEIGKATAKYFFYSNIMNFFKTEITLANGEIRKRPLIETNGETGEIVWDKGRDFATVRKVLSMPQVNIVKKTEVQTGGFSKESILPKRNSDKLIARKKDWDPKKYGGFDSPTVAYSVLVVAKVEKGKSKKLKSVKELLGITIMERSSFEKNPIDFLEAKGYKEVKKDLIIKLPKYSLFELENGRKRMLASAGELQKGNELALPSKYVNFLYLASHYEKLKGSPEDNEQKQLFVEQHKHYLDEIIEQISEFSKRVILADANLDKVLSAYNKHRDKPIREQAENIIHLFTLTNLGAPAAFKYFDTTIDRKRYTSTKEVLDATLIHQSITGLYETRIDLSQLGGDGGEAAAKEAAAKEAAAKEAAAKEAAAKEAAAKGGTLQLEEEYRLFEPESTQKQEMDIWLKNFPQAWAETGGMGTAHCQAPVLIQLKATATPISIRQYPMPHEAYQGIKPHIRRMLDQGILKPCQSPWNTPLLPVKKPGTEDYRPVQDLREVNKRVEDIHPTVPNPYNLLSTLPPSHPWYTVLDLKDAFFCLRLHSESQLLFAFEWRDPEIGLSGQLTWTRLPQGFKNSPTLFNEALHSDLADFRVRYPALVLLQYVDDLLLAAATRTECLEGTKALLETLGNKGYRASAKKAQICLQEVTYLGYSLKDGQRWLTKARKEAILSIPVPKNSRQVREFLGKAGYCRLFIPGFAELAAPLYPLTRPGTLFQWGTEQQLAFEDIKKALLSSPALGLPDITKPFELFIDENSGFAKGVLVQKLGPWKRPVAYLSKKLDTVASGWPPCLRMVAAIAILVKDAGKLTLGQPLTILTSHPVEALVRQPPNKWLSNARMTHYQAMLLDAERVHFGPTVSLNPATLLPLPSGGNHHDCLQILAETHGTRPDLTDQPLPDADLTWYTDGSSFIRNGEREAGAAVTTESEVIWAAPLPPGTSAQRAELIALTQALKMAEGKKLTVYTDSRYAFATTHVHGEIYRRRGWLTSEGKEIKNKNEILALLEALFLPKRLSIIHCPGHQKGDSPQAKGNRLADDTAKKAATETHSSLTVLPAGKRTADGSEFEKRTADGSEFESPKKKAKVE

SEQ ID NO: 1200 - protein, 2095 aa, synthetic construct
MPAAKRVKLDGGDKKYSIGLDIGTNSVGWAVITDEYKVPSKKFKVLGNTDRHSIKKNLIGALLFDSGETAEATRLKRTARRRYTRRKNRICYLQEIFSNEMAKVDDSFFHRLEESFLVEEDKKHERHPIFGNIVDEVAYHEKYPTIYHLRKKLVDSTDKADLRLIYLALAHMIKFRGHFLIEGDLNPDNSDVDKLFIQLVQTYNQLFEENPINASGVDAKAILSARLSKSRRLENLIAQLPGEKKNGLFGNLIALSLGLTPNFKSNFDLAEDAKLQLSKDTYDDDLDNLLAQIGDQYADLFLAAKNLSDAILLSDILRVNTEITKAPLSASMIKRYDEHHQDLTLLKALVRQQLPEKYKEIFFDQSKNGYAGYIDGGASQEEFYKFIKPILEKMDGTEELLVKLNREDLLRKQRTFDNGSIPHQIHLGELHAILRRQEDFYPFLKDNREKIEKILTFRIPYYVGPLARGNSRFAWMTRKSEETITPWNFEEVVDKGASAQSFIERMTNFDKNLPNEKVLPKHSLLYEYFTVYNELTKVKYVTEGMRKPAFLSGEQKKAIVDLLFKTNRKVTVKQLKEDYFKKIECFDSVEISGVEDRFNASLGTYHDLLKIIKDKDFLDNEENEDILEDIVLTLTLFEDREMIEERLKTYAHLFDDKVMKQLKRRRYTGWGRLSRKLINGIRDKQSGKTILDFLKSDGFANRNFMQLIHDDSLTFKEDIQKAQVSGQGDSLHEHIANLAGSPAIKKGILQTVKVVDELVKVMGRHKPENIVIEMARENQTTQKGQKNSRERMKRIEEGIKELGSQILKEHPVENTQLQNEKLYLYYLQNGRDMYVDQELDINRLSDYDVDHIVPQSFLKDDSIDNKVLTRSDKARGKSDNVPSEEVVKKMKNYWRQLLNAKLITQRKFDNLTKAERGGLSELDKAGFIKRQLVETRQITKHVAQILDSRMNTKYDENDKLIREVKVITLKSKLVSDFRKDFQFYKVREINNYHHAHDAYLNAVVGTALIKKYPKLESEFVYGDYKVYDVRKMIAKSEQEIGKATAKYFFYSNIMNFFKTEITLANGEIRKRPLIETNGETGEIVWDKGRDFATVRKVLSMPQVNIVKKTEVQTGGFSKESILPKRNSDKLIARKKDWDPKKYGGFDSPTVAYSVLVVAKVEKGKSKKLKSVKELLGITIMERSSFEKNPIDFLEAKGYKEVKKDLIIKLPKYSLFELENGRKRMLASAGELQKGNELALPSKYVNFLYLASHYEKLKGSPEDNEQKQLFVEQHKHYLDEIIEQISEFSKRVILADANLDKVLSAYNKHRDKPIREQAENIIHLFTLTNLGAPAAFKYFDTTIDRKRYTSTKEVLDATLIHQSITGLYETRIDLSQLGGDGGPAPEAAAKGGGGGTLQLEEEYRLFEPESTQKQEMDIWLKNFPQAWAETGGMGTAHCQAPVLIQLKATATPISIRQYPMPHEAYQGIKPHIRRMLDQGILKPCQSPWNTPLLPVKKPGTEDYRPVQDLREVNKRVEDIHPTVPNPYNLLSTLPPSHPWYTVLDLKDAFFCLRLHSESQLLFAFEWRDPEIGLSGQLTWTRLPQGFKNSPTLFNEALHSDLADFRVRYPALVLLQYVDDLLLAAATRTECLEGTKALLETLGNKGYRASAKKAQICLQEVTYLGYSLKDGQRWLTKARKEAILSIPVPKNSRQVREFLGKAGYCRLFIPGFAELAAPLYPLTRPGTLFQWGTEQQLAFEDIKKALLSSPALGLPDITKPFELFIDENSGFAKGVLVQKLGPWKRPVAYLSKKLDTVASGWPPCLRMVAAIAILVKDAGKLTLGQPLTILTSHPVEALVRQPPNKWLSNARMTHYQAMLLDAERVHFGPTVSLNPATLLPLPSGGNHHDCLQILAETHGTRPDLTDQPLPDADLTWYTDGSSFIRNGEREAGAAVTTESEVIWAAPLPPGTSAQRAELIALTQALKMAEGKKLTVYTDSRYAFATTHVHGEIYRRRGWLTSEGKEIKNKNEILALLEALFLPKRLSIIHCPGHQKGDSPQAKGNRLADDTAKKAATETHSSLTVLPAGKRTADGSEFEKRTADGSEFESPKKKAKVE

SEQ ID NO: 1201 - protein, 2095 aa, synthetic construct
MPAAKRVKLDGGDKKYSIGLDIGTNSVGWAVITDEYKVPSKKFKVLGNTDRHSIKKNLIGALLFDSGETAEATRLKRTARRRYTRRKNRICYLQEIFSNEMAKVDDSFFHRLEESFLVEEDKKHERHPIFGNIVDEVAYHEKYPTIYHLRKKLVDSTDKADLRLIYLALAHMIKFRGHFLIEGDLNPDNSDVDKLFIQLVQTYNQLFEENPINASGVDAKAILSARLSKSRRLENLIAQLPGEKKNGLFGNLIALSLGLTPNFKSNFDLAEDAKLQLSKDTYDDDLDNLLAQIGDQYADLFLAAKNLSDAILLSDILRVNTEITKAPLSASMIKRYDEHHQDLTLLKALVRQQLPEKYKEIFFDQSKNGYAGYIDGGASQEEFYKFIKPILEKMDGTEELLVKLNREDLLRKQRTFDNGSIPHQIHLGELHAILRRQEDFYPFLKDNREKIEKILTFRIPYYVGPLARGNSRFAWMTRKSEETITPWNFEEVVDKGASAQSFIERMTNFDKNLPNEKVLPKHSLLYEYFTVYNELTKVKYVTEGMRKPAFLSGEQKKAIVDLLFKTNRKVTVKQLKEDYFKKIECFDSVEISGVEDRFNASLGTYHDLLKIIKDKDFLDNEENEDILEDIVLTLTLFEDREMIEERLKTYAHLFDDKVMKQLKRRRYTGWGRLSRKLINGIRDKQSGKTILDFLKSDGFANRNFMQLIHDDSLTFKEDIQKAQVSGQGDSLHEHIANLAGSPAIKKGILQTVKVVDELVKVMGRHKPENIVIEMARENQTTQKGQKNSRERMKRIEEGIKELGSQILKEHPVENTQLQNEKLYLYYLQNGRDMYVDQELDINRLSDYDVDHIVPQSFLKDDSIDNKVLTRSDKARGKSDNVPSEEVVKKMKNYWRQLLNAKLITQRKFDNLTKAERGGLSELDKAGFIKRQLVETRQITKHVAQILDSRMNTKYDENDKLIREVKVITLKSKLVSDFRKDFQFYKVREINNYHHAHDAYLNAVVGTALIKKYPKLESEFVYGDYKVYDVRKMIAKSEQEIGKATAKYFFYSNIMNFFKTEITLANGEIRKRPLIETNGETGEIVWDKGRDFATVRKVLSMPQVNIVKKTEVQTGGFSKESILPKRNSDKLIARKKDWDPKKYGGFDSPTVAYSVLVVAKVEKGKSKKLKSVKELLGITIMERSSFEKNPIDFLEAKGYKEVKKDLIIKLPKYSLFELENGRKRMLASAGELQKGNELALPSKYVNFLYLASHYEKLKGSPEDNEQKQLFVEQHKHYLDEIIEQISEFSKRVILADANLDKVLSAYNKHRDKPIREQAENIIHLFTLTNLGAPAAFKYFDTTIDRKRYTSTKEVLDATLIHQSITGLYETRIDLSQLGGDGGEAAAKGSSPAPGGTLQLEEEYRLFEPESTQKQEMDIWLKNFPQAWAETGGMGTAHCQAPVLIQLKATATPISIRQYPMPHEAYQGIKPHIRRMLDQGILKPCQSPWNTPLLPVKKPGTEDYRPVQDLREVNKRVEDIHPTVPNPYNLLSTLPPSHPWYTVLDLKDAFFCLRLHSESQLLFAFEWRDPEIGLSGQLTWTRLPQGFKNSPTLFNEALHSDLADFRVRYPALVLLQYVDDLLLAAATRTECLEGTKALLETLGNKGYRASAKKAQICLQEVTYLGYSLKDGQRWLTKARKEAILSIPVPKNSRQVREFLGKAGYCRLFIPGFAELAAPLYPLTRPGTLFQWGTEQQLAFEDIKKALLSSPALGLPDITKPFELFIDENSGFAKGVLVQKLGPWKRPVAYLSKKLDTVASGWPPCLRMVAAIAILVKDAGKLTLGQPLTILTSHPVEALVRQPPNKWLSNARMTHYQAMLLDAERVHFGPTVSLNPATLLPLPSGGNHHDCLQILAETHGTRPDLTDQPLPDADLTWYTDGSSFIRNGEREAGAAVTTESEVIWAAPLPPGTSAQRAELIALTQALKMAEGKKLTVYTDSRYAFATTHVHGEIYRRRGWLTSEGKEIKNKNEILALLEALFLPKRLSIIHCPGHQKGDSPQAKGNRLADDTAKKAATETHSSLTVLPAGKRTADGSEFEKRTADGSEFESPKKKAKVE

SEQ ID NO: 1202 - protein, 2109 aa, synthetic construct
MPAAKRVKLDGGDKKYSIGLDIGTNSVGWAVITDEYKVPSKKFKVLGNTDRHSIKKNLIGALLFDSGETAEATRLKRTARRRYTRRKNRICYLQEIFSNEMAKVDDSFFHRLEESFLVEEDKKHERHPIFGNIVDEVAYHEKYPTIYHLRKKLVDSTDKADLRLIYLALAHMIKFRGHFLIEGDLNPDNSDVDKLFIQLVQTYNQLFEENPINASGVDAKAILSARLSKSRRLENLIAQLPGEKKNGLFGNLIALSLGLTPNFKSNFDLAEDAKLQLSKDTYDDDLDNLLAQIGDQYADLFLAAKNLSDAILLSDILRVNTEITKAPLSASMIKRYDEHHQDLTLLKALVRQQLPEKYKEIFFDQSKNGYAGYIDGGASQEEFYKFIKPILEKMDGTEELLVKLNREDLLRKQRTFDNGSIPHQIHLGELHAILRRQEDFYPFLKDNREKIEKILTFRIPYYVGPLARGNSRFAWMTRKSEETITPWNFEEVVDKGASAQSFIERMTNFDKNLPNEKVLPKHSLLYEYFTVYNELTKVKYVTEGMRKPAFLSGEQKKAIVDLLFKTNRKVTVKQLKEDYFKKIECFDSVEISGVEDRFNASLGTYHDLLKIIKDKDFLDNEENEDILEDIVLTLTLFEDREMIEERLKTYAHLFDDKVMKQLKRRRYTGWGRLSRKLINGIRDKQSGKTILDFLKSDGFANRNFMQLIHDDSLTFKEDIQKAQVSGQGDSLHEHIANLAGSPAIKKGILQTVKVVDELVKVMGRHKPENIVIEMARENQTTQKGQKNSRERMKRIEEGIKELGSQILKEHPVENTQLQNEKLYLYYLQNGRDMYVDQELDINRLSDYDVDHIVPQSFLKDDSIDNKVLTRSDKARGKSDNVPSEEVVKKMKNYWRQLLNAKLITQRKFDNLTKAERGGLSELDKAGFIKRQLVETRQITKHVAQILDSRMNTKYDENDKLIREVKVITLKSKLVSDFRKDFQFYKVREINNYHHAHDAYLNAVVGTALIKKYPKLESEFVYGDYKVYDVRKMIAKSEQEIGKATAKYFFYSNIMNFFKTEITLANGEIRKRPLIETNGETGEIVWDKGRDFATVRKVLSMPQVNIVKKTEVQTGGFSKESILPKRNSDKLIARKKDWDPKKYGGFDSPTVAYSVLVVAKVEKGKSKKLKSVKELLGITIMERSSFEKNPIDFLEAKGYKEVKKDLIIKLPKYSLFELENGRKRMLASAGELQKGNELALPSKYVNFLYLASHYEKLKGSPEDNEQKQLFVEQHKHYLDEIIEQISEFSKRVILADANLDKVLSAYNKHRDKPIREQAENIIHLFTLTNLGAPAAFKYFDTTIDRKRYTSTKEVLDATLIHQSITGLYETRIDLSQLGGDGGGGGGSGGGGSGGGGSGGGGSGGGGSGGTLQLEEEYRLFEPESTQKQEMDIWLKNFPQAWAETGGMGTAHCQAPVLIQLKATATPISIRQYPMPHEAYQGIKPHIRRMLDQGILKPCQSPWNTPLLPVKKPGTEDYRPVQDLREVNKRVEDIHPTVPNPYNLLSTLPPSHPWYTVLDLKDAFFCLRLHSESQLLFAFEWRDPEIGLSGQLTWTRLPQGFKNSPTLFNEALHSDLADFRVRYPALVLLQYVDDLLLAAATRTECLEGTKALLETLGNKGYRASAKKAQICLQEVTYLGYSLKDGQRWLTKARKEAILSIPVPKNSRQVREFLGKAGYCRLFIPGFAELAAPLYPLTRPGTLFQWGTEQQLAFEDIKKALLSSPALGLPDITKPFELFIDENSGFAKGVLVQKLGPWKRPVAYLSKKLDTVASGWPPCLRMVAAIAILVKDAGKLTLGQPLTILTSHPVEALVRQPPNKWLSNARMTHYQAMLLDAERVHFGPTVSLNPATLLPLPSGGNHHDCLQILAETHGTRPDLTDQPLPDADLTWYTDGSSFIRNGEREAGAAVTTESEVIWAAPLPPGTSAQRAELIALTQALKMAEGKKLTVYTDSRYAFATTHVHGEIYRRRGWLTSEGKEIKNKNEILALLEALFLPKRLSIIHCPGHQKGDSPQAKGNRLADDTAKKAATETHSSLTVLPAGKRTADGSEFEKRTADGSEFESPKKKAKVE

SEQ ID NO: 1203 - protein, 2099 aa, synthetic construct
MPAAKRVKLDGGDKKYSIGLDIGTNSVGWAVITDEYKVPSKKFKVLGNTDRHSIKKNLIGALLFDSGETAEATRLKRTARRRYTRRKNRICYLQEIFSNEMAKVDDSFFHRLEESFLVEEDKKHERHPIFGNIVDEVAYHEKYPTIYHLRKKLVDSTDKADLRLIYLALAHMIKFRGHFLIEGDLNPDNSDVDKLFIQLVQTYNQLFEENPINASGVDAKAILSARLSKSRRLENLIAQLPGEKKNGLFGNLIALSLGLTPNFKSNFDLAEDAKLQLSKDTYDDDLDNLLAQIGDQYADLFLAAKNLSDAILLSDILRVNTEITKAPLSASMIKRYDEHHQDLTLLKALVRQQLPEKYKEIFFDQSKNGYAGYIDGGASQEEFYKFIKPILEKMDGTEELLVKLNREDLLRKQRTFDNGSIPHQIHLGELHAILRRQEDFYPFLKDNREKIEKILTFRIPYYVGPLARGNSRFAWMTRKSEETITPWNFEEVVDKGASAQSFIERMTNFDKNLPNEKVLPKHSLLYEYFTVYNELTKVKYVTEGMRKPAFLSGEQKKAIVDLLFKTNRKVTVKQLKEDYFKKIECFDSVEISGVEDRFNASLGTYHDLLKIIKDKDFLDNEENEDILEDIVLTLTLFEDREMIEERLKTYAHLFDDKVMKQLKRRRYTGWGRLSRKLINGIRDKQSGKTILDFLKSDGFANRNFMQLIHDDSLTFKEDIQKAQVSGQGDSLHEHIANLAGSPAIKKGILQTVKVVDELVKVMGRHKPENIVIEMARENQTTQKGQKNSRERMKRIEEGIKELGSQILKEHPVENTQLQNEKLYLYYLQNGRDMYVDQELDINRLSDYDVDHIVPQSFLKDDSIDNKVLTRSDKARGKSDNVPSEEVVKKMKNYWRQLLNAKLITQRKFDNLTKAERGGLSELDKAGFIKRQLVETRQITKHVAQILDSRMNTKYDENDKLIREVKVITLKSKLVSDFRKDFQFYKVREINNYHHAHDAYLNAVVGTALIKKYPKLESEFVYGDYKVYDVRKMIAKSEQEIGKATAKYFFYSNIMNFFKTEITLANGEIRKRPLIETNGETGEIVWDKGRDFATVRKVLSMPQVNIVKKTEVQTGGFSKESILPKRNSDKLIARKKDWDPKKYGGFDSPTVAYSVLVVAKVEKGKSKKLKSVKELLGITIMERSSFEKNPIDFLEAKGYKEVKKDLIIKLPKYSLFELENGRKRMLASAGELQKGNELALPSKYVNFLYLASHYEKLKGSPEDNEQKQLFVEQHKHYLDEIIEQISEFSKRVILADANLDKVLSAYNKHRDKPIREQAENIIHLFTLTNLGAPAAFKYFDTTIDRKRYTSTKEVLDATLIHQSITGLYETRIDLSQLGGDGGGGGGSEAAAKGGGGSGGTLQLEEEYRLFEPESTQKQEMDIWLKNFPQAWAETGGMGTAHCQAPVLIQLKATATPISIRQYPMPHEAYQGIKPHIRRMLDQGILKPCQSPWNTPLLPVKKPGTEDYRPVQDLREVNKRVEDIHPTVPNPYNLLSTLPPSHPWYTVLDLKDAFFCLRLHSESQLLFAFEWRDPEIGLSGQLTWTRLPQGFKNSPTLFNEALHSDLADFRVRYPALVLLQYVDDLLLAAATRTECLEGTKALLETLGNKGYRASAKKAQICLQEVTYLGYSLKDGQRWLTKARKEAILSIPVPKNSRQVREFLGKAGYCRLFIPGFAELAAPLYPLTRPGTLFQWGTEQQLAFEDIKKALLSSPALGLPDITKPFELFIDENSGFAKGVLVQKLGPWKRPVAYLSKKLDTVASGWPPCLRMVAAIAILVKDAGKLTLGQPLTILTSHPVEALVRQPPNKWLSNARMTHYQAMLLDAERVHFGPTVSLNPATLLPLPSGGNHHDCLQILAETHGTRPDLTDQPLPDADLTWYTDGSSFIRNGEREAGAAVTTESEVIWAAPLPPGTSAQRAELIALTQALKMAEGKKLTVYTDSRYAFATTHVHGEIYRRRGWLTSEGKEIKNKNEILALLEALFLPKRLSIIHCPGHQKGDSPQAKGNRLADDTAKKAATETHSSLTVLPAGKRTADGSEFEKRTADGSEFESPKKKAKVE

SEQ ID NO: 1204 - protein, 2092 aa, synthetic construct
MPAAKRVKLDGGDKKYSIGLDIGTNSVGWAVITDEYKVPSKKFKVLGNTDRHSIKKNLIGALLFDSGETAEATRLKRTARRRYTRRKNRICYLQEIFSNEMAKVDDSFFHRLEESFLVEEDKKHERHPIFGNIVDEVAYHEKYPTIYHLRKKLVDSTDKADLRLIYLALAHMIKFRGHFLIEGDLNPDNSDVDKLFIQLVQTYNQLFEENPINASGVDAKAILSARLSKSRRLENLIAQLPGEKKNGLFGNLIALSLGLTPNFKSNFDLAEDAKLQLSKDTYDDDLDNLLAQIGDQYADLFLAAKNLSDAILLSDILRVNTEITKAPLSASMIKRYDEHHQDLTLLKALVRQQLPEKYKEIFFDQSKNGYAGYIDGGASQEEFYKFIKPILEKMDGTEELLVKLNREDLLRKQRTFDNGSIPHQIHLGELHAILRRQEDFYPFLKDNREKIEKILTFRIPYYVGPLARGNSRFAWMTRKSEETITPWNFEEVVDKGASAQSFIERMTNFDKNLPNEKVLPKHSLLYEYFTVYNELTKVKYVTEGMRKPAFLSGEQKKAIVDLLFKTNRKVTVKQLKEDYFKKIECFDSVEISGVEDRFNASLGTYHDLLKIIKDKDFLDNEENEDILEDIVLTLTLFEDREMIEERLKTYAHLFDDKVMKQLKRRRYTGWGRLSRKLINGIRDKQSGKTILDFLKSDGFANRNFMQLIHDDSLTFKEDIQKAQVSGQGDSLHEHIANLAGSPAIKKGILQTVKVVDELVKVMGRHKPENIVIEMARENQTTQKGQKNSRERMKRIEEGIKELGSQILKEHPVENTQLQNEKLYLYYLQNGRDMYVDQELDINRLSDYDVDHIVPQSFLKDDSIDNKVLTRSDKARGKSDNVPSEEVVKKMKNYWRQLLNAKLITQRKFDNLTKAERGGLSELDKAGFIKRQLVETRQITKHVAQILDSRMNTKYDENDKLIREVKVITLKSKLVSDFRKDFQFYKVREINNYHHAHDAYLNAVVGTALIKKYPKLESEFVYGDYKVYDVRKMIAKSEQEIGKATAKYFFYSNIMNFFKTEITLANGEIRKRPLIETNGETGEIVWDKGRDFATVRKVLSMPQVNIVKKTEVQTGGFSKESILPKRNSDKLIARKKDWDPKKYGGFDSPTVAYSVLVVAKVEKGKSKKLKSVKELLGITIMERSSFEKNPIDFLEAKGYKEVKKDLIIKLPKYSLFELENGRKRMLASAGELQKGNELALPSKYVNFLYLASHYEKLKGSPEDNEQKQLFVEQHKHYLDEIIEQISEFSKRVILADANLDKVLSAYNKHRDKPIREQAENIIHLFTLTNLGAPAAFKYFDTTIDRKRYTSTKEVLDATLIHQSITGLYETRIDLSQLGGDGGGGSEAAAKGGTLQLEEEYRLFEPESTQKQEMDIWLKNFPQAWAETGGMGTAHCQAPVLIQLKATATPISIRQYPMPHEAYQGIKPHIRRMLDQGILKPCQSPWNTPLLPVKKPGTEDYRPVQDLREVNKRVEDIHPTVPNPYNLLSTLPPSHPWYTVLDLKDAFFCLRLHSESQLLFAFEWRDPEIGLSGQLTWTRLPQGFKNSPTLFNEALHSDLADFRVRYPALVLLQYVDDLLLAAATRTECLEGTKALLETLGNKGYRASAKKAQICLQEVTYLGYSLKDGQRWLTKARKEAILSIPVPKNSRQVREFLGKAGYCRLFIPGFAELAAPLYPLTRPGTLFQWGTEQQLAFEDIKKALLSSPALGLPDITKPFELFIDENSGFAKGVLVQKLGPWKRPVAYLSKKLDTVASGWPPCLRMVAAIAILVKDAGKLTLGQPLTILTSHPVEALVRQPPNKWLSNARMTHYQAMLLDAERVHFGPTVSLNPATLLPLPSGGNHHDCLQILAETHGTRPDLTDQPLPDADLTWYTDGSSFIRNGEREAGAAVTTESEVIWAAPLPPGTSAQRAELIALTQALKMAEGKKLTVYTDSRYAFATTHVHGEIYRRRGWLTSEGKEIKNKNEILALLEALFLPKRLSIIHCPGHQKGDSPQAKGNRLADDTAKKAATETHSSLTVLPAGKRTADGSEFEKRTADGSEFESPKKKAKVE

SEQ ID NO: 1205 - protein, 2100 aa, synthetic construct
MPAAKRVKLDGGDKKYSIGLDIGTNSVGWAVITDEYKVPSKKFKVLGNTDRHSIKKNLIGALLFDSGETAEATRLKRTARRRYTRRKNRICYLQEIFSNEMAKVDDSFFHRLEESFLVEEDKKHERHPIFGNIVDEVAYHEKYPTIYHLRKKLVDSTDKADLRLIYLALAHMIKFRGHFLIEGDLNPDNSDVDKLFIQLVQTYNQLFEENPINASGVDAKAILSARLSKSRRLENLIAQLPGEKKNGLFGNLIALSLGLTPNFKSNFDLAEDAKLQLSKDTYDDDLDNLLAQIGDQYADLFLAAKNLSDAILLSDILRVNTEITKAPLSASMIKRYDEHHQDLTLLKALVRQQLPEKYKEIFFDQSKNGYAGYIDGGASQEEFYKFIKPILEKMDGTEELLVKLNREDLLRKQRTFDNGSIPHQIHLGELHAILRRQEDFYPFLKDNREKIEKILTFRIPYYVGPLARGNSRFAWMTRKSEETITPWNFEEVVDKGASAQSFIERMTNFDKNLPNEKVLPKHSLLYEYFTVYNELTKVKYVTEGMRKPAFLSGEQKKAIVDLLFKTNRKVTVKQLKEDYFKKIECFDSVEISGVEDRFNASLGTYHDLLKIIKDKDFLDNEENEDILEDIVLTLTLFEDREMIEERLKTYAHLFDDKVMKQLKRRRYTGWGRLSRKLINGIRDKQSGKTILDFLKSDGFANRNFMQLIHDDSLTFKEDIQKAQVSGQGDSLHEHIANLAGSPAIKKGILQTVKVVDELVKVMGRHKPENIVIEMARENQTTQKGQKNSRERMKRIEEGIKELGSQILKEHPVENTQLQNEKLYLYYLQNGRDMYVDQELDINRLSDYDVDHIVPQSFLKDDSIDNKVLTRSDKARGKSDNVPSEEVVKKMKNYWRQLLNAKLITQRKFDNLTKAERGGLSELDKAGFIKRQLVETRQITKHVAQILDSRMNTKYDENDKLIREVKVITLKSKLVSDFRKDFQFYKVREINNYHHAHDAYLNAVVGTALIKKYPKLESEFVYGDYKVYDVRKMIAKSEQEIGKATAKYFFYSNIMNFFKTEITLANGEIRKRPLIETNGETGEIVWDKGRDFATVRKVLSMPQVNIVKKTEVQTGGFSKESILPKRNSDKLIARKKDWDPKKYGGFDSPTVAYSVLVVAKVEKGKSKKLKSVKELLGITIMERSSFEKNPIDFLEAKGYKEVKKDLIIKLPKYSLFELENGRKRMLASAGELQKGNELALPSKYVNFLYLASHYEKLKGSPEDNEQKQLFVEQHKHYLDEIIEQISEFSKRVILADANLDKVLSAYNKHRDKPIREQAENIIHLFTLTNLGAPAAFKYFDTTIDRKRYTSTKEVLDATLIHQSITGLYETRIDLSQLGGDGGSGSETPGTSESATPESGGTLQLEEEYRLFEPESTQKQEMDIWLKNFPQAWAETGGMGTAHCQAPVLIQLKATATPISIRQYPMPHEAYQGIKPHIRRMLDQGILKPCQSPWNTPLLPVKKPGTEDYRPVQDLREVNKRVEDIHPTVPNPYNLLSTLPPSHPWYTVLDLKDAFFCLRLHSESQLLFAFEWRDPEIGLSGQLTWTRLPQGFKNSPTLFNEALHSDLADFRVRYPALVLLQYVDDLLLAAATRTECLEGTKALLETLGNKGYRASAKKAQICLQEVTYLGYSLKDGQRWLTKARKEAILSIPVPKNSRQVREFLGKAGYCRLFIPGFAELAAPLYPLTRPGTLFQWGTEQQLAFEDIKKALLSSPALGLPDITKPFELFIDENSGFAKGVLVQKLGPWKRPVAYLSKKLDTVASGWPPCLRMVAAIAILVKDAGKLTLGQPLTILTSHPVEALVRQPPNKWLSNARMTHYQAMLLDAERVHFGPTVSLNPATLLPLPSGGNHHDCLQILAETHGTRPDLTDQPLPDADLTWYTDGSSFIRNGEREAGAAVTTESEVIWAAPLPPGTSAQRAELIALTQALKMAEGKKLTVYTDSRYAFATTHVHGEIYRRRGWLTSEGKEIKNKNEILALLEALFLPKRLSIIHCPGHQKGDSPQAKGNRLADDTAKKAATETHSSLTVLPAGKRTADGSEFEKRTADGSEFESPKKKAKVE

SEQ ID NO: 1206 - protein, 2094 aa, synthetic construct
MPAAKRVKLDGGDKKYSIGLDIGTNSVGWAVITDEYKVPSKKFKVLGNTDRHSIKKNLIGALLFDSGETAEATRLKRTARRRYTRRKNRICYLQEIFSNEMAKVDDSFFHRLEESFLVEEDKKHERHPIFGNIVDEVAYHEKYPTIYHLRKKLVDSTDKADLRLIYLALAHMIKFRGHFLIEGDLNPDNSDVDKLFIQLVQTYNQLFEENPINASGVDAKAILSARLSKSRRLENLIAQLPGEKKNGLFGNLIALSLGLTPNFKSNFDLAEDAKLQLSKDTYDDDLDNLLAQIGDQYADLFLAAKNLSDAILLSDILRVNTEITKAPLSASMIKRYDEHHQDLTLLKALVRQQLPEKYKEIFFDQSKNGYAGYIDGGASQEEFYKFIKPILEKMDGTEELLVKLNREDLLRKQRTFDNGSIPHQIHLGELHAILRRQEDFYPFLKDNREKIEKILTFRIPYYVGPLARGNSRFAWMTRKSEETITPWNFEEVVDKGASAQSFIERMTNFDKNLPNEKVLPKHSLLYEYFTVYNELTKVKYVTEGMRKPAFLSGEQKKAIVDLLFKTNRKVTVKQLKEDYFKKIECFDSVEISGVEDRFNASLGTYHDLLKIIKDKDFLDNEENEDILEDIVLTLTLFEDREMIEERLKTYAHLFDDKVMKQLKRRRYTGWGRLSRKLINGIRDKQSGKTILDFLKSDGFANRNFMQLIHDDSLTFKEDIQKAQVSGQGDSLHEHIANLAGSPAIKKGILQTVKVVDELVKVMGRHKPENIVIEMARENQTTQKGQKNSRERMKRIEEGIKELGSQILKEHPVENTQLQNEKLYLYYLQNGRDMYVDQELDINRLSDYDVDHIVPQSFLKDDSIDNKVLTRSDKARGKSDNVPSEEVVKKMKNYWRQLLNAKLITQRKFDNLTKAERGGLSELDKAGFIKRQLVETRQITKHVAQILDSRMNTKYDENDKLIREVKVITLKSKLVSDFRKDFQFYKVREINNYHHAHDAYLNAVVGTALIKKYPKLESEFVYGDYKVYDVRKMIAKSEQEIGKATAKYFFYSNIMNFFKTEITLANGEIRKRPLIETNGETGEIVWDKGRDFATVRKVLSMPQVNIVKKTEVQTGGFSKESILPKRNSDKLIARKKDWDPKKYGGFDSPTVAYSVLVVAKVEKGKSKKLKSVKELLGITIMERSSFEKNPIDFLEAKGYKEVKKDLIIKLPKYSLFELENGRKRMLASAGELQKGNELALPSKYVNFLYLASHYEKLKGSPEDNEQKQLFVEQHKHYLDEIIEQISEFSKRVILADANLDKVLSAYNKHRDKPIREQAENIIHLFTLTNLGAPAAFKYFDTTIDRKRYTSTKEVLDATLIHQSITGLYETRIDLSQLGGDGGEAAAKEAAAKGGTLQLEEEYRLFEPESTQKQEMDIWLKNFPQAWAETGGMGTAHCQAPVLIQLKATATPISIRQYPMPHEAYQGIKPHIRRMLDQGILKPCQSPWNTPLLPVKKPGTEDYRPVQDLREVNKRVEDIHPTVPNPYNLLSTLPPSHPWYTVLDLKDAFFCLRLHSESQLLFAFEWRDPEIGLSGQLTWTRLPQGFKNSPTLFNEALHSDLADFRVRYPALVLLQYVDDLLLAAATRTECLEGTKALLETLGNKGYRASAKKAQICLQEVTYLGYSLKDGQRWLTKARKEAILSIPVPKNSRQVREFLGKAGYCRLFIPGFAELAAPLYPLTRPGTLFQWGTEQQLAFEDIKKALLSSPALGLPDITKPFELFIDENSGFAKGVLVQKLGPWKRPVAYLSKKLDTVASGWPPCLRMVAAIAILVKDAGKLTLGQPLTILTSHPVEALVRQPPNKWLSNARMTHYQAMLLDAERVHFGPTVSLNPATLLPLPSGGNHHDCLQILAETHGTRPDLTDQPLPDADLTWYTDGSSFIRNGEREAGAAVTTESEVIWAAPLPPGTSAQRAELIALTQALKMAEGKKLTVYTDSRYAFATTHVHGEIYRRRGWLTSEGKEIKNKNEILALLEALFLPKRLSIIHCPGHQKGDSPQAKGNRLADDTAKKAATETHSSLTVLPAGKRTADGSEFEKRTADGSEFESPKKKAKVE

SEQ ID NO: 1207 - protein, 2096 aa, synthetic construct
MPAAKRVKLDGGDKKYSIGLDIGTNSVGWAVITDEYKVPSKKFKVLGNTDRHSIKKNLIGALLFDSGETAEATRLKRTARRRYTRRKNRICYLQEIFSNEMAKVDDSFFHRLEESFLVEEDKKHERHPIFGNIVDEVAYHEKYPTIYHLRKKLVDSTDKADLRLIYLALAHMIKFRGHFLIEGDLNPDNSDVDKLFIQLVQTYNQLFEENPINASGVDAKAILSARLSKSRRLENLIAQLPGEKKNGLFGNLIALSLGLTPNFKSNFDLAEDAKLQLSKDTYDDDLDNLLAQIGDQYADLFLAAKNLSDAILLSDILRVNTEITKAPLSASMIKRYDEHHQDLTLLKALVRQQLPEKYKEIFFDQSKNGYAGYIDGGASQEEFYKFIKPILEKMDGTEELLVKLNREDLLRKQRTFDNGSIPHQIHLGELHAILRRQEDFYPFLKDNREKIEKILTFRIPYYVGPLARGNSRFAWMTRKSEETITPWNFEEVVDKGASAQSFIERMTNFDKNLPNEKVLPKHSLLYEYFTVYNELTKVKYVTEGMRKPAFLSGEQKKAIVDLLFKTNRKVTVKQLKEDYFKKIECFDSVEISGVEDRFNASLGTYHDLLKIIKDKDFLDNEENEDILEDIVLTLTLFEDREMIEERLKTYAHLFDDKVMKQLKRRRYTGWGRLSRKLINGIRDKQSGKTILDFLKSDGFANRNFMQLIHDDSLTFKEDIQKAQVSGQGDSLHEHIANLAGSPAIKKGILQTVKVVDELVKVMGRHKPENIVIEMARENQTTQKGQKNSRERMKRIEEGIKELGSQILKEHPVENTQLQNEKLYLYYLQNGRDMYVDQELDINRLSDYDVDHIVPQSFLKDDSIDNKVLTRSDKARGKSDNVPSEEVVKKMKNYWRQLLNAKLITQRKFDNLTKAERGGLSELDKAGFIKRQLVETRQITKHVAQILDSRMNTKYDENDKLIREVKVITLKSKLVSDFRKDFQFYKVREINNYHHAHDAYLNAVVGTALIKKYPKLESEFVYGDYKVYDVRKMIAKSEQEIGKATAKYFFYSNIMNFFKTEITLANGEIRKRPLIETNGETGEIVWDKGRDFATVRKVLSMPQVNIVKKTEVQTGGFSKESILPKRNSDKLIARKKDWDPKKYGGFDSPTVAYSVLVVAKVEKGKSKKLKSVKELLGITIMERSSFEKNPIDFLEAKGYKEVKKDLIIKLPKYSLFELENGRKRMLASAGELQKGNELALPSKYVNFLYLASHYEKLKGSPEDNEQKQLFVEQHKHYLDEIIEQISEFSKRVILADANLDKVLSAYNKHRDKPIREQAENIIHLFTLTNLGAPAAFKYFDTTIDRKRYTSTKEVLDATLIHQSITGLYETRIDLSQLGGDGGGGSGGSGGSGGSGGTLQLEEEYRLFEPESTQKQEMDIWLKNFPQAWAETGGMGTAHCQAPVLIQLKATATPISIRQYPMPHEAYQGIKPHIRRMLDQGILKPCQSPWNTPLLPVKKPGTEDYRPVQDLREVNKRVEDIHPTVPNPYNLLSTLPPSHPWYTVLDLKDAFFCLRLHSESQLLFAFEWRDPEIGLSGQLTWTRLPQGFKNSPTLFNEALHSDLADFRVRYPALVLLQYVDDLLLAAATRTECLEGTKALLETLGNKGYRASAKKAQICLQEVTYLGYSLKDGQRWLTKARKEAILSIPVPKNSRQVREFLGKAGYCRLFIPGFAELAAPLYPLTRPGTLFQWGTEQQLAFEDIKKALLSSPALGLPDITKPFELFIDENSGFAKGVLVQKLGPWKRPVAYLSKKLDTVASGWPPCLRMVAAIAILVKDAGKLTLGQPLTILTSHPVEALVRQPPNKWLSNARMTHYQAMLLDAERVHFGPTVSLNPATLLPLPSGGNHHDCLQILAETHGTRPDLTDQPLPDADLTWYTDGSSFIRNGEREAGAAVTTESEVIWAAPLPPGTSAQRAELIALTQALKMAEGKKLTVYTDSRYAFATTHVHGEIYRRRGWLTSEGKEIKNKNEILALLEALFLPKRLSIIHCPGHQKGDSPQAKGNRLADDTAKKAATETHSSLTVLPAGKRTADGSEFEKRTADGSEFESPKKKAKVE

SEQ ID NO: 1208 - protein, 2095 aa, synthetic construct
MPAAKRVKLDGGDKKYSIGLDIGTNSVGWAVITDEYKVPSKKFKVLGNTDRHSIKKNLIGALLFDSGETAEATRLKRTARRRYTRRKNRICYLQEIFSNEMAKVDDSFFHRLEESFLVEEDKKHERHPIFGNIVDEVAYHEKYPTIYHLRKKLVDSTDKADLRLIYLALAHMIKFRGHFLIEGDLNPDNSDVDKLFIQLVQTYNQLFEENPINASGVDAKAILSARLSKSRRLENLIAQLPGEKKNGLFGNLIALSLGLTPNFKSNFDLAEDAKLQLSKDTYDDDLDNLLAQIGDQYADLFLAAKNLSDAILLSDILRVNTEITKAPLSASMIKRYDEHHQDLTLLKALVRQQLPEKYKEIFFDQSKNGYAGYIDGGASQEEFYKFIKPILEKMDGTEELLVKLNREDLLRKQRTFDNGSIPHQIHLGELHAILRRQEDFYPFLKDNREKIEKILTFRIPYYVGPLARGNSRFAWMTRKSEETITPWNFEEVVDKGASAQSFIERMTNFDKNLPNEKVLPKHSLLYEYFTVYNELTKVKYVTEGMRKPAFLSGEQKKAIVDLLFKTNRKVTVKQLKEDYFKKIECFDSVEISGVEDRFNASLGTYHDLLKIIKDKDFLDNEENEDILEDIVLTLTLFEDREMIEERLKTYAHLFDDKVMKQLKRRRYTGWGRLSRKLINGIRDKQSGKTILDFLKSDGFANRNFMQLIHDDSLTFKEDIQKAQVSGQGDSLHEHIANLAGSPAIKKGILQTVKVVDELVKVMGRHKPENIVIEMARENQTTQKGQKNSRERMKRIEEGIKELGSQILKEHPVENTQLQNEKLYLYYLQNGRDMYVDQELDINRLSDYDVDHIVPQSFLKDDSIDNKVLTRSDKARGKSDNVPSEEVVKKMKNYWRQLLNAKLITQRKFDNLTKAERGGLSELDKAGFIKRQLVETRQITKHVAQILDSRMNTKYDENDKLIREVKVITLKSKLVSDFRKDFQFYKVREINNYHHAHDAYLNAVVGTALIKKYPKLESEFVYGDYKVYDVRKMIAKSEQEIGKATAKYFFYSNIMNFFKTEITLANGEIRKRPLIETNGETGEIVWDKGRDFATVRKVLSMPQVNIVKKTEVQTGGFSKESILPKRNSDKLIARKKDWDPKKYGGFDSPTVAYSVLVVAKVEKGKSKKLKSVKELLGITIMERSSFEKNPIDFLEAKGYKEVKKDLIIKLPKYSLFELENGRKRMLASAGELQKGNELALPSKYVNFLYLASHYEKLKGSPEDNEQKQLFVEQHKHYLDEIIEQISEFSKRVILADANLDKVLSAYNKHRDKPIREQAENIIHLFTLTNLGAPAAFKYFDTTIDRKRYTSTKEVLDATLIHQSITGLYETRIDLSQLGGDGGPAPEAAAKGSSGGTLQLEEEYRLFEPESTQKQEMDIWLKNFPQAWAETGGMGTAHCQAPVLIQLKATATPISIRQYPMPHEAYQGIKPHIRRMLDQGILKPCQSPWNTPLLPVKKPGTEDYRPVQDLREVNKRVEDIHPTVPNPYNLLSTLPPSHPWYTVLDLKDAFFCLRLHSESQLLFAFEWRDPEIGLSGQLTWTRLPQGFKNSPTLFNEALHSDLADFRVRYPALVLLQYVDDLLLAAATRTECLEGTKALLETLGNKGYRASAKKAQICLQEVTYLGYSLKDGQRWLTKARKEAILSIPVPKNSRQVREFLGKAGYCRLFIPGFAELAAPLYPLTRPGTLFQWGTEQQLAFEDIKKALLSSPALGLPDITKPFELFIDENSGFAKGVLVQKLGPWKRPVAYLSKKLDTVASGWPPCLRMVAAIAILVKDAGKLTLGQPLTILTSHPVEALVRQPPNKWLSNARMTHYQAMLLDAERVHFGPTVSLNPATLLPLPSGGNHHDCLQILAETHGTRPDLTDQPLPDADLTWYTDGSSFIRNGEREAGAAVTTESEVIWAAPLPPGTSAQRAELIALTQALKMAEGKKLTVYTDSRYAFATTHVHGEIYRRRGWLTSEGKEIKNKNEILALLEALFLPKRLSIIHCPGHQKGDSPQAKGNRLADDTAKKAATETHSSLTVLPAGKRTADGSEFEKRTADGSEFESPKKKAKVE

SEQ ID NO: 1209 - protein, 2114 aa, synthetic construct
MPAAKRVKLDGGDKKYSIGLDIGTNSVGWAVITDEYKVPSKKFKVLGNTDRHSIKKNLIGALLFDSGETAEATRLKRTARRRYTRRKNRICYLQEIFSNEMAKVDDSFFHRLEESFLVEEDKKHERHPIFGNIVDEVAYHEKYPTIYHLRKKLVDSTDKADLRLIYLALAHMIKFRGHFLIEGDLNPDNSDVDKLFIQLVQTYNQLFEENPINASGVDAKAILSARLSKSRRLENLIAQLPGEKKNGLFGNLIALSLGLTPNFKSNFDLAEDAKLQLSKDTYDDDLDNLLAQIGDQYADLFLAAKNLSDAILLSDILRVNTEITKAPLSASMIKRYDEHHQDLTLLKALVRQQLPEKYKEIFFDQSKNGYAGYIDGGASQEEFYKFIKPILEKMDGTEELLVKLNREDLLRKQRTFDNGSIPHQIHLGELHAILRRQEDFYPFLKDNREKIEKILTFRIPYYVGPLARGNSRFAWMTRKSEETITPWNFEEVVDKGASAQSFIERMTNFDKNLPNEKVLPKHSLLYEYFTVYNELTKVKYVTEGMRKPAFLSGEQKKAIVDLLFKTNRKVTVKQLKEDYFKKIECFDSVEISGVEDRFNASLGTYHDLLKIIKDKDFLDNEENEDILEDIVLTLTLFEDREMIEERLKTYAHLFDDKVMKQLKRRRYTGWGRLSRKLINGIRDKQSGKTILDFLKSDGFANRNFMQLIHDDSLTFKEDIQKAQVSGQGDSLHEHIANLAGSPAIKKGILQTVKVVDELVKVMGRHKPENIVIEMARENQTTQKGQKNSRERMKRIEEGIKELGSQILKEHPVENTQLQNEKLYLYYLQNGRDMYVDQELDINRLSDYDVDHIVPQSFLKDDSIDNKVLTRSDKARGKSDNVPSEEVVKKMKNYWRQLLNAKLITQRKFDNLTKAERGGLSELDKAGFIKRQLVETRQITKHVAQILDSRMNTKYDENDKLIREVKVITLKSKLVSDFRKDFQFYKVREINNYHHAHDAYLNAVVGTALIKKYPKLESEFVYGDYKVYDVRKMIAKSEQEIGKATAKYFFYSNIMNFFKTEITLANGEIRKRPLIETNGETGEIVWDKGRDFATVRKVLSMPQVNIVKKTEVQTGGFSKESILPKRNSDKLIARKKDWDPKKYGGFDSPTVAYSVLVVAKVEKGKSKKLKSVKELLGITIMERSSFEKNPIDFLEAKGYKEVKKDLIIKLPKYSLFELENGRKRMLASAGELQKGNELALPSKYVNFLYLASHYEKLKGSPEDNEQKQLFVEQHKHYLDEIIEQISEFSKRVILADANLDKVLSAYNKHRDKPIREQAENIIHLFTLTNLGAPAAFKYFDTTIDRKRYTSTKEVLDATLIHQSITGLYETRIDLSQLGGDGGGGGGSGGGGSGGGGSGGGGSGGGGSGGGGSGGTLQLEEEYRLFEPESTQKQEMDIWLKNFPQAWAETGGMGTAHCQAPVLIQLKATATPISIRQYPMPHEAYQGIKPHIRRMLDQGILKPCQSPWNTPLLPVKKPGTEDYRPVQDLREVNKRVEDIHPTVPNPYNLLSTLPPSHPWYTVLDLKDAFFCLRLHSESQLLFAFEWRDPEIGLSGQLTWTRLPQGFKNSPTLFNEALHSDLADFRVRYPALVLLQYVDDLLLAAATRTECLEGTKALLETLGNKGYRASAKKAQICLQEVTYLGYSLKDGQRWLTKARKEAILSIPVPKNSRQVREFLGKAGYCRLFIPGFAELAAPLYPLTRPGTLFQWGTEQQLAFEDIKKALLSSPALGLPDITKPFELFIDENSGFAKGVLVQKLGPWKRPVAYLSKKLDTVASGWPPCLRMVAAIAILVKDAGKLTLGQPLTILTSHPVEALVRQPPNKWLSNARMTHYQAMLLDAERVHFGPTVSLNPATLLPLPSGGNHHDCLQILAETHGTRPDLTDQPLPDADLTWYTDGSSFIRNGEREAGAAVTTESEVIWAAPLPPGTSAQRAELIALTQALKMAEGKKLTVYTDSRYAFATTHVHGEIYRRRGWLTSEGKEIKNKNEILALLEALFLPKRLSIIHCPGHQKGDSPQAKGNRLADDTAKKAATETHSSLTVLPAGKRTADGSEFEKRTADGSEFESPKKKAKVE

SEQ ID NO: 1210 - protein, 2095 aa, synthetic construct
MPAAKRVKLDGGDKKYSIGLDIGTNSVGWAVITDEYKVPSKKFKVLGNTDRHSIKKNLIGALLFDSGETAEATRLKRTARRRYTRRKNRICYLQEIFSNEMAKVDDSFFHRLEESFLVEEDKKHERHPIFGNIVDEVAYHEKYPTIYHLRKKLVDSTDKADLRLIYLALAHMIKFRGHFLIEGDLNPDNSDVDKLFIQLVQTYNQLFEENPINASGVDAKAILSARLSKSRRLENLIAQLPGEKKNGLFGNLIALSLGLTPNFKSNFDLAEDAKLQLSKDTYDDDLDNLLAQIGDQYADLFLAAKNLSDAILLSDILRVNTEITKAPLSASMIKRYDEHHQDLTLLKALVRQQLPEKYKEIFFDQSKNGYAGYIDGGASQEEFYKFIKPILEKMDGTEELLVKLNREDLLRKQRTFDNGSIPHQIHLGELHAILRRQEDFYPFLKDNREKIEKILTFRIPYYVGPLARGNSRFAWMTRKSEETITPWNFEEVVDKGASAQSFIERMTNFDKNLPNEKVLPKHSLLYEYFTVYNELTKVKYVTEGMRKPAFLSGEQKKAIVDLLFKTNRKVTVKQLKEDYFKKIECFDSVEISGVEDRFNASLGTYHDLLKIIKDKDFLDNEENEDILEDIVLTLTLFEDREMIEERLKTYAHLFDDKVMKQLKRRRYTGWGRLSRKLINGIRDKQSGKTILDFLKSDGFANRNFMQLIHDDSLTFKEDIQKAQVSGQGDSLHEHIANLAGSPAIKKGILQTVKVVDELVKVMGRHKPENIVIEMARENQTTQKGQKNSRERMKRIEEGIKELGSQILKEHPVENTQLQNEKLYLYYLQNGRDMYVDQELDINRLSDYDVDHIVPQSFLKDDSIDNKVLTRSDKARGKSDNVPSEEVVKKMKNYWRQLLNAKLITQRKFDNLTKAERGGLSELDKAGFIKRQLVETRQITKHVAQILDSRMNTKYDENDKLIREVKVITLKSKLVSDFRKDFQFYKVREINNYHHAHDAYLNAVVGTALIKKYPKLESEFVYGDYKVYDVRKMIAKSEQEIGKATAKYFFYSNIMNFFKTEITLANGEIRKRPLIETNGETGEIVWDKGRDFATVRKVLSMPQVNIVKKTEVQTGGFSKESILPKRNSDKLIARKKDWDPKKYGGFDSPTVAYSVLVVAKVEKGKSKKLKSVKELLGITIMERSSFEKNPIDFLEAKGYKEVKKDLIIKLPKYSLFELENGRKRMLASAGELQKGNELALPSKYVNFLYLASHYEKLKGSPEDNEQKQLFVEQHKHYLDEIIEQISEFSKRVILADANLDKVLSAYNKHRDKPIREQAENIIHLFTLTNLGAPAAFKYFDTTIDRKRYTSTKEVLDATLIHQSITGLYETRIDLSQLGGDGGEAAAKGSSGGGGGTLQLEEEYRLFEPESTQKQEMDIWLKNFPQAWAETGGMGTAHCQAPVLIQLKATATPISIRQYPMPHEAYQGIKPHIRRMLDQGILKPCQSPWNTPLLPVKKPGTEDYRPVQDLREVNKRVEDIHPTVPNPYNLLSTLPPSHPWYTVLDLKDAFFCLRLHSESQLLFAFEWRDPEIGLSGQLTWTRLPQGFKNSPTLFNEALHSDLADFRVRYPALVLLQYVDDLLLAAATRTECLEGTKALLETLGNKGYRASAKKAQICLQEVTYLGYSLKDGQRWLTKARKEAILSIPVPKNSRQVREFLGKAGYCRLFIPGFAELAAPLYPLTRPGTLFQWGTEQQLAFEDIKKALLSSPALGLPDITKPFELFIDENSGFAKGVLVQKLGPWKRPVAYLSKKLDTVASGWPPCLRMVAAIAILVKDAGKLTLGQPLTILTSHPVEALVRQPPNKWLSNARMTHYQAMLLDAERVHFGPTVSLNPATLLPLPSGGNHHDCLQILAETHGTRPDLTDQPLPDADLTWYTDGSSFIRNGEREAGAAVTTESEVIWAAPLPPGTSAQRAELIALTQALKMAEGKKLTVYTDSRYAFATTHVHGEIYRRRGWLTSEGKEIKNKNEILALLEALFLPKRLSIIHCPGHQKGDSPQAKGNRLADDTAKKAATETHSSLTVLPAGKRTADGSEFEKRTADGSEFESPKKKAKVE

SEQ ID NO: 1211 - protein, 2090 aa, synthetic construct
MPAAKRVKLDGGDKKYSIGLDIGTNSVGWAVITDEYKVPSKKFKVLGNTDRHSIKKNLIGALLFDSGETAEATRLKRTARRRYTRRKNRICYLQEIFSNEMAKVDDSFFHRLEESFLVEEDKKHERHPIFGNIVDEVAYHEKYPTIYHLRKKLVDSTDKADLRLIYLALAHMIKFRGHFLIEGDLNPDNSDVDKLFIQLVQTYNQLFEENPINASGVDAKAILSARLSKSRRLENLIAQLPGEKKNGLFGNLIALSLGLTPNFKSNFDLAEDAKLQLSKDTYDDDLDNLLAQIGDQYADLFLAAKNLSDAILLSDILRVNTEITKAPLSASMIKRYDEHHQDLTLLKALVRQQLPEKYKEIFFDQSKNGYAGYIDGGASQEEFYKFIKPILEKMDGTEELLVKLNREDLLRKQRTFDNGSIPHQIHLGELHAILRRQEDFYPFLKDNREKIEKILTFRIPYYVGPLARGNSRFAWMTRKSEETITPWNFEEVVDKGASAQSFIERMTNFDKNLPNEKVLPKHSLLYEYFTVYNELTKVKYVTEGMRKPAFLSGEQKKAIVDLLFKTNRKVTVKQLKEDYFKKIECFDSVEISGVEDRFNASLGTYHDLLKIIKDKDFLDNEENEDILEDIVLTLTLFEDREMIEERLKTYAHLFDDKVMKQLKRRRYTGWGRLSRKLINGIRDKQSGKTILDFLKSDGFANRNFMQLIHDDSLTFKEDIQKAQVSGQGDSLHEHIANLAGSPAIKKGILQTVKVVDELVKVMGRHKPENIVIEMARENQTTQKGQKNSRERMKRIEEGIKELGSQILKEHPVENTQLQNEKLYLYYLQNGRDMYVDQELDINRLSDYDVDHIVPQSFLKDDSIDNKVLTRSDKARGKSDNVPSEEVVKKMKNYWRQLLNAKLITQRKFDNLTKAERGGLSELDKAGFIKRQLVETRQITKHVAQILDSRMNTKYDENDKLIREVKVITLKSKLVSDFRKDFQFYKVREINNYHHAHDAYLNAVVGTALIKKYPKLESEFVYGDYKVYDVRKMIAKSEQEIGKATAKYFFYSNIMNFFKTEITLANGEIRKRPLIETNGETGEIVWDKGRDFATVRKVLSMPQVNIVKKTEVQTGGFSKESILPKRNSDKLIARKKDWDPKKYGGFDSPTVAYSVLVVAKVEKGKSKKLKSVKELLGITIMERSSFEKNPIDFLEAKGYKEVKKDLIIKLPKYSLFELENGRKRMLASAGELQKGNELALPSKYVNFLYLASHYEKLKGSPEDNEQKQLFVEQHKHYLDEIIEQISEFSKRVILADANLDKVLSAYNKHRDKPIREQAENIIHLFTLTNLGAPAAFKYFDTTIDRKRYTSTKEVLDATLIHQSITGLYETRIDLSQLGGDGGGGGGGGGGTLQLEEEYRLFEPESTQKQEMDIWLKNFPQAWAETGGMGTAHCQAPVLIQLKATATPISIRQYPMPHEAYQGIKPHIRRMLDQGILKPCQSPWNTPLLPVKKPGTEDYRPVQDLREVNKRVEDIHPTVPNPYNLLSTLPPSHPWYTVLDLKDAFFCLRLHSESQLLFAFEWRDPEIGLSGQLTWTRLPQGFKNSPTLFNEALHSDLADFRVRYPALVLLQYVDDLLLAAATRTECLEGTKALLETLGNKGYRASAKKAQICLQEVTYLGYSLKDGQRWLTKARKEAILSIPVPKNSRQVREFLGKAGYCRLFIPGFAELAAPLYPLTRPGTLFQWGTEQQLAFEDIKKALLSSPALGLPDITKPFELFIDENSGFAKGVLVQKLGPWKRPVAYLSKKLDTVASGWPPCLRMVAAIAILVKDAGKLTLGQPLTILTSHPVEALVRQPPNKWLSNARMTHYQAMLLDAERVHFGPTVSLNPATLLPLPSGGNHHDCLQILAETHGTRPDLTDQPLPDADLTWYTDGSSFIRNGEREAGAAVTTESEVIWAAPLPPGTSAQRAELIALTQALKMAEGKKLTVYTDSRYAFATTHVHGEIYRRRGWLTSEGKEIKNKNEILALLEALFLPKRLSIIHCPGHQKGDSPQAKGNRLADDTAKKAATETHSSLTVLPAGKRTADGSEFEKRTADGSEFESPKKKAKVE

SEQ ID NO: 1212 - protein, 2102 aa, synthetic construct
MPAAKRVKLDGGDKKYSIGLDIGTNSVGWAVITDEYKVPSKKFKVLGNTDRHSIKKNLIGALLFDSGETAEATRLKRTARRRYTRRKNRICYLQEIFSNEMAKVDDSFFHRLEESFLVEEDKKHERHPIFGNIVDEVAYHEKYPTIYHLRKKLVDSTDKADLRLIYLALAHMIKFRGHFLIEGDLNPDNSDVDKLFIQLVQTYNQLFEENPINASGVDAKAILSARLSKSRRLENLIAQLPGEKKNGLFGNLIALSLGLTPNFKSNFDLAEDAKLQLSKDTYDDDLDNLLAQIGDQYADLFLAAKNLSDAILLSDILRVNTEITKAPLSASMIKRYDEHHQDLTLLKALVRQQLPEKYKEIFFDQSKNGYAGYIDGGASQEEFYKFIKPILEKMDGTEELLVKLNREDLLRKQRTFDNGSIPHQIHLGELHAILRRQEDFYPFLKDNREKIEKILTFRIPYYVGPLARGNSRFAWMTRKSEETITPWNFEEVVDKGASAQSFIERMTNFDKNLPNEKVLPKHSLLYEYFTVYNELTKVKYVTEGMRKPAFLSGEQKKAIVDLLFKTNRKVTVKQLKEDYFKKIECFDSVEISGVEDRFNASLGTYHDLLKIIKDKDFLDNEENEDILEDIVLTLTLFEDREMIEERLKTYAHLFDDKVMKQLKRRRYTGWGRLSRKLINGIRDKQSGKTILDFLKSDGFANRNFMQLIHDDSLTFKEDIQKAQVSGQGDSLHEHIANLAGSPAIKKGILQTVKVVDELVKVMGRHKPENIVIEMARENQTTQKGQKNSRERMKRIEEGIKELGSQILKEHPVENTQLQNEKLYLYYLQNGRDMYVDQELDINRLSDYDVDHIVPQSFLKDDSIDNKVLTRSDKARGKSDNVPSEEVVKKMKNYWRQLLNAKLITQRKFDNLTKAERGGLSELDKAGFIKRQLVETRQITKHVAQILDSRMNTKYDENDKLIREVKVITLKSKLVSDFRKDFQFYKVREINNYHHAHDAYLNAVVGTALIKKYPKLESEFVYGDYKVYDVRKMIAKSEQEIGKATAKYFFYSNIMNFFKTEITLANGEIRKRPLIETNGETGEIVWDKGRDFATVRKVLSMPQVNIVKKTEVQTGGFSKESILPKRNSDKLIARKKDWDPKKYGGFDSPTVAYSVLVVAKVEKGKSKKLKSVKELLGITIMERSSFEKNPIDFLEAKGYKEVKKDLIIKLPKYSLFELENGRKRMLASAGELQKGNELALPSKYVNFLYLASHYEKLKGSPEDNEQKQLFVEQHKHYLDEIIEQISEFSKRVILADANLDKVLSAYNKHRDKPIREQAENIIHLFTLTNLGAPAAFKYFDTTIDRKRYTSTKEVLDATLIHQSITGLYETRIDLSQLGGDGGGSSGSSGSSGSSGSSGSSGGTLQLEEEYRLFEPESTQKQEMDIWLKNFPQAWAETGGMGTAHCQAPVLIQLKATATPISIRQYPMPHEAYQGIKPHIRRMLDQGILKPCQSPWNTPLLPVKKPGTEDYRPVQDLREVNKRVEDIHPTVPNPYNLLSTLPPSHPWYTVLDLKDAFFCLRLHSESQLLFAFEWRDPEIGLSGQLTWTRLPQGFKNSPTLFNEALHSDLADFRVRYPALVLLQYVDDLLLAAATRTECLEGTKALLETLGNKGYRASAKKAQICLQEVTYLGYSLKDGQRWLTKARKEAILSIPVPKNSRQVREFLGKAGYCRLFIPGFAELAAPLYPLTRPGTLFQWGTEQQLAFEDIKKALLSSPALGLPDITKPFELFIDENSGFAKGVLVQKLGPWKRPVAYLSKKLDTVASGWPPCLRMVAAIAILVKDAGKLTLGQPLTILTSHPVEALVRQPPNKWLSNARMTHYQAMLLDAERVHFGPTVSLNPATLLPLPSGGNHHDCLQILAETHGTRPDLTDQPLPDADLTWYTDGSSFIRNGEREAGAAVTTESEVIWAAPLPPGTSAQRAELIALTQALKMAEGKKLTVYTDSRYAFATTHVHGEIYRRRGWLTSEGKEIKNKNEILALLEALFLPKRLSIIHCPGHQKGDSPQAKGNRLADDTAKKAATETHSSLTVLPAGKRTADGSEFEKRTADGSEFESPKKKAKVE

SEQ ID NO: 1213 - protein, 2099 aa, synthetic construct
MPAAKRVKLDGGDKKYSIGLDIGTNSVGWAVITDEYKVPSKKFKVLGNTDRHSIKKNLIGALLFDSGETAEATRLKRTARRRYTRRKNRICYLQEIFSNEMAKVDDSFFHRLEESFLVEEDKKHERHPIFGNIVDEVAYHEKYPTIYHLRKKLVDSTDKADLRLIYLALAHMIKFRGHFLIEGDLNPDNSDVDKLFIQLVQTYNQLFEENPINASGVDAKAILSARLSKSRRLENLIAQLPGEKKNGLFGNLIALSLGLTPNFKSNFDLAEDAKLQLSKDTYDDDLDNLLAQIGDQYADLFLAAKNLSDAILLSDILRVNTEITKAPLSASMIKRYDEHHQDLTLLKALVRQQLPEKYKEIFFDQSKNGYAGYIDGGASQEEFYKFIKPILEKMDGTEELLVKLNREDLLRKQRTFDNGSIPHQIHLGELHAILRRQEDFYPFLKDNREKIEKILTFRIPYYVGPLARGNSRFAWMTRKSEETITPWNFEEVVDKGASAQSFIERMTNFDKNLPNEKVLPKHSLLYEYFTVYNELTKVKYVTEGMRKPAFLSGEQKKAIVDLLFKTNRKVTVKQLKEDYFKKIECFDSVEISGVEDRFNASLGTYHDLLKIIKDKDFLDNEENEDILEDIVLTLTLFEDREMIEERLKTYAHLFDDKVMKQLKRRRYTGWGRLSRKLINGIRDKQSGKTILDFLKSDGFANRNFMQLIHDDSLTFKEDIQKAQVSGQGDSLHEHIANLAGSPAIKKGILQTVKVVDELVKVMGRHKPENIVIEMARENQTTQKGQKNSRERMKRIEEGIKELGSQILKEHPVENTQLQNEKLYLYYLQNGRDMYVDQELDINRLSDYDVDHIVPQSFLKDDSIDNKVLTRSDKARGKSDNVPSEEVVKKMKNYWRQLLNAKLITQRKFDNLTKAERGGLSELDKAGFIKRQLVETRQITKHVAQILDSRMNTKYDENDKLIREVKVITLKSKLVSDFRKDFQFYKVREINNYHHAHDAYLNAVVGTALIKKYPKLESEFVYGDYKVYDVRKMIAKSEQEIGKATAKYFFYSNIMNFFKTEITLANGEIRKRPLIETNGETGEIVWDKGRDFATVRKVLSMPQVNIVKKTEVQTGGFSKESILPKRNSDKLIARKKDWDPKKYGGFDSPTVAYSVLVVAKVEKGKSKKLKSVKELLGITIMERSSFEKNPIDFLEAKGYKEVKKDLIIKLPKYSLFELENGRKRMLASAGELQKGNELALPSKYVNFLYLASHYEKLKGSPEDNEQKQLFVEQHKHYLDEIIEQISEFSKRVILADANLDKVLSAYNKHRDKPIREQAENIIHLFTLTNLGAPAAFKYFDTTIDRKRYTSTKEVLDATLIHQSITGLYETRIDLSQLGGDGGEAAAKEAAAKEAAAKGGTLQLEEEYRLFEPESTQKQEMDIWLKNFPQAWAETGGMGTAHCQAPVLIQLKATATPISIRQYPMPHEAYQGIKPHIRRMLDQGILKPCQSPWNTPLLPVKKPGTEDYRPVQDLREVNKRVEDIHPTVPNPYNLLSTLPPSHPWYTVLDLKDAFFCLRLHSESQLLFAFEWRDPEIGLSGQLTWTRLPQGFKNSPTLFNEALHSDLADFRVRYPALVLLQYVDDLLLAAATRTECLEGTKALLETLGNKGYRASAKKAQICLQEVTYLGYSLKDGQRWLTKARKEAILSIPVPKNSRQVREFLGKAGYCRLFIPGFAELAAPLYPLTRPGTLFQWGTEQQLAFEDIKKALLSSPALGLPDITKPFELFIDENSGFAKGVLVQKLGPWKRPVAYLSKKLDTVASGWPPCLRMVAAIAILVKDAGKLTLGQPLTILTSHPVEALVRQPPNKWLSNARMTHYQAMLLDAERVHFGPTVSLNPATLLPLPSGGNHHDCLQILAETHGTRPDLTDQPLPDADLTWYTDGSSFIRNGEREAGAAVTTESEVIWAAPLPPGTSAQRAELIALTQALKMAEGKKLTVYTDSRYAFATTHVHGEIYRRRGWLTSEGKEIKNKNEILALLEALFLPKRLSIIHCPGHQKGDSPQAKGNRLADDTAKKAATETHSSLTVLPAGKRTADGSEFEKRTADGSEFESPKKKAKVE

SEQ ID NO: 1214 - protein, 2095 aa, synthetic construct
MPAAKRVKLDGGDKKYSIGLDIGTNSVGWAVITDEYKVPSKKFKVLGNTDRHSIKKNLIGALLFDSGETAEATRLKRTARRRYTRRKNRICYLQEIFSNEMAKVDDSFFHRLEESFLVEEDKKHERHPIFGNIVDEVAYHEKYPTIYHLRKKLVDSTDKADLRLIYLALAHMIKFRGHFLIEGDLNPDNSDVDKLFIQLVQTYNQLFEENPINASGVDAKAILSARLSKSRRLENLIAQLPGEKKNGLFGNLIALSLGLTPNFKSNFDLAEDAKLQLSKDTYDDDLDNLLAQIGDQYADLFLAAKNLSDAILLSDILRVNTEITKAPLSASMIKRYDEHHQDLTLLKALVRQQLPEKYKEIFFDQSKNGYAGYIDGGASQEEFYKFIKPILEKMDGTEELLVKLNREDLLRKQRTFDNGSIPHQIHLGELHAILRRQEDFYPFLKDNREKIEKILTFRIPYYVGPLARGNSRFAWMTRKSEETITPWNFEEVVDKGASAQSFIERMTNFDKNLPNEKVLPKHSLLYEYFTVYNELTKVKYVTEGMRKPAFLSGEQKKAIVDLLFKTNRKVTVKQLKEDYFKKIECFDSVEISGVEDRFNASLGTYHDLLKIIKDKDFLDNEENEDILEDIVLTLTLFEDREMIEERLKTYAHLFDDKVMKQLKRRRYTGWGRLSRKLINGIRDKQSGKTILDFLKSDGFANRNFMQLIHDDSLTFKEDIQKAQVSGQGDSLHEHIANLAGSPAIKKGILQTVKVVDELVKVMGRHKPENIVIEMARENQTTQKGQKNSRERMKRIEEGIKELGSQILKEHPVENTQLQNEKLYLYYLQNGRDMYVDQELDINRLSDYDVDHIVPQSFLKDDSIDNKVLTRSDKARGKSDNVPSEEVVKKMKNYWRQLLNAKLITQRKFDNLTKAERGGLSELDKAGFIKRQLVETRQITKHVAQILDSRMNTKYDENDKLIREVKVITLKSKLVSDFRKDFQFYKVREINNYHHAHDAYLNAVVGTALIKKYPKLESEFVYGDYKVYDVRKMIAKSEQEIGKATAKYFFYSNIMNFFKTEITLANGEIRKRPLIETNGETGEIVWDKGRDFATVRKVLSMPQVNIVKKTEVQTGGFSKESILPKRNSDKLIARKKDWDPKKYGGFDSPTVAYSVLVVAKVEKGKSKKLKSVKELLGITIMERSSFEKNPIDFLEAKGYKEVKKDLIIKLPKYSLFELENGRKRMLASAGELQKGNELALPSKYVNFLYLASHYEKLKGSPEDNEQKQLFVEQHKHYLDEIIEQISEFSKRVILADANLDKVLSAYNKHRDKPIREQAENIIHLFTLTNLGAPAAFKYFDTTIDRKRYTSTKEVLDATLIHQSITGLYETRIDLSQLGGDGGPAPGSSEAAAKGGTLQLEEEYRLFEPESTQKQEMDIWLKNFPQAWAETGGMGTAHCQAPVLIQLKATATPISIRQYPMPHEAYQGIKPHIRRMLDQGILKPCQSPWNTPLLPVKKPGTEDYRPVQDLREVNKRVEDIHPTVPNPYNLLSTLPPSHPWYTVLDLKDAFFCLRLHSESQLLFAFEWRDPEIGLSGQLTWTRLPQGFKNSPTLFNEALHSDLADFRVRYPALVLLQYVDDLLLAAATRTECLEGTKALLETLGNKGYRASAKKAQICLQEVTYLGYSLKDGQRWLTKARKEAILSIPVPKNSRQVREFLGKAGYCRLFIPGFAELAAPLYPLTRPGTLFQWGTEQQLAFEDIKKALLSSPALGLPDITKPFELFIDENSGFAKGVLVQKLGPWKRPVAYLSKKLDTVASGWPPCLRMVAAIAILVKDAGKLTLGQPLTILTSHPVEALVRQPPNKWLSNARMTHYQAMLLDAERVHFGPTVSLNPATLLPLPSGGNHHDCLQILAETHGTRPDLTDQPLPDADLTWYTDGSSFIRNGEREAGAAVTTESEVIWAAPLPPGTSAQRAELIALTQALKMAEGKKLTVYTDSRYAFATTHVHGEIYRRRGWLTSEGKEIKNKNEILALLEALFLPKRLSIIHCPGHQKGDSPQAKGNRLADDTAKKAATETHSSLTVLPAGKRTADGSEFEKRTADGSEFESPKKKAKVE

SEQ ID NO: 1215 - protein, 2092 aa, synthetic construct
MPAAKRVKLDGGDKKYSIGLDIGTNSVGWAVITDEYKVPSKKFKVLGNTDRHSIKKNLIGALLFDSGETAEATRLKRTARRRYTRRKNRICYLQEIFSNEMAKVDDSFFHRLEESFLVEEDKKHERHPIFGNIVDEVAYHEKYPTIYHLRKKLVDSTDKADLRLIYLALAHMIKFRGHFLIEGDLNPDNSDVDKLFIQLVQTYNQLFEENPINASGVDAKAILSARLSKSRRLENLIAQLPGEKKNGLFGNLIALSLGLTPNFKSNFDLAEDAKLQLSKDTYDDDLDNLLAQIGDQYADLFLAAKNLSDAILLSDILRVNTEITKAPLSASMIKRYDEHHQDLTLLKALVRQQLPEKYKEIFFDQSKNGYAGYIDGGASQEEFYKFIKPILEKMDGTEELLVKLNREDLLRKQRTFDNGSIPHQIHLGELHAILRRQEDFYPFLKDNREKIEKILTFRIPYYVGPLARGNSRFAWMTRKSEETITPWNFEEVVDKGASAQSFIERMTNFDKNLPNEKVLPKHSLLYEYFTVYNELTKVKYVTEGMRKPAFLSGEQKKAIVDLLFKTNRKVTVKQLKEDYFKKIECFDSVEISGVEDRFNASLGTYHDLLKIIKDKDFLDNEENEDILEDIVLTLTLFEDREMIEERLKTYAHLFDDKVMKQLKRRRYTGWGRLSRKLINGIRDKQSGKTILDFLKSDGFANRNFMQLIHDDSLTFKEDIQKAQVSGQGDSLHEHIANLAGSPAIKKGILQTVKVVDELVKVMGRHKPENIVIEMARENQTTQKGQKNSRERMKRIEEGIKELGSQILKEHPVENTQLQNEKLYLYYLQNGRDMYVDQELDINRLSDYDVDHIVPQSFLKDDSIDNKVLTRSDKARGKSDNVPSEEVVKKMKNYWRQLLNAKLITQRKFDNLTKAERGGLSELDKAGFIKRQLVETRQITKHVAQILDSRMNTKYDENDKLIREVKVITLKSKLVSDFRKDFQFYKVREINNYHHAHDAYLNAVVGTALIKKYPKLESEFVYGDYKVYDVRKMIAKSEQEIGKATAKYFFYSNIMNFFKTEITLANGEIRKRPLIETNGETGEIVWDKGRDFATVRKVLSMPQVNIVKKTEVQTGGFSKESILPKRNSDKLIARKKDWDPKKYGGFDSPTVAYSVLVVAKVEKGKSKKLKSVKELLGITIMERSSFEKNPIDFLEAKGYKEVKKDLIIKLPKYSLFELENGRKRMLASAGELQKGNELALPSKYVNFLYLASHYEKLKGSPEDNEQKQLFVEQHKHYLDEIIEQISEFSKRVILADANLDKVLSAYNKHRDKPIREQAENIIHLFTLTNLGAPAAFKYFDTTIDRKRYTSTKEVLDATLIHQSITGLYETRIDLSQLGGDGGGGGGGGGGGGTLQLEEEYRLFEPESTQKQEMDIWLKNFPQAWAETGGMGTAHCQAPVLIQLKATATPISIRQYPMPHEAYQGIKPHIRRMLDQGILKPCQSPWNTPLLPVKKPGTEDYRPVQDLREVNKRVEDIHPTVPNPYNLLSTLPPSHPWYTVLDLKDAFFCLRLHSESQLLFAFEWRDPEIGLSGQLTWTRLPQGFKNSPTLFNEALHSDLADFRVRYPALVLLQYVDDLLLAAATRTECLEGTKALLETLGNKGYRASAKKAQICLQEVTYLGYSLKDGQRWLTKARKEAILSIPVPKNSRQVREFLGKAGYCRLFIPGFAELAAPLYPLTRPGTLFQWGTEQQLAFEDIKKALLSSPALGLPDITKPFELFIDENSGFAKGVLVQKLGPWKRPVAYLSKKLDTVASGWPPCLRMVAAIAILVKDAGKLTLGQPLTILTSHPVEALVRQPPNKWLSNARMTHYQAMLLDAERVHFGPTVSLNPATLLPLPSGGNHHDCLQILAETHGTRPDLTDQPLPDADLTWYTDGSSFIRNGEREAGAAVTTESEVIWAAPLPPGTSAQRAELIALTQALKMAEGKKLTVYTDSRYAFATTHVHGEIYRRRGWLTSEGKEIKNKNEILALLEALFLPKRLSIIHCPGHQKGDSPQAKGNRLADDTAKKAATETHSSLTVLPAGKRTADGSEFEKRTADGSEFESPKKKAKVE

SEQ ID NO: 1216 - protein, 2093 aa, synthetic construct
MPAAKRVKLDGGDKKYSIGLDIGTNSVGWAVITDEYKVPSKKFKVLGNTDRHSIKKNLIGALLFDSGETAEATRLKRTARRRYTRRKNRICYLQEIFSNEMAKVDDSFFHRLEESFLVEEDKKHERHPIFGNIVDEVAYHEKYPTIYHLRKKLVDSTDKADLRLIYLALAHMIKFRGHFLIEGDLNPDNSDVDKLFIQLVQTYNQLFEENPINASGVDAKAILSARLSKSRRLENLIAQLPGEKKNGLFGNLIALSLGLTPNFKSNFDLAEDAKLQLSKDTYDDDLDNLLAQIGDQYADLFLAAKNLSDAILLSDILRVNTEITKAPLSASMIKRYDEHHQDLTLLKALVRQQLPEKYKEIFFDQSKNGYAGYIDGGASQEEFYKFIKPILEKMDGTEELLVKLNREDLLRKQRTFDNGSIPHQIHLGELHAILRRQEDFYPFLKDNREKIEKILTFRIPYYVGPLARGNSRFAWMTRKSEETITPWNFEEVVDKGASAQSFIERMTNFDKNLPNEKVLPKHSLLYEYFTVYNELTKVKYVTEGMRKPAFLSGEQKKAIVDLLFKTNRKVTVKQLKEDYFKKIECFDSVEISGVEDRFNASLGTYHDLLKIIKDKDFLDNEENEDILEDIVLTLTLFEDREMIEERLKTYAHLFDDKVMKQLKRRRYTGWGRLSRKLINGIRDKQSGKTILDFLKSDGFANRNFMQLIHDDSLTFKEDIQKAQVSGQGDSLHEHIANLAGSPAIKKGILQTVKVVDELVKVMGRHKPENIVIEMARENQTTQKGQKNSRERMKRIEEGIKELGSQILKEHPVENTQLQNEKLYLYYLQNGRDMYVDQELDINRLSDYDVDHIVPQSFLKDDSIDNKVLTRSDKARGKSDNVPSEEVVKKMKNYWRQLLNAKLITQRKFDNLTKAERGGLSELDKAGFIKRQLVETRQITKHVAQILDSRMNTKYDENDKLIREVKVITLKSKLVSDFRKDFQFYKVREINNYHHAHDAYLNAVVGTALIKKYPKLESEFVYGDYKVYDVRKMIAKSEQEIGKATAKYFFYSNIMNFFKTEITLANGEIRKRPLIETNGETGEIVWDKGRDFATVRKVLSMPQVNIVKKTEVQTGGFSKESILPKRNSDKLIARKKDWDPKKYGGFDSPTVAYSVLVVAKVEKGKSKKLKSVKELLGITIMERSSFEKNPIDFLEAKGYKEVKKDLIIKLPKYSLFELENGRKRMLASAGELQKGNELALPSKYVNFLYLASHYEKLKGSPEDNEQKQLFVEQHKHYLDEIIEQISEFSKRVILADANLDKVLSAYNKHRDKPIREQAENIIHLFTLTNLGAPAAFKYFDTTIDRKRYTSTKEVLDATLIHQSITGLYETRIDLSQLGGDGGPAPAPAPAPGGTLQLEEEYRLFEPESTQKQEMDIWLKNFPQAWAETGGMGTAHCQAPVLIQLKATATPISIRQYPMPHEAYQGIKPHIRRMLDQGILKPCQSPWNTPLLPVKKPGTEDYRPVQDLREVNKRVEDIHPTVPNPYNLLSTLPPSHPWYTVLDLKDAFFCLRLHSESQLLFAFEWRDPEIGLSGQLTWTRLPQGFKNSPTLFNEALHSDLADFRVRYPALVLLQYVDDLLLAAATRTECLEGTKALLETLGNKGYRASAKKAQICLQEVTYLGYSLKDGQRWLTKARKEAILSIPVPKNSRQVREFLGKAGYCRLFIPGFAELAAPLYPLTRPGTLFQWGTEQQLAFEDIKKALLSSPALGLPDITKPFELFIDENSGFAKGVLVQKLGPWKRPVAYLSKKLDTVASGWPPCLRMVAAIAILVKDAGKLTLGQPLTILTSHPVEALVRQPPNKWLSNARMTHYQAMLLDAERVHFGPTVSLNPATLLPLPSGGNHHDCLQILAETHGTRPDLTDQPLPDADLTWYTDGSSFIRNGEREAGAAVTTESEVIWAAPLPPGTSAQRAELIALTQALKMAEGKKLTVYTDSRYAFATTHVHGEIYRRRGWLTSEGKEIKNKNEILALLEALFLPKRLSIIHCPGHQKGDSPQAKGNRLADDTAKKAATETHSSLTVLPAGKRTADGSEFEKRTADGSEFESPKKKAKVE

SEQ ID NO: 1217 - protein, 2089 aa, synthetic construct
MPAAKRVKLDGGDKKYSIGLDIGTNSVGWAVITDEYKVPSKKFKVLGNTDRHSIKKNLIGALLFDSGETAEATRLKRTARRRYTRRKNRICYLQEIFSNEMAKVDDSFFHRLEESFLVEEDKKHERHPIFGNIVDEVAYHEKYPTIYHLRKKLVDSTDKADLRLIYLALAHMIKFRGHFLIEGDLNPDNSDVDKLFIQLVQTYNQLFEENPINASGVDAKAILSARLSKSRRLENLIAQLPGEKKNGLFGNLIALSLGLTPNFKSNFDLAEDAKLQLSKDTYDDDLDNLLAQIGDQYADLFLAAKNLSDAILLSDILRVNTEITKAPLSASMIKRYDEHHQDLTLLKALVRQQLPEKYKEIFFDQSKNGYAGYIDGGASQEEFYKFIKPILEKMDGTEELLVKLNREDLLRKQRTFDNGSIPHQIHLGELHAILRRQEDFYPFLKDNREKIEKILTFRIPYYVGPLARGNSRFAWMTRKSEETITPWNFEEVVDKGASAQSFIERMTNFDKNLPNEKVLPKHSLLYEYFTVYNELTKVKYVTEGMRKPAFLSGEQKKAIVDLLFKTNRKVTVKQLKEDYFKKIECFDSVEISGVEDRFNASLGTYHDLLKIIKDKDFLDNEENEDILEDIVLTLTLFEDREMIEERLKTYAHLFDDKVMKQLKRRRYTGWGRLSRKLINGIRDKQSGKTILDFLKSDGFANRNFMQLIHDDSLTFKEDIQKAQVSGQGDSLHEHIANLAGSPAIKKGILQTVKVVDELVKVMGRHKPENIVIEMARENQTTQKGQKNSRERMKRIEEGIKELGSQILKEHPVENTQLQNEKLYLYYLQNGRDMYVDQELDINRLSDYDVDHIVPQSFLKDDSIDNKVLTRSDKARGKSDNVPSEEVVKKMKNYWRQLLNAKLITQRKFDNLTKAERGGLSELDKAGFIKRQLVETRQITKHVAQILDSRMNTKYDENDKLIREVKVITLKSKLVSDFRKDFQFYKVREINNYHHAHDAYLNAVVGTALIKKYPKLESEFVYGDYKVYDVRKMIAKSEQEIGKATAKYFFYSNIMNFFKTEITLANGEIRKRPLIETNGETGEIVWDKGRDFATVRKVLSMPQVNIVKKTEVQTGGFSKESILPKRNSDKLIARKKDWDPKKYGGFDSPTVAYSVLVVAKVEKGKSKKLKSVKELLGITIMERSSFEKNPIDFLEAKGYKEVKKDLIIKLPKYSLFELENGRKRMLASAGELQKGNELALPSKYVNFLYLASHYEKLKGSPEDNEQKQLFVEQHKHYLDEIIEQISEFSKRVILADANLDKVLSAYNKHRDKPIREQAENIIHLFTLTNLGAPAAFKYFDTTIDRKRYTSTKEVLDATLIHQSITGLYETRIDLSQLGGDGGGGGGGGGTLQLEEEYRLFEPESTQKQEMDIWLKNFPQAWAETGGMGTAHCQAPVLIQLKATATPISIRQYPMPHEAYQGIKPHIRRMLDQGILKPCQSPWNTPLLPVKKPGTEDYRPVQDLREVNKRVEDIHPTVPNPYNLLSTLPPSHPWYTVLDLKDAFFCLRLHSESQLLFAFEWRDPEIGLSGQLTWTRLPQGFKNSPTLFNEALHSDLADFRVRYPALVLLQYVDDLLLAAATRTECLEGTKALLETLGNKGYRASAKKAQICLQEVTYLGYSLKDGQRWLTKARKEAILSIPVPKNSRQVREFLGKAGYCRLFIPGFAELAAPLYPLTRPGTLFQWGTEQQLAFEDIKKALLSSPALGLPDITKPFELFIDENSGFAKGVLVQKLGPWKRPVAYLSKKLDTVASGWPPCLRMVAAIAILVKDAGKLTLGQPLTILTSHPVEALVRQPPNKWLSNARMTHYQAMLLDAERVHFGPTVSLNPATLLPLPSGGNHHDCLQILAETHGTRPDLTDQPLPDADLTWYTDGSSFIRNGEREAGAAVTTESEVIWAAPLPPGTSAQRAELIALTQALKMAEGKKLTVYTDSRYAFATTHVHGEIYRRRGWLTSEGKEIKNKNEILALLEALFLPKRLSIIHCPGHQKGDSPQAKGNRLADDTAKKAATETHSSLTVLPAGKRTADGSEFEKRTADGSEFESPKKKAKVE

SEQ ID NO: 1218 - protein, 2095 aa, synthetic construct
MPAAKRVKLDGGDKKYSIGLDIGTNSVGWAVITDEYKVPSKKFKVLGNTDRHSIKKNLIGALLFDSGETAEATRLKRTARRRYTRRKNRICYLQEIFSNEMAKVDDSFFHRLEESFLVEEDKKHERHPIFGNIVDEVAYHEKYPTIYHLRKKLVDSTDKADLRLIYLALAHMIKFRGHFLIEGDLNPDNSDVDKLFIQLVQTYNQLFEENPINASGVDAKAILSARLSKSRRLENLIAQLPGEKKNGLFGNLIALSLGLTPNFKSNFDLAEDAKLQLSKDTYDDDLDNLLAQIGDQYADLFLAAKNLSDAILLSDILRVNTEITKAPLSASMIKRYDEHHQDLTLLKALVRQQLPEKYKEIFFDQSKNGYAGYIDGGASQEEFYKFIKPILEKMDGTEELLVKLNREDLLRKQRTFDNGSIPHQIHLGELHAILRRQEDFYPFLKDNREKIEKILTFRIPYYVGPLARGNSRFAWMTRKSEETITPWNFEEVVDKGASAQSFIERMTNFDKNLPNEKVLPKHSLLYEYFTVYNELTKVKYVTEGMRKPAFLSGEQKKAIVDLLFKTNRKVTVKQLKEDYFKKIECFDSVEISGVEDRFNASLGTYHDLLKIIKDKDFLDNEENEDILEDIVLTLTLFEDREMIEERLKTYAHLFDDKVMKQLKRRRYTGWGRLSRKLINGIRDKQSGKTILDFLKSDGFANRNFMQLIHDDSLTFKEDIQKAQVSGQGDSLHEHIANLAGSPAIKKGILQTVKVVDELVKVMGRHKPENIVIEMARENQTTQKGQKNSRERMKRIEEGIKELGSQILKEHPVENTQLQNEKLYLYYLQNGRDMYVDQELDINRLSDYDVDHIVPQSFLKDDSIDNKVLTRSDKARGKSDNVPSEEVVKKMKNYWRQLLNAKLITQRKFDNLTKAERGGLSELDKAGFIKRQLVETRQITKHVAQILDSRMNTKYDENDKLIREVKVITLKSKLVSDFRKDFQFYKVREINNYHHAHDAYLNAVVGTALIKKYPKLESEFVYGDYKVYDVRKMIAKSEQEIGKATAKYFFYSNIMNFFKTEITLANGEIRKRPLIETNGETGEIVWDKGRDFATVRKVLSMPQVNIVKKTEVQTGGFSKESILPKRNSDKLIARKKDWDPKKYGGFDSPTVAYSVLVVAKVEKGKSKKLKSVKELLGITIMERSSFEKNPIDFLEAKGYKEVKKDLIIKLPKYSLFELENGRKRMLASAGELQKGNELALPSKYVNFLYLASHYEKLKGSPEDNEQKQLFVEQHKHYLDEIIEQISEFSKRVILADANLDKVLSAYNKHRDKPIREQAENIIHLFTLTNLGAPAAFKYFDTTIDRKRYTSTKEVLDATLIHQSITGLYETRIDLSQLGGDGGGSSEAAAKPAPGGTLQLEEEYRLFEPESTQKQEMDIWLKNFPQAWAETGGMGTAHCQAPVLIQLKATATPISIRQYPMPHEAYQGIKPHIRRMLDQGILKPCQSPWNTPLLPVKKPGTEDYRPVQDLREVNKRVEDIHPTVPNPYNLLSTLPPSHPWYTVLDLKDAFFCLRLHSESQLLFAFEWRDPEIGLSGQLTWTRLPQGFKNSPTLFNEALHSDLADFRVRYPALVLLQYVDDLLLAAATRTECLEGTKALLETLGNKGYRASAKKAQICLQEVTYLGYSLKDGQRWLTKARKEAILSIPVPKNSRQVREFLGKAGYCRLFIPGFAELAAPLYPLTRPGTLFQWGTEQQLAFEDIKKALLSSPALGLPDITKPFELFIDENSGFAKGVLVQKLGPWKRPVAYLSKKLDTVASGWPPCLRMVAAIAILVKDAGKLTLGQPLTILTSHPVEALVRQPPNKWLSNARMTHYQAMLLDAERVHFGPTVSLNPATLLPLPSGGNHHDCLQILAETHGTRPDLTDQPLPDADLTWYTDGSSFIRNGEREAGAAVTTESEVIWAAPLPPGTSAQRAELIALTQALKMAEGKKLTVYTDSRYAFATTHVHGEIYRRRGWLTSEGKEIKNKNEILALLEALFLPKRLSIIHCPGHQKGDSPQAKGNRLADDTAKKAATETHSSLTVLPAGKRTADGSEFEKRTADGSEFESPKKKAKVE

SEQ ID NO: 1219 - protein, 2097 aa, synthetic construct
MPAAKRVKLDGGDKKYSIGLDIGTNSVGWAVITDEYKVPSKKFKVLGNTDRHSIKKNLIGALLFDSGETAEATRLKRTARRRYTRRKNRICYLQEIFSNEMAKVDDSFFHRLEESFLVEEDKKHERHPIFGNIVDEVAYHEKYPTIYHLRKKLVDSTDKADLRLIYLALAHMIKFRGHFLIEGDLNPDNSDVDKLFIQLVQTYNQLFEENPINASGVDAKAILSARLSKSRRLENLIAQLPGEKKNGLFGNLIALSLGLTPNFKSNFDLAEDAKLQLSKDTYDDDLDNLLAQIGDQYADLFLAAKNLSDAILLSDILRVNTEITKAPLSASMIKRYDEHHQDLTLLKALVRQQLPEKYKEIFFDQSKNGYAGYIDGGASQEEFYKFIKPILEKMDGTEELLVKLNREDLLRKQRTFDNGSIPHQIHLGELHAILRRQEDFYPFLKDNREKIEKILTFRIPYYVGPLARGNSRFAWMTRKSEETITPWNFEEVVDKGASAQSFIERMTNFDKNLPNEKVLPKHSLLYEYFTVYNELTKVKYVTEGMRKPAFLSGEQKKAIVDLLFKTNRKVTVKQLKEDYFKKIECFDSVEISGVEDRFNASLGTYHDLLKIIKDKDFLDNEENEDILEDIVLTLTLFEDREMIEERLKTYAHLFDDKVMKQLKRRRYTGWGRLSRKLINGIRDKQSGKTILDFLKSDGFANRNFMQLIHDDSLTFKEDIQKAQVSGQGDSLHEHIANLAGSPAIKKGILQTVKVVDELVKVMGRHKPENIVIEMARENQTTQKGQKNSRERMKRIEEGIKELGSQILKEHPVENTQLQNEKLYLYYLQNGRDMYVDQELDINRLSDYDVDHIVPQSFLKDDSIDNKVLTRSDKARGKSDNVPSEEVVKKMKNYWRQLLNAKLITQRKFDNLTKAERGGLSELDKAGFIKRQLVETRQITKHVAQILDSRMNTKYDENDKLIREVKVITLKSKLVSDFRKDFQFYKVREINNYHHAHDAYLNAVVGTALIKKYPKLESEFVYGDYKVYDVRKMIAKSEQEIGKATAKYFFYSNIMNFFKTEITLANGEIRKRPLIETNGETGEIVWDKGRDFATVRKVLSMPQVNIVKKTEVQTGGFSKESILPKRNSDKLIARKKDWDPKKYGGFDSPTVAYSVLVVAKVEKGKSKKLKSVKELLGITIMERSSFEKNPIDFLEAKGYKEVKKDLIIKLPKYSLFELENGRKRMLASAGELQKGNELALPSKYVNFLYLASHYEKLKGSPEDNEQKQLFVEQHKHYLDEIIEQISEFSKRVILADANLDKVLSAYNKHRDKPIREQAENIIHLFTLTNLGAPAAFKYFDTTIDRKRYTSTKEVLDATLIHQSITGLYETRIDLSQLGGDGGPAPAPAPAPAPAPGGTLQLEEEYRLFEPESTQKQEMDIWLKNFPQAWAETGGMGTAHCQAPVLIQLKATATPISIRQYPMPHEAYQGIKPHIRRMLDQGILKPCQSPWNTPLLPVKKPGTEDYRPVQDLREVNKRVEDIHPTVPNPYNLLSTLPPSHPWYTVLDLKDAFFCLRLHSESQLLFAFEWRDPEIGLSGQLTWTRLPQGFKNSPTLFNEALHSDLADFRVRYPALVLLQYVDDLLLAAATRTECLEGTKALLETLGNKGYRASAKKAQICLQEVTYLGYSLKDGQRWLTKARKEAILSIPVPKNSRQVREFLGKAGYCRLFIPGFAELAAPLYPLTRPGTLFQWGTEQQLAFEDIKKALLSSPALGLPDITKPFELFIDENSGFAKGVLVQKLGPWKRPVAYLSKKLDTVASGWPPCLRMVAAIAILVKDAGKLTLGQPLTILTSHPVEALVRQPPNKWLSNARMTHYQAMLLDAERVHFGPTVSLNPATLLPLPSGGNHHDCLQILAETHGTRPDLTDQPLPDADLTWYTDGSSFIRNGEREAGAAVTTESEVIWAAPLPPGTSAQRAELIALTQALKMAEGKKLTVYTDSRYAFATTHVHGEIYRRRGWLTSEGKEIKNKNEILALLEALFLPKRLSIIHCPGHQKGDSPQAKGNRLADDTAKKAATETHSSLTVLPAGKRTADGSEFEKRTADGSEFESPKKKAKVE

SEQ ID NO: 1220 - protein, 2095 aa, synthetic construct
MPAAKRVKLDGGDKKYSIGLDIGTNSVGWAVITDEYKVPSKKFKVLGNTDRHSIKKNLIGALLFDSGETAEATRLKRTARRRYTRRKNRICYLQEIFSNEMAKVDDSFFHRLEESFLVEEDKKHERHPIFGNIVDEVAYHEKYPTIYHLRKKLVDSTDKADLRLIYLALAHMIKFRGHFLIEGDLNPDNSDVDKLFIQLVQTYNQLFEENPINASGVDAKAILSARLSKSRRLENLIAQLPGEKKNGLFGNLIALSLGLTPNFKSNFDLAEDAKLQLSKDTYDDDLDNLLAQIGDQYADLFLAAKNLSDAILLSDILRVNTEITKAPLSASMIKRYDEHHQDLTLLKALVRQQLPEKYKEIFFDQSKNGYAGYIDGGASQEEFYKFIKPILEKMDGTEELLVKLNREDLLRKQRTFDNGSIPHQIHLGELHAILRRQEDFYPFLKDNREKIEKILTFRIPYYVGPLARGNSRFAWMTRKSEETITPWNFEEVVDKGASAQSFIERMTNFDKNLPNEKVLPKHSLLYEYFTVYNELTKVKYVTEGMRKPAFLSGEQKKAIVDLLFKTNRKVTVKQLKEDYFKKIECFDSVEISGVEDRFNASLGTYHDLLKIIKDKDFLDNEENEDILEDIVLTLTLFEDREMIEERLKTYAHLFDDKVMKQLKRRRYTGWGRLSRKLINGIRDKQSGKTILDFLKSDGFANRNFMQLIHDDSLTFKEDIQKAQVSGQGDSLHEHIANLAGSPAIKKGILQTVKVVDELVKVMGRHKPENIVIEMARENQTTQKGQKNSRERMKRIEEGIKELGSQILKEHPVENTQLQNEKLYLYYLQNGRDMYVDQELDINRLSDYDVDHIVPQSFLKDDSIDNKVLTRSDKARGKSDNVPSEEVVKKMKNYWRQLLNAKLITQRKFDNLTKAERGGLSELDKAGFIKRQLVETRQITKHVAQILDSRMNTKYDENDKLIREVKVITLKSKLVSDFRKDFQFYKVREINNYHHAHDAYLNAVVGTALIKKYPKLESEFVYGDYKVYDVRKMIAKSEQEIGKATAKYFFYSNIMNFFKTEITLANGEIRKRPLIETNGETGEIVWDKGRDFATVRKVLSMPQVNIVKKTEVQTGGFSKESILPKRNSDKLIARKKDWDPKKYGGFDSPTVAYSVLVVAKVEKGKSKKLKSVKELLGITIMERSSFEKNPIDFLEAKGYKEVKKDLIIKLPKYSLFELENGRKRMLASAGELQKGNELALPSKYVNFLYLASHYEKLKGSPEDNEQKQLFVEQHKHYLDEIIEQISEFSKRVILADANLDKVLSAYNKHRDKPIREQAENIIHLFTLTNLGAPAAFKYFDTTIDRKRYTSTKEVLDATLIHQSITGLYETRIDLSQLGGDGGGGSGSSEAAAKGGTLQLEEEYRLFEPESTQKQEMDIWLKNFPQAWAETGGMGTAHCQAPVLIQLKATATPISIRQYPMPHEAYQGIKPHIRRMLDQGILKPCQSPWNTPLLPVKKPGTEDYRPVQDLREVNKRVEDIHPTVPNPYNLLSTLPPSHPWYTVLDLKDAFFCLRLHSESQLLFAFEWRDPEIGLSGQLTWTRLPQGFKNSPTLFNEALHSDLADFRVRYPALVLLQYVDDLLLAAATRTECLEGTKALLETLGNKGYRASAKKAQICLQEVTYLGYSLKDGQRWLTKARKEAILSIPVPKNSRQVREFLGKAGYCRLFIPGFAELAAPLYPLTRPGTLFQWGTEQQLAFEDIKKALLSSPALGLPDITKPFELFIDENSGFAKGVLVQKLGPWKRPVAYLSKKLDTVASGWPPCLRMVAAIAILVKDAGKLTLGQPLTILTSHPVEALVRQPPNKWLSNARMTHYQAMLLDAERVHFGPTVSLNPATLLPLPSGGNHHDCLQILAETHGTRPDLTDQPLPDADLTWYTDGSSFIRNGEREAGAAVTTESEVIWAAPLPPGTSAQRAELIALTQALKMAEGKKLTVYTDSRYAFATTHVHGEIYRRRGWLTSEGKEIKNKNEILALLEALFLPKRLSIIHCPGHQKGDSPQAKGNRLADDTAKKAATETHSSLTVLPAGKRTADGSEFEKRTADGSEFESPKKKAKVE

SEQ ID NO: 1221 - protein, 2095 aa, synthetic construct
MPAAKRVKLDGGDKKYSIGLDIGTNSVGWAVITDEYKVPSKKFKVLGNTDRHSIKKNLIGALLFDSGETAEATRLKRTARRRYTRRKNRICYLQEIFSNEMAKVDDSFFHRLEESFLVEEDKKHERHPIFGNIVDEVAYHEKYPTIYHLRKKLVDSTDKADLRLIYLALAHMIKFRGHFLIEGDLNPDNSDVDKLFIQLVQTYNQLFEENPINASGVDAKAILSARLSKSRRLENLIAQLPGEKKNGLFGNLIALSLGLTPNFKSNFDLAEDAKLQLSKDTYDDDLDNLLAQIGDQYADLFLAAKNLSDAILLSDILRVNTEITKAPLSASMIKRYDEHHQDLTLLKALVRQQLPEKYKEIFFDQSKNGYAGYIDGGASQEEFYKFIKPILEKMDGTEELLVKLNREDLLRKQRTFDNGSIPHQIHLGELHAILRRQEDFYPFLKDNREKIEKILTFRIPYYVGPLARGNSRFAWMTRKSEETITPWNFEEVVDKGASAQSFIERMTNFDKNLPNEKVLPKHSLLYEYFTVYNELTKVKYVTEGMRKPAFLSGEQKKAIVDLLFKTNRKVTVKQLKEDYFKKIECFDSVEISGVEDRFNASLGTYHDLLKIIKDKDFLDNEENEDILEDIVLTLTLFEDREMIEERLKTYAHLFDDKVMKQLKRRRYTGWGRLSRKLINGIRDKQSGKTILDFLKSDGFANRNFMQLIHDDSLTFKEDIQKAQVSGQGDSLHEHIANLAGSPAIKKGILQTVKVVDELVKVMGRHKPENIVIEMARENQTTQKGQKNSRERMKRIEEGIKELGSQILKEHPVENTQLQNEKLYLYYLQNGRDMYVDQELDINRLSDYDVDHIVPQSFLKDDSIDNKVLTRSDKARGKSDNVPSEEVVKKMKNYWRQLLNAKLITQRKFDNLTKAERGGLSELDKAGFIKRQLVETRQITKHVAQILDSRMNTKYDENDKLIREVKVITLKSKLVSDFRKDFQFYKVREINNYHHAHDAYLNAVVGTALIKKYPKLESEFVYGDYKVYDVRKMIAKSEQEIGKATAKYFFYSNIMNFFKTEITLANGEIRKRPLIETNGETGEIVWDKGRDFATVRKVLSMPQVNIVKKTEVQTGGFSKESILPKRNSDKLIARKKDWDPKKYGGFDSPTVAYSVLVVAKVEKGKSKKLKSVKELLGITIMERSSFEKNPIDFLEAKGYKEVKKDLIIKLPKYSLFELENGRKRMLASAGELQKGNELALPSKYVNFLYLASHYEKLKGSPEDNEQKQLFVEQHKHYLDEIIEQISEFSKRVILADANLDKVLSAYNKHRDKPIREQAENIIHLFTLTNLGAPAAFKYFDTTIDRKRYTSTKEVLDATLIHQSITGLYETRIDLSQLGGDGGGGGPAPEAAAKGGTLQLEEEYRLFEPESTQKQEMDIWLKNFPQAWAETGGMGTAHCQAPVLIQLKATATPISIRQYPMPHEAYQGIKPHIRRMLDQGILKPCQSPWNTPLLPVKKPGTEDYRPVQDLREVNKRVEDIHPTVPNPYNLLSTLPPSHPWYTVLDLKDAFFCLRLHSESQLLFAFEWRDPEIGLSGQLTWTRLPQGFKNSPTLFNEALHSDLADFRVRYPALVLLQYVDDLLLAAATRTECLEGTKALLETLGNKGYRASAKKAQICLQEVTYLGYSLKDGQRWLTKARKEAILSIPVPKNSRQVREFLGKAGYCRLFIPGFAELAAPLYPLTRPGTLFQWGTEQQLAFEDIKKALLSSPALGLPDITKPFELFIDENSGFAKGVLVQKLGPWKRPVAYLSKKLDTVASGWPPCLRMVAAIAILVKDAGKLTLGQPLTILTSHPVEALVRQPPNKWLSNARMTHYQAMLLDAERVHFGPTVSLNPATLLPLPSGGNHHDCLQILAETHGTRPDLTDQPLPDADLTWYTDGSSFIRNGEREAGAAVTTESEVIWAAPLPPGTSAQRAELIALTQALKMAEGKKLTVYTDSRYAFATTHVHGEIYRRRGWLTSEGKEIKNKNEILALLEALFLPKRLSIIHCPGHQKGDSPQAKGNRLADDTAKKAATETHSSLTVLPAGKRTADGSEFEKRTADGSEFESPKKKAKVE

SEQ ID NO: 1222 - protein, 2117 aa, synthetic construct
MPAAKRVKLDGGDKKYSIGLDIGTNSVGWAVITDEYKVPSKKFKVLGNTDRHSIKKNLIGALLFDSGETAEATRLKRTARRRYTRRKNRICYLQEIFSNEMAKVDDSFFHRLEESFLVEEDKKHERHPIFGNIVDEVAYHEKYPTIYHLRKKLVDSTDKADLRLIYLALAHMIKFRGHFLIEGDLNPDNSDVDKLFIQLVQTYNQLFEENPINASGVDAKAILSARLSKSRRLENLIAQLPGEKKNGLFGNLIALSLGLTPNFKSNFDLAEDAKLQLSKDTYDDDLDNLLAQIGDQYADLFLAAKNLSDAILLSDILRVNTEITKAPLSASMIKRYDEHHQDLTLLKALVRQQLPEKYKEIFFDQSKNGYAGYIDGGASQEEFYKFIKPILEKMDGTEELLVKLNREDLLRKQRTFDNGSIPHQIHLGELHAILRRQEDFYPFLKDNREKIEKILTFRIPYYVGPLARGNSRFAWMTRKSEETITPWNFEEVVDKGASAQSFIERMTNFDKNLPNEKVLPKHSLLYEYFTVYNELTKVKYVTEGMRKPAFLSGEQKKAIVDLLFKTNRKVTVKQLKEDYFKKIECFDSVEISGVEDRFNASLGTYHDLLKIIKDKDFLDNEENEDILEDIVLTLTLFEDREMIEERLKTYAHLFDDKVMKQLKRRRYTGWGRLSRKLINGIRDKQSGKTILDFLKSDGFANRNFMQLIHDDSLTFKEDIQKAQVSGQGDSLHEHIANLAGSPAIKKGILQTVKVVDELVKVMGRHKPENIVIEMARENQTTQKGQKNSRERMKRIEEGIKELGSQILKEHPVENTQLQNEKLYLYYLQNGRDMYVDQELDINRLSDYDVDHIVPQSFLKDDSIDNKVLTRSDKARGKSDNVPSEEVVKKMKNYWRQLLNAKLITQRKFDNLTKAERGGLSELDKAGFIKRQLVETRQITKHVAQILDSRMNTKYDENDKLIREVKVITLKSKLVSDFRKDFQFYKVREINNYHHAHDAYLNAVVGTALIKKYPKLESEFVYGDYKVYDVRKMIAKSEQEIGKATAKYFFYSNIMNFFKTEITLANGEIRKRPLIETNGETGEIVWDKGRDFATVRKVLSMPQVNIVKKTEVQTGGFSKESILPKRNSDKLIARKKDWDPKKYGGFDSPTVAYSVLVVAKVEKGKSKKLKSVKELLGITIMERSSFEKNPIDFLEAKGYKEVKKDLIIKLPKYSLFELENGRKRMLASAGELQKGNELALPSKYVNFLYLASHYEKLKGSPEDNEQKQLFVEQHKHYLDEIIEQISEFSKRVILADANLDKVLSAYNKHRDKPIREQAENIIHLFTLTNLGAPAAFKYFDTTIDRKRYTSTKEVLDATLIHQSITGLYETRIDLSQLGGDGGSGGSSGGSSGSETPGTSESATPESSGGSSGGSSGGTLQLEEEYRLFEPESTQKQEMDIWLKNFPQAWAETGGMGTAHCQAPVLIQLKATATPISIRQYPMPHEAYQGIKPHIRRMLDQGILKPCQSPWNTPLLPVKKPGTEDYRPVQDLREVNKRVEDIHPTVPNPYNLLSTLPPSHPWYTVLDLKDAFFCLRLHSESQLLFAFEWRDPEIGLSGQLTWTRLPQGFKNSPTLFNEALHSDLADFRVRYPALVLLQYVDDLLLAAATRTECLEGTKALLETLGNKGYRASAKKAQICLQEVTYLGYSLKDGQRWLTKARKEAILSIPVPKNSRQVREFLGKAGYCRLFIPGFAELAAPLYPLTRPGTLFQWGTEQQLAFEDIKKALLSSPALGLPDITKPFELFIDENSGFAKGVLVQKLGPWKRPVAYLSKKLDTVASGWPPCLRMVAAIAILVKDAGKLTLGQPLTILTSHPVEALVRQPPNKWLSNARMTHYQAMLLDAERVHFGPTVSLNPATLLPLPSGGNHHDCLQILAETHGTRPDLTDQPLPDADLTWYTDGSSFIRNGEREAGAAVTTESEVIWAAPLPPGTSAQRAELIALTQALKMAEGKKLTVYTDSRYAFATTHVHGEIYRRRGWLTSEGKEIKNKNEILALLEALFLPKRLSIIHCPGHQKGDSPQAKGNRLADDTAKKAATETHSSLTVLPAGKRTADGSEFEKRTADGSEFESPKKKAKVE

SEQ ID NO: 1223 - protein, 2087 aa, synthetic construct
MPAAKRVKLDGGDKKYSIGLDIGTNSVGWAVITDEYKVPSKKFKVLGNTDRHSIKKNLIGALLFDSGETAEATRLKRTARRRYTRRKNRICYLQEIFSNEMAKVDDSFFHRLEESFLVEEDKKHERHPIFGNIVDEVAYHEKYPTIYHLRKKLVDSTDKADLRLIYLALAHMIKFRGHFLIEGDLNPDNSDVDKLFIQLVQTYNQLFEENPINASGVDAKAILSARLSKSRRLENLIAQLPGEKKNGLFGNLIALSLGLTPNFKSNFDLAEDAKLQLSKDTYDDDLDNLLAQIGDQYADLFLAAKNLSDAILLSDILRVNTEITKAPLSASMIKRYDEHHQDLTLLKALVRQQLPEKYKEIFFDQSKNGYAGYIDGGASQEEFYKFIKPILEKMDGTEELLVKLNREDLLRKQRTFDNGSIPHQIHLGELHAILRRQEDFYPFLKDNREKIEKILTFRIPYYVGPLARGNSRFAWMTRKSEETITPWNFEEVVDKGASAQSFIERMTNFDKNLPNEKVLPKHSLLYEYFTVYNELTKVKYVTEGMRKPAFLSGEQKKAIVDLLFKTNRKVTVKQLKEDYFKKIECFDSVEISGVEDRFNASLGTYHDLLKIIKDKDFLDNEENEDILEDIVLTLTLFEDREMIEERLKTYAHLFDDKVMKQLKRRRYTGWGRLSRKLINGIRDKQSGKTILDFLKSDGFANRNFMQLIHDDSLTFKEDIQKAQVSGQGDSLHEHIANLAGSPAIKKGILQTVKVVDELVKVMGRHKPENIVIEMARENQTTQKGQKNSRERMKRIEEGIKELGSQILKEHPVENTQLQNEKLYLYYLQNGRDMYVDQELDINRLSDYDVDHIVPQSFLKDDSIDNKVLTRSDKARGKSDNVPSEEVVKKMKNYWRQLLNAKLITQRKFDNLTKAERGGLSELDKAGFIKRQLVETRQITKHVAQILDSRMNTKYDENDKLIREVKVITLKSKLVSDFRKDFQFYKVREINNYHHAHDAYLNAVVGTALIKKYPKLESEFVYGDYKVYDVRKMIAKSEQEIGKATAKYFFYSNIMNFFKTEITLANGEIRKRPLIETNGETGEIVWDKGRDFATVRKVLSMPQVNIVKKTEVQTGGFSKESILPKRNSDKLIARKKDWDPKKYGGFDSPTVAYSVLVVAKVEKGKSKKLKSVKELLGITIMERSSFEKNPIDFLEAKGYKEVKKDLIIKLPKYSLFELENGRKRMLASAGELQKGNELALPSKYVNFLYLASHYEKLKGSPEDNEQKQLFVEQHKHYLDEIIEQISEFSKRVILADANLDKVLSAYNKHRDKPIREQAENIIHLFTLTNLGAPAAFKYFDTTIDRKRYTSTKEVLDATLIHQSITGLYETRIDLSQLGGDGGPAPGGTLQLEEEYRLFEPESTQKQEMDIWLKNFPQAWAETGGMGTAHCQAPVLIQLKATATPISIRQYPMPHEAYQGIKPHIRRMLDQGILKPCQSPWNTPLLPVKKPGTEDYRPVQDLREVNKRVEDIHPTVPNPYNLLSTLPPSHPWYTVLDLKDAFFCLRLHSESQLLFAFEWRDPEIGLSGQLTWTRLPQGFKNSPTLFNEALHSDLADFRVRYPALVLLQYVDDLLLAAATRTECLEGTKALLETLGNKGYRASAKKAQICLQEVTYLGYSLKDGQRWLTKARKEAILSIPVPKNSRQVREFLGKAGYCRLFIPGFAELAAPLYPLTRPGTLFQWGTEQQLAFEDIKKALLSSPALGLPDITKPFELFIDENSGFAKGVLVQKLGPWKRPVAYLSKKLDTVASGWPPCLRMVAAIAILVKDAGKLTLGQPLTILTSHPVEALVRQPPNKWLSNARMTHYQAMLLDAERVHFGPTVSLNPATLLPLPSGGNHHDCLQILAETHGTRPDLTDQPLPDADLTWYTDGSSFIRNGEREAGAAVTTESEVIWAAPLPPGTSAQRAELIALTQALKMAEGKKLTVYTDSRYAFATTHVHGEIYRRRGWLTSEGKEIKNKNEILALLEALFLPKRLSIIHCPGHQKGDSPQAKGNRLADDTAKKAATETHSSLTVLPAGKRTADGSEFEKRTADGSEFESPKKKAKVE

SEQ ID NO: 1224 - protein, 2093 aa, synthetic construct
MPAAKRVKLDGGDKKYSIGLDIGTNSVGWAVITDEYKVPSKKFKVLGNTDRHSIKKNLIGALLFDSGETAEATRLKRTARRRYTRRKNRICYLQEIFSNEMAKVDDSFFHRLEESFLVEEDKKHERHPIFGNIVDEVAYHEKYPTIYHLRKKLVDSTDKADLRLIYLALAHMIKFRGHFLIEGDLNPDNSDVDKLFIQLVQTYNQLFEENPINASGVDAKAILSARLSKSRRLENLIAQLPGEKKNGLFGNLIALSLGLTPNFKSNFDLAEDAKLQLSKDTYDDDLDNLLAQIGDQYADLFLAAKNLSDAILLSDILRVNTEITKAPLSASMIKRYDEHHQDLTLLKALVRQQLPEKYKEIFFDQSKNGYAGYIDGGASQEEFYKFIKPILEKMDGTEELLVKLNREDLLRKQRTFDNGSIPHQIHLGELHAILRRQEDFYPFLKDNREKIEKILTFRIPYYVGPLARGNSRFAWMTRKSEETITPWNFEEVVDKGASAQSFIERMTNFDKNLPNEKVLPKHSLLYEYFTVYNELTKVKYVTEGMRKPAFLSGEQKKAIVDLLFKTNRKVTVKQLKEDYFKKIECFDSVEISGVEDRFNASLGTYHDLLKIIKDKDFLDNEENEDILEDIVLTLTLFEDREMIEERLKTYAHLFDDKVMKQLKRRRYTGWGRLSRKLINGIRDKQSGKTILDFLKSDGFANRNFMQLIHDDSLTFKEDIQKAQVSGQGDSLHEHIANLAGSPAIKKGILQTVKVVDELVKVMGRHKPENIVIEMARENQTTQKGQKNSRERMKRIEEGIKELGSQILKEHPVENTQLQNEKLYLYYLQNGRDMYVDQELDINRLSDYDVDHIVPQSFLKDDSIDNKVLTRSDKARGKSDNVPSEEVVKKMKNYWRQLLNAKLITQRKFDNLTKAERGGLSELDKAGFIKRQLVETRQITKHVAQILDSRMNTKYDENDKLIREVKVITLKSKLVSDFRKDFQFYKVREINNYHHAHDAYLNAVVGTALIKKYPKLESEFVYGDYKVYDVRKMIAKSEQEIGKATAKYFFYSNIMNFFKTEITLANGEIRKRPLIETNGETGEIVWDKGRDFATVRKVLSMPQVNIVKKTEVQTGGFSKESILPKRNSDKLIARKKDWDPKKYGGFDSPTVAYSVLVVAKVEKGKSKKLKSVKELLGITIMERSSFEKNPIDFLEAKGYKEVKKDLIIKLPKYSLFELENGRKRMLASAGELQKGNELALPSKYVNFLYLASHYEKLKGSPEDNEQKQLFVEQHKHYLDEIIEQISEFSKRVILADANLDKVLSAYNKHRDKPIREQAENIIHLFTLTNLGAPAAFKYFDTTIDRKRYTSTKEVLDATLIHQSITGLYETRIDLSQLGGDGGGSSPAPGGGGGTLQLEEEYRLFEPESTQKQEMDIWLKNFPQAWAETGGMGTAHCQAPVLIQLKATATPISIRQYPMPHEAYQGIKPHIRRMLDQGILKPCQSPWNTPLLPVKKPGTEDYRPVQDLREVNKRVEDIHPTVPNPYNLLSTLPPSHPWYTVLDLKDAFFCLRLHSESQLLFAFEWRDPEIGLSGQLTWTRLPQGFKNSPTLFNEALHSDLADFRVRYPALVLLQYVDDLLLAAATRTECLEGTKALLETLGNKGYRASAKKAQICLQEVTYLGYSLKDGQRWLTKARKEAILSIPVPKNSRQVREFLGKAGYCRLFIPGFAELAAPLYPLTRPGTLFQWGTEQQLAFEDIKKALLSSPALGLPDITKPFELFIDENSGFAKGVLVQKLGPWKRPVAYLSKKLDTVASGWPPCLRMVAAIAILVKDAGKLTLGQPLTILTSHPVEALVRQPPNKWLSNARMTHYQAMLLDAERVHFGPTVSLNPATLLPLPSGGNHHDCLQILAETHGTRPDLTDQPLPDADLTWYTDGSSFIRNGEREAGAAVTTESEVIWAAPLPPGTSAQRAELIALTQALKMAEGKKLTVYTDSRYAFATTHVHGEIYRRRGWLTSEGKEIKNKNEILALLEALFLPKRLSIIHCPGHQKGDSPQAKGNRLADDTAKKAATETHSSLTVLPAGKRTADGSEFEKRTADGSEFESPKKKAKVE

SEQ ID NO: 1225 - protein, 2095 aa, synthetic construct
MPAAKRVKLDGGDKKYSIGLDIGTNSVGWAVITDEYKVPSKKFKVLGNTDRHSIKKNLIGALLFDSGETAEATRLKRTARRRYTRRKNRICYLQEIFSNEMAKVDDSFFHRLEESFLVEEDKKHERHPIFGNIVDEVAYHEKYPTIYHLRKKLVDSTDKADLRLIYLALAHMIKFRGHFLIEGDLNPDNSDVDKLFIQLVQTYNQLFEENPINASGVDAKAILSARLSKSRRLENLIAQLPGEKKNGLFGNLIALSLGLTPNFKSNFDLAEDAKLQLSKDTYDDDLDNLLAQIGDQYADLFLAAKNLSDAILLSDILRVNTEITKAPLSASMIKRYDEHHQDLTLLKALVRQQLPEKYKEIFFDQSKNGYAGYIDGGASQEEFYKFIKPILEKMDGTEELLVKLNREDLLRKQRTFDNGSIPHQIHLGELHAILRRQEDFYPFLKDNREKIEKILTFRIPYYVGPLARGNSRFAWMTRKSEETITPWNFEEVVDKGASAQSFIERMTNFDKNLPNEKVLPKHSLLYEYFTVYNELTKVKYVTEGMRKPAFLSGEQKKAIVDLLFKTNRKVTVKQLKEDYFKKIECFDSVEISGVEDRFNASLGTYHDLLKIIKDKDFLDNEENEDILEDIVLTLTLFEDREMIEERLKTYAHLFDDKVMKQLKRRRYTGWGRLSRKLINGIRDKQSGKTILDFLKSDGFANRNFMQLIHDDSLTFKEDIQKAQVSGQGDSLHEHIANLAGSPAIKKGILQTVKVVDELVKVMGRHKPENIVIEMARENQTTQKGQKNSRERMKRIEEGIKELGSQILKEHPVENTQLQNEKLYLYYLQNGRDMYVDQELDINRLSDYDVDHIVPQSFLKDDSIDNKVLTRSDKARGKSDNVPSEEVVKKMKNYWRQLLNAKLITQRKFDNLTKAERGGLSELDKAGFIKRQLVETRQITKHVAQILDSRMNTKYDENDKLIREVKVITLKSKLVSDFRKDFQFYKVREINNYHHAHDAYLNAVVGTALIKKYPKLESEFVYGDYKVYDVRKMIAKSEQEIGKATAKYFFYSNIMNFFKTEITLANGEIRKRPLIETNGETGEIVWDKGRDFATVRKVLSMPQVNIVKKTEVQTGGFSKESILPKRNSDKLIARKKDWDPKKYGGFDSPTVAYSVLVVAKVEKGKSKKLKSVKELLGITIMERSSFEKNPIDFLEAKGYKEVKKDLIIKLPKYSLFELENGRKRMLASAGELQKGNELALPSKYVNFLYLASHYEKLKGSPEDNEQKQLFVEQHKHYLDEIIEQISEFSKRVILADANLDKVLSAYNKHRDKPIREQAENIIHLFTLTNLGAPAAFKYFDTTIDRKRYTSTKEVLDATLIHQSITGLYETRIDLSQLGGDGGGSSPAPEAAAKGGTLQLEEEYRLFEPESTQKQEMDIWLKNFPQAWAETGGMGTAHCQAPVLIQLKATATPISIRQYPMPHEAYQGIKPHIRRMLDQGILKPCQSPWNTPLLPVKKPGTEDYRPVQDLREVNKRVEDIHPTVPNPYNLLSTLPPSHPWYTVLDLKDAFFCLRLHSESQLLFAFEWRDPEIGLSGQLTWTRLPQGFKNSPTLFNEALHSDLADFRVRYPALVLLQYVDDLLLAAATRTECLEGTKALLETLGNKGYRASAKKAQICLQEVTYLGYSLKDGQRWLTKARKEAILSIPVPKNSRQVREFLGKAGYCRLFIPGFAELAAPLYPLTRPGTLFQWGTEQQLAFEDIKKALLSSPALGLPDITKPFELFIDENSGFAKGVLVQKLGPWKRPVAYLSKKLDTVASGWPPCLRMVAAIAILVKDAGKLTLGQPLTILTSHPVEALVRQPPNKWLSNARMTHYQAMLLDAERVHFGPTVSLNPATLLPLPSGGNHHDCLQILAETHGTRPDLTDQPLPDADLTWYTDGSSFIRNGEREAGAAVTTESEVIWAAPLPPGTSAQRAELIALTQALKMAEGKKLTVYTDSRYAFATTHVHGEIYRRRGWLTSEGKEIKNKNEILALLEALFLPKRLSIIHCPGHQKGDSPQAKGNRLADDTAKKAATETHSSLTVLPAGKRTADGSEFEKRTADGSEFESPKKKAKVE

SEQ ID NO: 1226 - protein, 2087 aa, synthetic construct
MPAAKRVKLDGGDKKYSIGLDIGTNSVGWAVITDEYKVPSKKFKVLGNTDRHSIKKNLIGALLFDSGETAEATRLKRTARRRYTRRKNRICYLQEIFSNEMAKVDDSFFHRLEESFLVEEDKKHERHPIFGNIVDEVAYHEKYPTIYHLRKKLVDSTDKADLRLIYLALAHMIKFRGHFLIEGDLNPDNSDVDKLFIQLVQTYNQLFEENPINASGVDAKAILSARLSKSRRLENLIAQLPGEKKNGLFGNLIALSLGLTPNFKSNFDLAEDAKLQLSKDTYDDDLDNLLAQIGDQYADLFLAAKNLSDAILLSDILRVNTEITKAPLSASMIKRYDEHHQDLTLLKALVRQQLPEKYKEIFFDQSKNGYAGYIDGGASQEEFYKFIKPILEKMDGTEELLVKLNREDLLRKQRTFDNGSIPHQIHLGELHAILRRQEDFYPFLKDNREKIEKILTFRIPYYVGPLARGNSRFAWMTRKSEETITPWNFEEVVDKGASAQSFIERMTNFDKNLPNEKVLPKHSLLYEYFTVYNELTKVKYVTEGMRKPAFLSGEQKKAIVDLLFKTNRKVTVKQLKEDYFKKIECFDSVEISGVEDRFNASLGTYHDLLKIIKDKDFLDNEENEDILEDIVLTLTLFEDREMIEERLKTYAHLFDDKVMKQLKRRRYTGWGRLSRKLINGIRDKQSGKTILDFLKSDGFANRNFMQLIHDDSLTFKEDIQKAQVSGQGDSLHEHIANLAGSPAIKKGILQTVKVVDELVKVMGRHKPENIVIEMARENQTTQKGQKNSRERMKRIEEGIKELGSQILKEHPVENTQLQNEKLYLYYLQNGRDMYVDQELDINRLSDYDVDHIVPQSFLKDDSIDNKVLTRSDKARGKSDNVPSEEVVKKMKNYWRQLLNAKLITQRKFDNLTKAERGGLSELDKAGFIKRQLVETRQITKHVAQILDSRMNTKYDENDKLIREVKVITLKSKLVSDFRKDFQFYKVREINNYHHAHDAYLNAVVGTALIKKYPKLESEFVYGDYKVYDVRKMIAKSEQEIGKATAKYFFYSNIMNFFKTEITLANGEIRKRPLIETNGETGEIVWDKGRDFATVRKVLSMPQVNIVKKTEVQTGGFSKESILPKRNSDKLIARKKDWDPKKYGGFDSPTVAYSVLVVAKVEKGKSKKLKSVKELLGITIMERSSFEKNPIDFLEAKGYKEVKKDLIIKLPKYSLFELENGRKRMLASAGELQKGNELALPSKYVNFLYLASHYEKLKGSPEDNEQKQLFVEQHKHYLDEIIEQISEFSKRVILADANLDKVLSAYNKHRDKPIREQAENIIHLFTLTNLGAPAAFKYFDTTIDRKRYTSTKEVLDATLIHQSITGLYETRIDLSQLGGDGGGSSGGTLQLEEEYRLFEPESTQKQEMDIWLKNFPQAWAETGGMGTAHCQAPVLIQLKATATPISIRQYPMPHEAYQGIKPHIRRMLDQGILKPCQSPWNTPLLPVKKPGTEDYRPVQDLREVNKRVEDIHPTVPNPYNLLSTLPPSHPWYTVLDLKDAFFCLRLHSESQLLFAFEWRDPEIGLSGQLTWTRLPQGFKNSPTLFNEALHSDLADFRVRYPALVLLQYVDDLLLAAATRTECLEGTKALLETLGNKGYRASAKKAQICLQEVTYLGYSLKDGQRWLTKARKEAILSIPVPKNSRQVREFLGKAGYCRLFIPGFAELAAPLYPLTRPGTLFQWGTEQQLAFEDIKKALLSSPALGLPDITKPFELFIDENSGFAKGVLVQKLGPWKRPVAYLSKKLDTVASGWPPCLRMVAAIAILVKDAGKLTLGQPLTILTSHPVEALVRQPPNKWLSNARMTHYQAMLLDAERVHFGPTVSLNPATLLPLPSGGNHHDCLQILAETHGTRPDLTDQPLPDADLTWYTDGSSFIRNGEREAGAAVTTESEVIWAAPLPPGTSAQRAELIALTQALKMAEGKKLTVYTDSRYAFATTHVHGEIYRRRGWLTSEGKEIKNKNEILALLEALFLPKRLSIIHCPGHQKGDSPQAKGNRLADDTAKKAATETHSSLTVLPAGKRTADGSEFEKRTADGSEFESPKKKAKVE

SEQ ID NO: 1227 - protein, 2095 aa, synthetic construct
MPAAKRVKLDGGDKKYSIGLDIGTNSVGWAVITDEYKVPSKKFKVLGNTDRHSIKKNLIGALLFDSGETAEATRLKRTARRRYTRRKNRICYLQEIFSNEMAKVDDSFFHRLEESFLVEEDKKHERHPIFGNIVDEVAYHEKYPTIYHLRKKLVDSTDKADLRLIYLALAHMIKFRGHFLIEGDLNPDNSDVDKLFIQLVQTYNQLFEENPINASGVDAKAILSARLSKSRRLENLIAQLPGEKKNGLFGNLIALSLGLTPNFKSNFDLAEDAKLQLSKDTYDDDLDNLLAQIGDQYADLFLAAKNLSDAILLSDILRVNTEITKAPLSASMIKRYDEHHQDLTLLKALVRQQLPEKYKEIFFDQSKNGYAGYIDGGASQEEFYKFIKPILEKMDGTEELLVKLNREDLLRKQRTFDNGSIPHQIHLGELHAILRRQEDFYPFLKDNREKIEKILTFRIPYYVGPLARGNSRFAWMTRKSEETITPWNFEEVVDKGASAQSFIERMTNFDKNLPNEKVLPKHSLLYEYFTVYNELTKVKYVTEGMRKPAFLSGEQKKAIVDLLFKTNRKVTVKQLKEDYFKKIECFDSVEISGVEDRFNASLGTYHDLLKIIKDKDFLDNEENEDILEDIVLTLTLFEDREMIEERLKTYAHLFDDKVMKQLKRRRYTGWGRLSRKLINGIRDKQSGKTILDFLKSDGFANRNFMQLIHDDSLTFKEDIQKAQVSGQGDSLHEHIANLAGSPAIKKGILQTVKVVDELVKVMGRHKPENIVIEMARENQTTQKGQKNSRERMKRIEEGIKELGSQILKEHPVENTQLQNEKLYLYYLQNGRDMYVDQELDINRLSDYDVDHIVPQSFLKDDSIDNKVLTRSDKARGKSDNVPSEEVVKKMKNYWRQLLNAKLITQRKFDNLTKAERGGLSELDKAGFIKRQLVETRQITKHVAQILDSRMNTKYDENDKLIREVKVITLKSKLVSDFRKDFQFYKVREINNYHHAHDAYLNAVVGTALIKKYPKLESEFVYGDYKVYDVRKMIAKSEQEIGKATAKYFFYSNIMNFFKTEITLANGEIRKRPLIETNGETGEIVWDKGRDFATVRKVLSMPQVNIVKKTEVQTGGFSKESILPKRNSDKLIARKKDWDPKKYGGFDSPTVAYSVLVVAKVEKGKSKKLKSVKELLGITIMERSSFEKNPIDFLEAKGYKEVKKDLIIKLPKYSLFELENGRKRMLASAGELQKGNELALPSKYVNFLYLASHYEKLKGSPEDNEQKQLFVEQHKHYLDEIIEQISEFSKRVILADANLDKVLSAYNKHRDKPIREQAENIIHLFTLTNLGAPAAFKYFDTTIDRKRYTSTKEVLDATLIHQSITGLYETRIDLSQLGGDGGGSSGGGEAAAKGGTLQLEEEYRLFEPESTQKQEMDIWLKNFPQAWAETGGMGTAHCQAPVLIQLKATATPISIRQYPMPHEAYQGIKPHIRRMLDQGILKPCQSPWNTPLLPVKKPGTEDYRPVQDLREVNKRVEDIHPTVPNPYNLLSTLPPSHPWYTVLDLKDAFFCLRLHSESQLLFAFEWRDPEIGLSGQLTWTRLPQGFKNSPTLFNEALHSDLADFRVRYPALVLLQYVDDLLLAAATRTECLEGTKALLETLGNKGYRASAKKAQICLQEVTYLGYSLKDGQRWLTKARKEAILSIPVPKNSRQVREFLGKAGYCRLFIPGFAELAAPLYPLTRPGTLFQWGTEQQLAFEDIKKALLSSPALGLPDITKPFELFIDENSGFAKGVLVQKLGPWKRPVAYLSKKLDTVASGWPPCLRMVAAIAILVKDAGKLTLGQPLTILTSHPVEALVRQPPNKWLSNARMTHYQAMLLDAERVHFGPTVSLNPATLLPLPSGGNHHDCLQILAETHGTRPDLTDQPLPDADLTWYTDGSSFIRNGEREAGAAVTTESEVIWAAPLPPGTSAQRAELIALTQALKMAEGKKLTVYTDSRYAFATTHVHGEIYRRRGWLTSEGKEIKNKNEILALLEALFLPKRLSIIHCPGHQKGDSPQAKGNRLADDTAKKAATETHSSLTVLPAGKRTADGSEFEKRTADGSEFESPKKKAKVE

SEQ ID NO: 1228 - protein, 2090 aa, synthetic construct
MPAAKRVKLDGGDKKYSIGLDIGTNSVGWAVITDEYKVPSKKFKVLGNTDRHSIKKNLIGALLFDSGETAEATRLKRTARRRYTRRKNRICYLQEIFSNEMAKVDDSFFHRLEESFLVEEDKKHERHPIFGNIVDEVAYHEKYPTIYHLRKKLVDSTDKADLRLIYLALAHMIKFRGHFLIEGDLNPDNSDVDKLFIQLVQTYNQLFEENPINASGVDAKAILSARLSKSRRLENLIAQLPGEKKNGLFGNLIALSLGLTPNFKSNFDLAEDAKLQLSKDTYDDDLDNLLAQIGDQYADLFLAAKNLSDAILLSDILRVNTEITKAPLSASMIKRYDEHHQDLTLLKALVRQQLPEKYKEIFFDQSKNGYAGYIDGGASQEEFYKFIKPILEKMDGTEELLVKLNREDLLRKQRTFDNGSIPHQIHLGELHAILRRQEDFYPFLKDNREKIEKILTFRIPYYVGPLARGNSRFAWMTRKSEETITPWNFEEVVDKGASAQSFIERMTNFDKNLPNEKVLPKHSLLYEYFTVYNELTKVKYVTEGMRKPAFLSGEQKKAIVDLLFKTNRKVTVKQLKEDYFKKIECFDSVEISGVEDRFNASLGTYHDLLKIIKDKDFLDNEENEDILEDIVLTLTLFEDREMIEERLKTYAHLFDDKVMKQLKRRRYTGWGRLSRKLINGIRDKQSGKTILDFLKSDGFANRNFMQLIHDDSLTFKEDIQKAQVSGQGDSLHEHIANLAGSPAIKKGILQTVKVVDELVKVMGRHKPENIVIEMARENQTTQKGQKNSRERMKRIEEGIKELGSQILKEHPVENTQLQNEKLYLYYLQNGRDMYVDQELDINRLSDYDVDHIVPQSFLKDDSIDNKVLTRSDKARGKSDNVPSEEVVKKMKNYWRQLLNAKLITQRKFDNLTKAERGGLSELDKAGFIKRQLVETRQITKHVAQILDSRMNTKYDENDKLIREVKVITLKSKLVSDFRKDFQFYKVREINNYHHAHDAYLNAVVGTALIKKYPKLESEFVYGDYKVYDVRKMIAKSEQEIGKATAKYFFYSNIMNFFKTEITLANGEIRKRPLIETNGETGEIVWDKGRDFATVRKVLSMPQVNIVKKTEVQTGGFSKESILPKRNSDKLIARKKDWDPKKYGGFDSPTVAYSVLVVAKVEKGKSKKLKSVKELLGITIMERSSFEKNPIDFLEAKGYKEVKKDLIIKLPKYSLFELENGRKRMLASAGELQKGNELALPSKYVNFLYLASHYEKLKGSPEDNEQKQLFVEQHKHYLDEIIEQISEFSKRVILADANLDKVLSAYNKHRDKPIREQAENIIHLFTLTNLGAPAAFKYFDTTIDRKRYTSTKEVLDATLIHQSITGLYETRIDLSQLGGDGGPAPGGSGGTLQLEEEYRLFEPESTQKQEMDIWLKNFPQAWAETGGMGTAHCQAPVLIQLKATATPISIRQYPMPHEAYQGIKPHIRRMLDQGILKPCQSPWNTPLLPVKKPGTEDYRPVQDLREVNKRVEDIHPTVPNPYNLLSTLPPSHPWYTVLDLKDAFFCLRLHSESQLLFAFEWRDPEIGLSGQLTWTRLPQGFKNSPTLFNEALHSDLADFRVRYPALVLLQYVDDLLLAAATRTECLEGTKALLETLGNKGYRASAKKAQICLQEVTYLGYSLKDGQRWLTKARKEAILSIPVPKNSRQVREFLGKAGYCRLFIPGFAELAAPLYPLTRPGTLFQWGTEQQLAFEDIKKALLSSPALGLPDITKPFELFIDENSGFAKGVLVQKLGPWKRPVAYLSKKLDTVASGWPPCLRMVAAIAILVKDAGKLTLGQPLTILTSHPVEALVRQPPNKWLSNARMTHYQAMLLDAERVHFGPTVSLNPATLLPLPSGGNHHDCLQILAETHGTRPDLTDQPLPDADLTWYTDGSSFIRNGEREAGAAVTTESEVIWAAPLPPGTSAQRAELIALTQALKMAEGKKLTVYTDSRYAFATTHVHGEIYRRRGWLTSEGKEIKNKNEILALLEALFLPKRLSIIHCPGHQKGDSPQAKGNRLADDTAKKAATETHSSLTVLPAGKRTADGSEFEKRTADGSEFESPKKKAKVE

SEQ ID NO: 1229 - protein, 2090 aa, synthetic construct
MPAAKRVKLDGGDKKYSIGLDIGTNSVGWAVITDEYKVPSKKFKVLGNTDRHSIKKNLIGALLFDSGETAEATRLKRTARRRYTRRKNRICYLQEIFSNEMAKVDDSFFHRLEESFLVEEDKKHERHPIFGNIVDEVAYHEKYPTIYHLRKKLVDSTDKADLRLIYLALAHMIKFRGHFLIEGDLNPDNSDVDKLFIQLVQTYNQLFEENPINASGVDAKAILSARLSKSRRLENLIAQLPGEKKNGLFGNLIALSLGLTPNFKSNFDLAEDAKLQLSKDTYDDDLDNLLAQIGDQYADLFLAAKNLSDAILLSDILRVNTEITKAPLSASMIKRYDEHHQDLTLLKALVRQQLPEKYKEIFFDQSKNGYAGYIDGGASQEEFYKFIKPILEKMDGTEELLVKLNREDLLRKQRTFDNGSIPHQIHLGELHAILRRQEDFYPFLKDNREKIEKILTFRIPYYVGPLARGNSRFAWMTRKSEETITPWNFEEVVDKGASAQSFIERMTNFDKNLPNEKVLPKHSLLYEYFTVYNELTKVKYVTEGMRKPAFLSGEQKKAIVDLLFKTNRKVTVKQLKEDYFKKIECFDSVEISGVEDRFNASLGTYHDLLKIIKDKDFLDNEENEDILEDIVLTLTLFEDREMIEERLKTYAHLFDDKVMKQLKRRRYTGWGRLSRKLINGIRDKQSGKTILDFLKSDGFANRNFMQLIHDDSLTFKEDIQKAQVSGQGDSLHEHIANLAGSPAIKKGILQTVKVVDELVKVMGRHKPENIVIEMARENQTTQKGQKNSRERMKRIEEGIKELGSQILKEHPVENTQLQNEKLYLYYLQNGRDMYVDQELDINRLSDYDVDHIVPQSFLKDDSIDNKVLTRSDKARGKSDNVPSEEVVKKMKNYWRQLLNAKLITQRKFDNLTKAERGGLSELDKAGFIKRQLVETRQITKHVAQILDSRMNTKYDENDKLIREVKVITLKSKLVSDFRKDFQFYKVREINNYHHAHDAYLNAVVGTALIKKYPKLESEFVYGDYKVYDVRKMIAKSEQEIGKATAKYFFYSNIMNFFKTEITLANGEIRKRPLIETNGETGEIVWDKGRDFATVRKVLSMPQVNIVKKTEVQTGGFSKESILPKRNSDKLIARKKDWDPKKYGGFDSPTVAYSVLVVAKVEKGKSKKLKSVKELLGITIMERSSFEKNPIDFLEAKGYKEVKKDLIIKLPKYSLFELENGRKRMLASAGELQKGNELALPSKYVNFLYLASHYEKLKGSPEDNEQKQLFVEQHKHYLDEIIEQISEFSKRVILADANLDKVLSAYNKHRDKPIREQAENIIHLFTLTNLGAPAAFKYFDTTIDRKRYTSTKEVLDATLIHQSITGLYETRIDLSQLGGDGGGGGPAPGGTLQLEEEYRLFEPESTQKQEMDIWLKNFPQAWAETGGMGTAHCQAPVLIQLKATATPISIRQYPMPHEAYQGIKPHIRRMLDQGILKPCQSPWNTPLLPVKKPGTEDYRPVQDLREVNKRVEDIHPTVPNPYNLLSTLPPSHPWYTVLDLKDAFFCLRLHSESQLLFAFEWRDPEIGLSGQLTWTRLPQGFKNSPTLFNEALHSDLADFRVRYPALVLLQYVDDLLLAAATRTECLEGTKALLETLGNKGYRASAKKAQICLQEVTYLGYSLKDGQRWLTKARKEAILSIPVPKNSRQVREFLGKAGYCRLFIPGFAELAAPLYPLTRPGTLFQWGTEQQLAFEDIKKALLSSPALGLPDITKPFELFIDENSGFAKGVLVQKLGPWKRPVAYLSKKLDTVASGWPPCLRMVAAIAILVKDAGKLTLGQPLTILTSHPVEALVRQPPNKWLSNARMTHYQAMLLDAERVHFGPTVSLNPATLLPLPSGGNHHDCLQILAETHGTRPDLTDQPLPDADLTWYTDGSSFIRNGEREAGAAVTTESEVIWAAPLPPGTSAQRAELIALTQALKMAEGKKLTVYTDSRYAFATTHVHGEIYRRRGWLTSEGKEIKNKNEILALLEALFLPKRLSIIHCPGHQKGDSPQAKGNRLADDTAKKAATETHSSLTVLPAGKRTADGSEFEKRTADGSEFESPKKKAKVE

SEQ ID NO: 1230 - protein, 2092 aa, synthetic construct
MPAAKRVKLDGGDKKYSIGLDIGTNSVGWAVITDEYKVPSKKFKVLGNTDRHSIKKNLIGALLFDSGETAEATRLKRTARRRYTRRKNRICYLQEIFSNEMAKVDDSFFHRLEESFLVEEDKKHERHPIFGNIVDEVAYHEKYPTIYHLRKKLVDSTDKADLRLIYLALAHMIKFRGHFLIEGDLNPDNSDVDKLFIQLVQTYNQLFEENPINASGVDAKAILSARLSKSRRLENLIAQLPGEKKNGLFGNLIALSLGLTPNFKSNFDLAEDAKLQLSKDTYDDDLDNLLAQIGDQYADLFLAAKNLSDAILLSDILRVNTEITKAPLSASMIKRYDEHHQDLTLLKALVRQQLPEKYKEIFFDQSKNGYAGYIDGGASQEEFYKFIKPILEKMDGTEELLVKLNREDLLRKQRTFDNGSIPHQIHLGELHAILRRQEDFYPFLKDNREKIEKILTFRIPYYVGPLARGNSRFAWMTRKSEETITPWNFEEVVDKGASAQSFIERMTNFDKNLPNEKVLPKHSLLYEYFTVYNELTKVKYVTEGMRKPAFLSGEQKKAIVDLLFKTNRKVTVKQLKEDYFKKIECFDSVEISGVEDRFNASLGTYHDLLKIIKDKDFLDNEENEDILEDIVLTLTLFEDREMIEERLKTYAHLFDDKVMKQLKRRRYTGWGRLSRKLINGIRDKQSGKTILDFLKSDGFANRNFMQLIHDDSLTFKEDIQKAQVSGQGDSLHEHIANLAGSPAIKKGILQTVKVVDELVKVMGRHKPENIVIEMARENQTTQKGQKNSRERMKRIEEGIKELGSQILKEHPVENTQLQNEKLYLYYLQNGRDMYVDQELDINRLSDYDVDHIVPQSFLKDDSIDNKVLTRSDKARGKSDNVPSEEVVKKMKNYWRQLLNAKLITQRKFDNLTKAERGGLSELDKAGFIKRQLVETRQITKHVAQILDSRMNTKYDENDKLIREVKVITLKSKLVSDFRKDFQFYKVREINNYHHAHDAYLNAVVGTALIKKYPKLESEFVYGDYKVYDVRKMIAKSEQEIGKATAKYFFYSNIMNFFKTEITLANGEIRKRPLIETNGETGEIVWDKGRDFATVRKVLSMPQVNIVKKTEVQTGGFSKESILPKRNSDKLIARKKDWDPKKYGGFDSPTVAYSVLVVAKVEKGKSKKLKSVKELLGITIMERSSFEKNPIDFLEAKGYKEVKKDLIIKLPKYSLFELENGRKRMLASAGELQKGNELALPSKYVNFLYLASHYEKLKGSPEDNEQKQLFVEQHKHYLDEIIEQISEFSKRVILADANLDKVLSAYNKHRDKPIREQAENIIHLFTLTNLGAPAAFKYFDTTIDRKRYTSTKEVLDATLIHQSITGLYETRIDLSQLGGDGGPAPEAAAKGGTLQLEEEYRLFEPESTQKQEMDIWLKNFPQAWAETGGMGTAHCQAPVLIQLKATATPISIRQYPMPHEAYQGIKPHIRRMLDQGILKPCQSPWNTPLLPVKKPGTEDYRPVQDLREVNKRVEDIHPTVPNPYNLLSTLPPSHPWYTVLDLKDAFFCLRLHSESQLLFAFEWRDPEIGLSGQLTWTRLPQGFKNSPTLFNEALHSDLADFRVRYPALVLLQYVDDLLLAAATRTECLEGTKALLETLGNKGYRASAKKAQICLQEVTYLGYSLKDGQRWLTKARKEAILSIPVPKNSRQVREFLGKAGYCRLFIPGFAELAAPLYPLTRPGTLFQWGTEQQLAFEDIKKALLSSPALGLPDITKPFELFIDENSGFAKGVLVQKLGPWKRPVAYLSKKLDTVASGWPPCLRMVAAIAILVKDAGKLTLGQPLTILTSHPVEALVRQPPNKWLSNARMTHYQAMLLDAERVHFGPTVSLNPATLLPLPSGGNHHDCLQILAETHGTRPDLTDQPLPDADLTWYTDGSSFIRNGEREAGAAVTTESEVIWAAPLPPGTSAQRAELIALTQALKMAEGKKLTVYTDSRYAFATTHVHGEIYRRRGWLTSEGKEIKNKNEILALLEALFLPKRLSIIHCPGHQKGDSPQAKGNRLADDTAKKAATETHSSLTVLPAGKRTADGSEFEKRTADGSEFESPKKKAKVE

SEQ ID NO: 1231 - protein, 2099 aa, synthetic construct
MPAAKRVKLDGGDKKYSIGLDIGTNSVGWAVITDEYKVPSKKFKVLGNTDRHSIKKNLIGALLFDSGETAEATRLKRTARRRYTRRKNRICYLQEIFSNEMAKVDDSFFHRLEESFLVEEDKKHERHPIFGNIVDEVAYHEKYPTIYHLRKKLVDSTDKADLRLIYLALAHMIKFRGHFLIEGDLNPDNSDVDKLFIQLVQTYNQLFEENPINASGVDAKAILSARLSKSRRLENLIAQLPGEKKNGLFGNLIALSLGLTPNFKSNFDLAEDAKLQLSKDTYDDDLDNLLAQIGDQYADLFLAAKNLSDAILLSDILRVNTEITKAPLSASMIKRYDEHHQDLTLLKALVRQQLPEKYKEIFFDQSKNGYAGYIDGGASQEEFYKFIKPILEKMDGTEELLVKLNREDLLRKQRTFDNGSIPHQIHLGELHAILRRQEDFYPFLKDNREKIEKILTFRIPYYVGPLARGNSRFAWMTRKSEETITPWNFEEVVDKGASAQSFIERMTNFDKNLPNEKVLPKHSLLYEYFTVYNELTKVKYVTEGMRKPAFLSGEQKKAIVDLLFKTNRKVTVKQLKEDYFKKIECFDSVEISGVEDRFNASLGTYHDLLKIIKDKDFLDNEENEDILEDIVLTLTLFEDREMIEERLKTYAHLFDDKVMKQLKRRRYTGWGRLSRKLINGIRDKQSGKTILDFLKSDGFANRNFMQLIHDDSLTFKEDIQKAQVSGQGDSLHEHIANLAGSPAIKKGILQTVKVVDELVKVMGRHKPENIVIEMARENQTTQKGQKNSRERMKRIEEGIKELGSQILKEHPVENTQLQNEKLYLYYLQNGRDMYVDQELDINRLSDYDVDHIVPQSFLKDDSIDNKVLTRSDKARGKSDNVPSEEVVKKMKNYWRQLLNAKLITQRKFDNLTKAERGGLSELDKAGFIKRQLVETRQITKHVAQILDSRMNTKYDENDKLIREVKVITLKSKLVSDFRKDFQFYKVREINNYHHAHDAYLNAVVGTALIKKYPKLESEFVYGDYKVYDVRKMIAKSEQEIGKATAKYFFYSNIMNFFKTEITLANGEIRKRPLIETNGETGEIVWDKGRDFATVRKVLSMPQVNIVKKTEVQTGGFSKESILPKRNSDKLIARKKDWDPKKYGGFDSPTVAYSVLVVAKVEKGKSKKLKSVKELLGITIMERSSFEKNPIDFLEAKGYKEVKKDLIIKLPKYSLFELENGRKRMLASAGELQKGNELALPSKYVNFLYLASHYEKLKGSPEDNEQKQLFVEQHKHYLDEIIEQISEFSKRVILADANLDKVLSAYNKHRDKPIREQAENIIHLFTLTNLGAPAAFKYFDTTIDRKRYTSTKEVLDATLIHQSITGLYETRIDLSQLGGDGGGGGGSGGGGSGGGGSGGTLQLEEEYRLFEPESTQKQEMDIWLKNFPQAWAETGGMGTAHCQAPVLIQLKATATPISIRQYPMPHEAYQGIKPHIRRMLDQGILKPCQSPWNTPLLPVKKPGTEDYRPVQDLREVNKRVEDIHPTVPNPYNLLSTLPPSHPWYTVLDLKDAFFCLRLHSESQLLFAFEWRDPEIGLSGQLTWTRLPQGFKNSPTLFNEALHSDLADFRVRYPALVLLQYVDDLLLAAATRTECLEGTKALLETLGNKGYRASAKKAQICLQEVTYLGYSLKDGQRWLTKARKEAILSIPVPKNSRQVREFLGKAGYCRLFIPGFAELAAPLYPLTRPGTLFQWGTEQQLAFEDIKKALLSSPALGLPDITKPFELFIDENSGFAKGVLVQKLGPWKRPVAYLSKKLDTVASGWPPCLRMVAAIAILVKDAGKLTLGQPLTILTSHPVEALVRQPPNKWLSNARMTHYQAMLLDAERVHFGPTVSLNPATLLPLPSGGNHHDCLQILAETHGTRPDLTDQPLPDADLTWYTDGSSFIRNGEREAGAAVTTESEVIWAAPLPPGTSAQRAELIALTQALKMAEGKKLTVYTDSRYAFATTHVHGEIYRRRGWLTSEGKEIKNKNEILALLEALFLPKRLSIIHCPGHQKGDSPQAKGNRLADDTAKKAATETHSSLTVLPAGKRTADGSEFEKRTADGSEFESPKKKAKVE

SEQ ID NO: 1232 - protein, 2095 aa, synthetic construct
MPAAKRVKLDGGDKKYSIGLDIGTNSVGWAVITDEYKVPSKKFKVLGNTDRHSIKKNLIGALLFDSGETAEATRLKRTARRRYTRRKNRICYLQEIFSNEMAKVDDSFFHRLEESFLVEEDKKHERHPIFGNIVDEVAYHEKYPTIYHLRKKLVDSTDKADLRLIYLALAHMIKFRGHFLIEGDLNPDNSDVDKLFIQLVQTYNQLFEENPINASGVDAKAILSARLSKSRRLENLIAQLPGEKKNGLFGNLIALSLGLTPNFKSNFDLAEDAKLQLSKDTYDDDLDNLLAQIGDQYADLFLAAKNLSDAILLSDILRVNTEITKAPLSASMIKRYDEHHQDLTLLKALVRQQLPEKYKEIFFDQSKNGYAGYIDGGASQEEFYKFIKPILEKMDGTEELLVKLNREDLLRKQRTFDNGSIPHQIHLGELHAILRRQEDFYPFLKDNREKIEKILTFRIPYYVGPLARGNSRFAWMTRKSEETITPWNFEEVVDKGASAQSFIERMTNFDKNLPNEKVLPKHSLLYEYFTVYNELTKVKYVTEGMRKPAFLSGEQKKAIVDLLFKTNRKVTVKQLKEDYFKKIECFDSVEISGVEDRFNASLGTYHDLLKIIKDKDFLDNEENEDILEDIVLTLTLFEDREMIEERLKTYAHLFDDKVMKQLKRRRYTGWGRLSRKLINGIRDKQSGKTILDFLKSDGFANRNFMQLIHDDSLTFKEDIQKAQVSGQGDSLHEHIANLAGSPAIKKGILQTVKVVDELVKVMGRHKPENIVIEMARENQTTQKGQKNSRERMKRIEEGIKELGSQILKEHPVENTQLQNEKLYLYYLQNGRDMYVDQELDINRLSDYDVDHIVPQSFLKDDSIDNKVLTRSDKARGKSDNVPSEEVVKKMKNYWRQLLNAKLITQRKFDNLTKAERGGLSELDKAGFIKRQLVETRQITKHVAQILDSRMNTKYDENDKLIREVKVITLKSKLVSDFRKDFQFYKVREINNYHHAHDAYLNAVVGTALIKKYPKLESEFVYGDYKVYDVRKMIAKSEQEIGKATAKYFFYSNIMNFFKTEITLANGEIRKRPLIETNGETGEIVWDKGRDFATVRKVLSMPQVNIVKKTEVQTGGFSKESILPKRNSDKLIARKKDWDPKKYGGFDSPTVAYSVLVVAKVEKGKSKKLKSVKELLGITIMERSSFEKNPIDFLEAKGYKEVKKDLIIKLPKYSLFELENGRKRMLASAGELQKGNELALPSKYVNFLYLASHYEKLKGSPEDNEQKQLFVEQHKHYLDEIIEQISEFSKRVILADANLDKVLSAYNKHRDKPIREQAENIIHLFTLTNLGAPAAFKYFDTTIDRKRYTSTKEVLDATLIHQSITGLYETRIDLSQLGGDGGPAPAPAPAPAPGGTLQLEEEYRLFEPESTQKQEMDIWLKNFPQAWAETGGMGTAHCQAPVLIQLKATATPISIRQYPMPHEAYQGIKPHIRRMLDQGILKPCQSPWNTPLLPVKKPGTEDYRPVQDLREVNKRVEDIHPTVPNPYNLLSTLPPSHPWYTVLDLKDAFFCLRLHSESQLLFAFEWRDPEIGLSGQLTWTRLPQGFKNSPTLFNEALHSDLADFRVRYPALVLLQYVDDLLLAAATRTECLEGTKALLETLGNKGYRASAKKAQICLQEVTYLGYSLKDGQRWLTKARKEAILSIPVPKNSRQVREFLGKAGYCRLFIPGFAELAAPLYPLTRPGTLFQWGTEQQLAFEDIKKALLSSPALGLPDITKPFELFIDENSGFAKGVLVQKLGPWKRPVAYLSKKLDTVASGWPPCLRMVAAIAILVKDAGKLTLGQPLTILTSHPVEALVRQPPNKWLSNARMTHYQAMLLDAERVHFGPTVSLNPATLLPLPSGGNHHDCLQILAETHGTRPDLTDQPLPDADLTWYTDGSSFIRNGEREAGAAVTTESEVIWAAPLPPGTSAQRAELIALTQALKMAEGKKLTVYTDSRYAFATTHVHGEIYRRRGWLTSEGKEIKNKNEILALLEALFLPKRLSIIHCPGHQKGDSPQAKGNRLADDTAKKAATETHSSLTVLPAGKRTADGSEFEKRTADGSEFESPKKKAKVE

SEQ ID NO: 1233 - protein, 2094 aa, synthetic construct
MPAAKRVKLDGGDKKYSIGLDIGTNSVGWAVITDEYKVPSKKFKVLGNTDRHSIKKNLIGALLFDSGETAEATRLKRTARRRYTRRKNRICYLQEIFSNEMAKVDDSFFHRLEESFLVEEDKKHERHPIFGNIVDEVAYHEKYPTIYHLRKKLVDSTDKADLRLIYLALAHMIKFRGHFLIEGDLNPDNSDVDKLFIQLVQTYNQLFEENPINASGVDAKAILSARLSKSRRLENLIAQLPGEKKNGLFGNLIALSLGLTPNFKSNFDLAEDAKLQLSKDTYDDDLDNLLAQIGDQYADLFLAAKNLSDAILLSDILRVNTEITKAPLSASMIKRYDEHHQDLTLLKALVRQQLPEKYKEIFFDQSKNGYAGYIDGGASQEEFYKFIKPILEKMDGTEELLVKLNREDLLRKQRTFDNGSIPHQIHLGELHAILRRQEDFYPFLKDNREKIEKILTFRIPYYVGPLARGNSRFAWMTRKSEETITPWNFEEVVDKGASAQSFIERMTNFDKNLPNEKVLPKHSLLYEYFTVYNELTKVKYVTEGMRKPAFLSGEQKKAIVDLLFKTNRKVTVKQLKEDYFKKIECFDSVEISGVEDRFNASLGTYHDLLKIIKDKDFLDNEENEDILEDIVLTLTLFEDREMIEERLKTYAHLFDDKVMKQLKRRRYTGWGRLSRKLINGIRDKQSGKTILDFLKSDGFANRNFMQLIHDDSLTFKEDIQKAQVSGQGDSLHEHIANLAGSPAIKKGILQTVKVVDELVKVMGRHKPENIVIEMARENQTTQKGQKNSRERMKRIEEGIKELGSQILKEHPVENTQLQNEKLYLYYLQNGRDMYVDQELDINRLSDYDVDHIVPQSFLKDDSIDNKVLTRSDKARGKSDNVPSEEVVKKMKNYWRQLLNAKLITQRKFDNLTKAERGGLSELDKAGFIKRQLVETRQITKHVAQILDSRMNTKYDENDKLIREVKVITLKSKLVSDFRKDFQFYKVREINNYHHAHDAYLNAVVGTALIKKYPKLESEFVYGDYKVYDVRKMIAKSEQEIGKATAKYFFYSNIMNFFKTEITLANGEIRKRPLIETNGETGEIVWDKGRDFATVRKVLSMPQVNIVKKTEVQTGGFSKESILPKRNSDKLIARKKDWDPKKYGGFDSPTVAYSVLVVAKVEKGKSKKLKSVKELLGITIMERSSFEKNPIDFLEAKGYKEVKKDLIIKLPKYSLFELENGRKRMLASAGELQKGNELALPSKYVNFLYLASHYEKLKGSPEDNEQKQLFVEQHKHYLDEIIEQISEFSKRVILADANLDKVLSAYNKHRDKPIREQAENIIHLFTLTNLGAPAAFKYFDTTIDRKRYTSTKEVLDATLIHQSITGLYETRIDLSQLGGDGGGGGGSGGGGSGGTLQLEEEYRLFEPESTQKQEMDIWLKNFPQAWAETGGMGTAHCQAPVLIQLKATATPISIRQYPMPHEAYQGIKPHIRRMLDQGILKPCQSPWNTPLLPVKKPGTEDYRPVQDLREVNKRVEDIHPTVPNPYNLLSTLPPSHPWYTVLDLKDAFFCLRLHSESQLLFAFEWRDPEIGLSGQLTWTRLPQGFKNSPTLFNEALHSDLADFRVRYPALVLLQYVDDLLLAAATRTECLEGTKALLETLGNKGYRASAKKAQICLQEVTYLGYSLKDGQRWLTKARKEAILSIPVPKNSRQVREFLGKAGYCRLFIPGFAELAAPLYPLTRPGTLFQWGTEQQLAFEDIKKALLSSPALGLPDITKPFELFIDENSGFAKGVLVQKLGPWKRPVAYLSKKLDTVASGWPPCLRMVAAIAILVKDAGKLTLGQPLTILTSHPVEALVRQPPNKWLSNARMTHYQAMLLDAERVHFGPTVSLNPATLLPLPSGGNHHDCLQILAETHGTRPDLTDQPLPDADLTWYTDGSSFIRNGEREAGAAVTTESEVIWAAPLPPGTSAQRAELIALTQALKMAEGKKLTVYTDSRYAFATTHVHGEIYRRRGWLTSEGKEIKNKNEILALLEALFLPKRLSIIHCPGHQKGDSPQAKGNRLADDTAKKAATETHSSLTVLPAGKRTADGSEFEKRTADGSEFESPKKKAKVE

SEQ ID NO: 1234 - protein, 2095 aa, synthetic construct
MPAAKRVKLDGGDKKYSIGLDIGTNSVGWAVITDEYKVPSKKFKVLGNTDRHSIKKNLIGALLFDSGETAEATRLKRTARRRYTRRKNRICYLQEIFSNEMAKVDDSFFHRLEESFLVEEDKKHERHPIFGNIVDEVAYHEKYPTIYHLRKKLVDSTDKADLRLIYLALAHMIKFRGHFLIEGDLNPDNSDVDKLFIQLVQTYNQLFEENPINASGVDAKAILSARLSKSRRLENLIAQLPGEKKNGLFGNLIALSLGLTPNFKSNFDLAEDAKLQLSKDTYDDDLDNLLAQIGDQYADLFLAAKNLSDAILLSDILRVNTEITKAPLSASMIKRYDEHHQDLTLLKALVRQQLPEKYKEIFFDQSKNGYAGYIDGGASQEEFYKFIKPILEKMDGTEELLVKLNREDLLRKQRTFDNGSIPHQIHLGELHAILRRQEDFYPFLKDNREKIEKILTFRIPYYVGPLARGNSRFAWMTRKSEETITPWNFEEVVDKGASAQSFIERMTNFDKNLPNEKVLPKHSLLYEYFTVYNELTKVKYVTEGMRKPAFLSGEQKKAIVDLLFKTNRKVTVKQLKEDYFKKIECFDSVEISGVEDRFNASLGTYHDLLKIIKDKDFLDNEENEDILEDIVLTLTLFEDREMIEERLKTYAHLFDDKVMKQLKRRRYTGWGRLSRKLINGIRDKQSGKTILDFLKSDGFANRNFMQLIHDDSLTFKEDIQKAQVSGQGDSLHEHIANLAGSPAIKKGILQTVKVVDELVKVMGRHKPENIVIEMARENQTTQKGQKNSRERMKRIEEGIKELGSQILKEHPVENTQLQNEKLYLYYLQNGRDMYVDQELDINRLSDYDVDHIVPQSFLKDDSIDNKVLTRSDKARGKSDNVPSEEVVKKMKNYWRQLLNAKLITQRKFDNLTKAERGGLSELDKAGFIKRQLVETRQITKHVAQILDSRMNTKYDENDKLIREVKVITLKSKLVSDFRKDFQFYKVREINNYHHAHDAYLNAVVGTALIKKYPKLESEFVYGDYKVYDVRKMIAKSEQEIGKATAKYFFYSNIMNFFKTEITLANGEIRKRPLIETNGETGEIVWDKGRDFATVRKVLSMPQVNIVKKTEVQTGGFSKESILPKRNSDKLIARKKDWDPKKYGGFDSPTVAYSVLVVAKVEKGKSKKLKSVKELLGITIMERSSFEKNPIDFLEAKGYKEVKKDLIIKLPKYSLFELENGRKRMLASAGELQKGNELALPSKYVNFLYLASHYEKLKGSPEDNEQKQLFVEQHKHYLDEIIEQISEFSKRVILADANLDKVLSAYNKHRDKPIREQAENIIHLFTLTNLGAPAAFKYFDTTIDRKRYTSTKEVLDATLIHQSITGLYETRIDLSQLGGDGGEAAAKGSSGGSGGTLQLEEEYRLFEPESTQKQEMDIWLKNFPQAWAETGGMGTAHCQAPVLIQLKATATPISIRQYPMPHEAYQGIKPHIRRMLDQGILKPCQSPWNTPLLPVKKPGTEDYRPVQDLREVNKRVEDIHPTVPNPYNLLSTLPPSHPWYTVLDLKDAFFCLRLHSESQLLFAFEWRDPEIGLSGQLTWTRLPQGFKNSPTLFNEALHSDLADFRVRYPALVLLQYVDDLLLAAATRTECLEGTKALLETLGNKGYRASAKKAQICLQEVTYLGYSLKDGQRWLTKARKEAILSIPVPKNSRQVREFLGKAGYCRLFIPGFAELAAPLYPLTRPGTLFQWGTEQQLAFEDIKKALLSSPALGLPDITKPFELFIDENSGFAKGVLVQKLGPWKRPVAYLSKKLDTVASGWPPCLRMVAAIAILVKDAGKLTLGQPLTILTSHPVEALVRQPPNKWLSNARMTHYQAMLLDAERVHFGPTVSLNPATLLPLPSGGNHHDCLQILAETHGTRPDLTDQPLPDADLTWYTDGSSFIRNGEREAGAAVTTESEVIWAAPLPPGTSAQRAELIALTQALKMAEGKKLTVYTDSRYAFATTHVHGEIYRRRGWLTSEGKEIKNKNEILALLEALFLPKRLSIIHCPGHQKGDSPQAKGNRLADDTAKKAATETHSSLTVLPAGKRTADGSEFEKRTADGSEFESPKKKAKVE

SEQ ID NO: 1235 - protein, 2095 aa, synthetic construct
MPAAKRVKLDGGDKKYSIGLDIGTNSVGWAVITDEYKVPSKKFKVLGNTDRHSIKKNLIGALLFDSGETAEATRLKRTARRRYTRRKNRICYLQEIFSNEMAKVDDSFFHRLEESFLVEEDKKHERHPIFGNIVDEVAYHEKYPTIYHLRKKLVDSTDKADLRLIYLALAHMIKFRGHFLIEGDLNPDNSDVDKLFIQLVQTYNQLFEENPINASGVDAKAILSARLSKSRRLENLIAQLPGEKKNGLFGNLIALSLGLTPNFKSNFDLAEDAKLQLSKDTYDDDLDNLLAQIGDQYADLFLAAKNLSDAILLSDILRVNTEITKAPLSASMIKRYDEHHQDLTLLKALVRQQLPEKYKEIFFDQSKNGYAGYIDGGASQEEFYKFIKPILEKMDGTEELLVKLNREDLLRKQRTFDNGSIPHQIHLGELHAILRRQEDFYPFLKDNREKIEKILTFRIPYYVGPLARGNSRFAWMTRKSEETITPWNFEEVVDKGASAQSFIERMTNFDKNLPNEKVLPKHSLLYEYFTVYNELTKVKYVTEGMRKPAFLSGEQKKAIVDLLFKTNRKVTVKQLKEDYFKKIECFDSVEISGVEDRFNASLGTYHDLLKIIKDKDFLDNEENEDILEDIVLTLTLFEDREMIEERLKTYAHLFDDKVMKQLKRRRYTGWGRLSRKLINGIRDKQSGKTILDFLKSDGFANRNFMQLIHDDSLTFKEDIQKAQVSGQGDSLHEHIANLAGSPAIKKGILQTVKVVDELVKVMGRHKPENIVIEMARENQTTQKGQKNSRERMKRIEEGIKELGSQILKEHPVENTQLQNEKLYLYYLQNGRDMYVDQELDINRLSDYDVDHIVPQSFLKDDSIDNKVLTRSDKARGKSDNVPSEEVVKKMKNYWRQLLNAKLITQRKFDNLTKAERGGLSELDKAGFIKRQLVETRQITKHVAQILDSRMNTKYDENDKLIREVKVITLKSKLVSDFRKDFQFYKVREINNYHHAHDAYLNAVVGTALIKKYPKLESEFVYGDYKVYDVRKMIAKSEQEIGKATAKYFFYSNIMNFFKTEITLANGEIRKRPLIETNGETGEIVWDKGRDFATVRKVLSMPQVNIVKKTEVQTGGFSKESILPKRNSDKLIARKKDWDPKKYGGFDSPTVAYSVLVVAKVEKGKSKKLKSVKELLGITIMERSSFEKNPIDFLEAKGYKEVKKDLIIKLPKYSLFELENGRKRMLASAGELQKGNELALPSKYVNFLYLASHYEKLKGSPEDNEQKQLFVEQHKHYLDEIIEQISEFSKRVILADANLDKVLSAYNKHRDKPIREQAENIIHLFTLTNLGAPAAFKYFDTTIDRKRYTSTKEVLDATLIHQSITGLYETRIDLSQLGGDGGEAAAKGGGGGSGGTLQLEEEYRLFEPESTQKQEMDIWLKNFPQAWAETGGMGTAHCQAPVLIQLKATATPISIRQYPMPHEAYQGIKPHIRRMLDQGILKPCQSPWNTPLLPVKKPGTEDYRPVQDLREVNKRVEDIHPTVPNPYNLLSTLPPSHPWYTVLDLKDAFFCLRLHSESQLLFAFEWRDPEIGLSGQLTWTRLPQGFKNSPTLFNEALHSDLADFRVRYPALVLLQYVDDLLLAAATRTECLEGTKALLETLGNKGYRASAKKAQICLQEVTYLGYSLKDGQRWLTKARKEAILSIPVPKNSRQVREFLGKAGYCRLFIPGFAELAAPLYPLTRPGTLFQWGTEQQLAFEDIKKALLSSPALGLPDITKPFELFIDENSGFAKGVLVQKLGPWKRPVAYLSKKLDTVASGWPPCLRMVAAIAILVKDAGKLTLGQPLTILTSHPVEALVRQPPNKWLSNARMTHYQAMLLDAERVHFGPTVSLNPATLLPLPSGGNHHDCLQILAETHGTRPDLTDQPLPDADLTWYTDGSSFIRNGEREAGAAVTTESEVIWAAPLPPGTSAQRAELIALTQALKMAEGKKLTVYTDSRYAFATTHVHGEIYRRRGWLTSEGKEIKNKNEILALLEALFLPKRLSIIHCPGHQKGDSPQAKGNRLADDTAKKAATETHSSLTVLPAGKRTADGSEFEKRTADGSEFESPKKKAKVE

SEQ ID NO: 1236 - protein, 2092 aa, synthetic construct
MPAAKRVKLDGGDKKYSIGLDIGTNSVGWAVITDEYKVPSKKFKVLGNTDRHSIKKNLIGALLFDSGETAEATRLKRTARRRYTRRKNRICYLQEIFSNEMAKVDDSFFHRLEESFLVEEDKKHERHPIFGNIVDEVAYHEKYPTIYHLRKKLVDSTDKADLRLIYLALAHMIKFRGHFLIEGDLNPDNSDVDKLFIQLVQTYNQLFEENPINASGVDAKAILSARLSKSRRLENLIAQLPGEKKNGLFGNLIALSLGLTPNFKSNFDLAEDAKLQLSKDTYDDDLDNLLAQIGDQYADLFLAAKNLSDAILLSDILRVNTEITKAPLSASMIKRYDEHHQDLTLLKALVRQQLPEKYKEIFFDQSKNGYAGYIDGGASQEEFYKFIKPILEKMDGTEELLVKLNREDLLRKQRTFDNGSIPHQIHLGELHAILRRQEDFYPFLKDNREKIEKILTFRIPYYVGPLARGNSRFAWMTRKSEETITPWNFEEVVDKGASAQSFIERMTNFDKNLPNEKVLPKHSLLYEYFTVYNELTKVKYVTEGMRKPAFLSGEQKKAIVDLLFKTNRKVTVKQLKEDYFKKIECFDSVEISGVEDRFNASLGTYHDLLKIIKDKDFLDNEENEDILEDIVLTLTLFEDREMIEERLKTYAHLFDDKVMKQLKRRRYTGWGRLSRKLINGIRDKQSGKTILDFLKSDGFANRNFMQLIHDDSLTFKEDIQKAQVSGQGDSLHEHIANLAGSPAIKKGILQTVKVVDELVKVMGRHKPENIVIEMARENQTTQKGQKNSRERMKRIEEGIKELGSQILKEHPVENTQLQNEKLYLYYLQNGRDMYVDQELDINRLSDYDVDHIVPQSFLKDDSIDNKVLTRSDKARGKSDNVPSEEVVKKMKNYWRQLLNAKLITQRKFDNLTKAERGGLSELDKAGFIKRQLVETRQITKHVAQILDSRMNTKYDENDKLIREVKVITLKSKLVSDFRKDFQFYKVREINNYHHAHDAYLNAVVGTALIKKYPKLESEFVYGDYKVYDVRKMIAKSEQEIGKATAKYFFYSNIMNFFKTEITLANGEIRKRPLIETNGETGEIVWDKGRDFATVRKVLSMPQVNIVKKTEVQTGGFSKESILPKRNSDKLIARKKDWDPKKYGGFDSPTVAYSVLVVAKVEKGKSKKLKSVKELLGITIMERSSFEKNPIDFLEAKGYKEVKKDLIIKLPKYSLFELENGRKRMLASAGELQKGNELALPSKYVNFLYLASHYEKLKGSPEDNEQKQLFVEQHKHYLDEIIEQISEFSKRVILADANLDKVLSAYNKHRDKPIREQAENIIHLFTLTNLGAPAAFKYFDTTIDRKRYTSTKEVLDATLIHQSITGLYETRIDLSQLGGDGGGSSEAAAKGGTLQLEEEYRLFEPESTQKQEMDIWLKNFPQAWAETGGMGTAHCQAPVLIQLKATATPISIRQYPMPHEAYQGIKPHIRRMLDQGILKPCQSPWNTPLLPVKKPGTEDYRPVQDLREVNKRVEDIHPTVPNPYNLLSTLPPSHPWYTVLDLKDAFFCLRLHSESQLLFAFEWRDPEIGLSGQLTWTRLPQGFKNSPTLFNEALHSDLADFRVRYPALVLLQYVDDLLLAAATRTECLEGTKALLETLGNKGYRASAKKAQICLQEVTYLGYSLKDGQRWLTKARKEAILSIPVPKNSRQVREFLGKAGYCRLFIPGFAELAAPLYPLTRPGTLFQWGTEQQLAFEDIKKALLSSPALGLPDITKPFELFIDENSGFAKGVLVQKLGPWKRPVAYLSKKLDTVASGWPPCLRMVAAIAILVKDAGKLTLGQPLTILTSHPVEALVRQPPNKWLSNARMTHYQAMLLDAERVHFGPTVSLNPATLLPLPSGGNHHDCLQILAETHGTRPDLTDQPLPDADLTWYTDGSSFIRNGEREAGAAVTTESEVIWAAPLPPGTSAQRAELIALTQALKMAEGKKLTVYTDSRYAFATTHVHGEIYRRRGWLTSEGKEIKNKNEILALLEALFLPKRLSIIHCPGHQKGDSPQAKGNRLADDTAKKAATETHSSLTVLPAGKRTADGSEFEKRTADGSEFESPKKKAKVE

SEQ ID NO: 1237 - protein, 2095 aa, synthetic construct
MPAAKRVKLDGGDKKYSIGLDIGTNSVGWAVITDEYKVPSKKFKVLGNTDRHSIKKNLIGALLFDSGETAEATRLKRTARRRYTRRKNRICYLQEIFSNEMAKVDDSFFHRLEESFLVEEDKKHERHPIFGNIVDEVAYHEKYPTIYHLRKKLVDSTDKADLRLIYLALAHMIKFRGHFLIEGDLNPDNSDVDKLFIQLVQTYNQLFEENPINASGVDAKAILSARLSKSRRLENLIAQLPGEKKNGLFGNLIALSLGLTPNFKSNFDLAEDAKLQLSKDTYDDDLDNLLAQIGDQYADLFLAAKNLSDAILLSDILRVNTEITKAPLSASMIKRYDEHHQDLTLLKALVRQQLPEKYKEIFFDQSKNGYAGYIDGGASQEEFYKFIKPILEKMDGTEELLVKLNREDLLRKQRTFDNGSIPHQIHLGELHAILRRQEDFYPFLKDNREKIEKILTFRIPYYVGPLARGNSRFAWMTRKSEETITPWNFEEVVDKGASAQSFIERMTNFDKNLPNEKVLPKHSLLYEYFTVYNELTKVKYVTEGMRKPAFLSGEQKKAIVDLLFKTNRKVTVKQLKEDYFKKIECFDSVEISGVEDRFNASLGTYHDLLKIIKDKDFLDNEENEDILEDIVLTLTLFEDREMIEERLKTYAHLFDDKVMKQLKRRRYTGWGRLSRKLINGIRDKQSGKTILDFLKSDGFANRNFMQLIHDDSLTFKEDIQKAQVSGQGDSLHEHIANLAGSPAIKKGILQTVKVVDELVKVMGRHKPENIVIEMARENQTTQKGQKNSRERMKRIEEGIKELGSQILKEHPVENTQLQNEKLYLYYLQNGRDMYVDQELDINRLSDYDVDHIVPQSFLKDDSIDNKVLTRSDKARGKSDNVPSEEVVKKMKNYWRQLLNAKLITQRKFDNLTKAERGGLSELDKAGFIKRQLVETRQITKHVAQILDSRMNTKYDENDKLIREVKVITLKSKLVSDFRKDFQFYKVREINNYHHAHDAYLNAVVGTALIKKYPKLESEFVYGDYKVYDVRKMIAKSEQEIGKATAKYFFYSNIMNFFKTEITLANGEIRKRPLIETNGETGEIVWDKGRDFATVRKVLSMPQVNIVKKTEVQTGGFSKESILPKRNSDKLIARKKDWDPKKYGGFDSPTVAYSVLVVAKVEKGKSKKLKSVKELLGITIMERSSFEKNPIDFLEAKGYKEVKKDLIIKLPKYSLFELENGRKRMLASAGELQKGNELALPSKYVNFLYLASHYEKLKGSPEDNEQKQLFVEQHKHYLDEIIEQISEFSKRVILADANLDKVLSAYNKHRDKPIREQAENIIHLFTLTNLGAPAAFKYFDTTIDRKRYTSTKEVLDATLIHQSITGLYETRIDLSQLGGDGGGGSEAAAKGGGGGTLQLEEEYRLFEPESTQKQEMDIWLKNFPQAWAETGGMGTAHCQAPVLIQLKATATPISIRQYPMPHEAYQGIKPHIRRMLDQGILKPCQSPWNTPLLPVKKPGTEDYRPVQDLREVNKRVEDIHPTVPNPYNLLSTLPPSHPWYTVLDLKDAFFCLRLHSESQLLFAFEWRDPEIGLSGQLTWTRLPQGFKNSPTLFNEALHSDLADFRVRYPALVLLQYVDDLLLAAATRTECLEGTKALLETLGNKGYRASAKKAQICLQEVTYLGYSLKDGQRWLTKARKEAILSIPVPKNSRQVREFLGKAGYCRLFIPGFAELAAPLYPLTRPGTLFQWGTEQQLAFEDIKKALLSSPALGLPDITKPFELFIDENSGFAKGVLVQKLGPWKRPVAYLSKKLDTVASGWPPCLRMVAAIAILVKDAGKLTLGQPLTILTSHPVEALVRQPPNKWLSNARMTHYQAMLLDAERVHFGPTVSLNPATLLPLPSGGNHHDCLQILAETHGTRPDLTDQPLPDADLTWYTDGSSFIRNGEREAGAAVTTESEVIWAAPLPPGTSAQRAELIALTQALKMAEGKKLTVYTDSRYAFATTHVHGEIYRRRGWLTSEGKEIKNKNEILALLEALFLPKRLSIIHCPGHQKGDSPQAKGNRLADDTAKKAATETHSSLTVLPAGKRTADGSEFEKRTADGSEFESPKKKAKVE

SEQ ID NO: 1238 - protein, 2093 aa, synthetic construct
MPAAKRVKLDGGDKKYSIGLDIGTNSVGWAVITDEYKVPSKKFKVLGNTDRHSIKKNLIGALLFDSGETAEATRLKRTARRRYTRRKNRICYLQEIFSNEMAKVDDSFFHRLEESFLVEEDKKHERHPIFGNIVDEVAYHEKYPTIYHLRKKLVDSTDKADLRLIYLALAHMIKFRGHFLIEGDLNPDNSDVDKLFIQLVQTYNQLFEENPINASGVDAKAILSARLSKSRRLENLIAQLPGEKKNGLFGNLIALSLGLTPNFKSNFDLAEDAKLQLSKDTYDDDLDNLLAQIGDQYADLFLAAKNLSDAILLSDILRVNTEITKAPLSASMIKRYDEHHQDLTLLKALVRQQLPEKYKEIFFDQSKNGYAGYIDGGASQEEFYKFIKPILEKMDGTEELLVKLNREDLLRKQRTFDNGSIPHQIHLGELHAILRRQEDFYPFLKDNREKIEKILTFRIPYYVGPLARGNSRFAWMTRKSEETITPWNFEEVVDKGASAQSFIERMTNFDKNLPNEKVLPKHSLLYEYFTVYNELTKVKYVTEGMRKPAFLSGEQKKAIVDLLFKTNRKVTVKQLKEDYFKKIECFDSVEISGVEDRFNASLGTYHDLLKIIKDKDFLDNEENEDILEDIVLTLTLFEDREMIEERLKTYAHLFDDKVMKQLKRRRYTGWGRLSRKLINGIRDKQSGKTILDFLKSDGFANRNFMQLIHDDSLTFKEDIQKAQVSGQGDSLHEHIANLAGSPAIKKGILQTVKVVDELVKVMGRHKPENIVIEMARENQTTQKGQKNSRERMKRIEEGIKELGSQILKEHPVENTQLQNEKLYLYYLQNGRDMYVDQELDINRLSDYDVDHIVPQSFLKDDSIDNKVLTRSDKARGKSDNVPSEEVVKKMKNYWRQLLNAKLITQRKFDNLTKAERGGLSELDKAGFIKRQLVETRQITKHVAQILDSRMNTKYDENDKLIREVKVITLKSKLVSDFRKDFQFYKVREINNYHHAHDAYLNAVVGTALIKKYPKLESEFVYGDYKVYDVRKMIAKSEQEIGKATAKYFFYSNIMNFFKTEITLANGEIRKRPLIETNGETGEIVWDKGRDFATVRKVLSMPQVNIVKKTEVQTGGFSKESILPKRNSDKLIARKKDWDPKKYGGFDSPTVAYSVLVVAKVEKGKSKKLKSVKELLGITIMERSSFEKNPIDFLEAKGYKEVKKDLIIKLPKYSLFELENGRKRMLASAGELQKGNELALPSKYVNFLYLASHYEKLKGSPEDNEQKQLFVEQHKHYLDEIIEQISEFSKRVILADANLDKVLSAYNKHRDKPIREQAENIIHLFTLTNLGAPAAFKYFDTTIDRKRYTSTKEVLDATLIHQSITGLYETRIDLSQLGGDGGPAPGSSGGGGGTLQLEEEYRLFEPESTQKQEMDIWLKNFPQAWAETGGMGTAHCQAPVLIQLKATATPISIRQYPMPHEAYQGIKPHIRRMLDQGILKPCQSPWNTPLLPVKKPGTEDYRPVQDLREVNKRVEDIHPTVPNPYNLLSTLPPSHPWYTVLDLKDAFFCLRLHSESQLLFAFEWRDPEIGLSGQLTWTRLPQGFKNSPTLFNEALHSDLADFRVRYPALVLLQYVDDLLLAAATRTECLEGTKALLETLGNKGYRASAKKAQICLQEVTYLGYSLKDGQRWLTKARKEAILSIPVPKNSRQVREFLGKAGYCRLFIPGFAELAAPLYPLTRPGTLFQWGTEQQLAFEDIKKALLSSPALGLPDITKPFELFIDENSGFAKGVLVQKLGPWKRPVAYLSKKLDTVASGWPPCLRMVAAIAILVKDAGKLTLGQPLTILTSHPVEALVRQPPNKWLSNARMTHYQAMLLDAERVHFGPTVSLNPATLLPLPSGGNHHDCLQILAETHGTRPDLTDQPLPDADLTWYTDGSSFIRNGEREAGAAVTTESEVIWAAPLPPGTSAQRAELIALTQALKMAEGKKLTVYTDSRYAFATTHVHGEIYRRRGWLTSEGKEIKNKNEILALLEALFLPKRLSIIHCPGHQKGDSPQAKGNRLADDTAKKAATETHSSLTVLPAGKRTADGSEFEKRTADGSEFESPKKKAKVE

SEQ ID NO: 1239 - protein, 2095 aa, synthetic construct
MPAAKRVKLDGGDKKYSIGLDIGTNSVGWAVITDEYKVPSKKFKVLGNTDRHSIKKNLIGALLFDSGETAEATRLKRTARRRYTRRKNRICYLQEIFSNEMAKVDDSFFHRLEESFLVEEDKKHERHPIFGNIVDEVAYHEKYPTIYHLRKKLVDSTDKADLRLIYLALAHMIKFRGHFLIEGDLNPDNSDVDKLFIQLVQTYNQLFEENPINASGVDAKAILSARLSKSRRLENLIAQLPGEKKNGLFGNLIALSLGLTPNFKSNFDLAEDAKLQLSKDTYDDDLDNLLAQIGDQYADLFLAAKNLSDAILLSDILRVNTEITKAPLSASMIKRYDEHHQDLTLLKALVRQQLPEKYKEIFFDQSKNGYAGYIDGGASQEEFYKFIKPILEKMDGTEELLVKLNREDLLRKQRTFDNGSIPHQIHLGELHAILRRQEDFYPFLKDNREKIEKILTFRIPYYVGPLARGNSRFAWMTRKSEETITPWNFEEVVDKGASAQSFIERMTNFDKNLPNEKVLPKHSLLYEYFTVYNELTKVKYVTEGMRKPAFLSGEQKKAIVDLLFKTNRKVTVKQLKEDYFKKIECFDSVEISGVEDRFNASLGTYHDLLKIIKDKDFLDNEENEDILEDIVLTLTLFEDREMIEERLKTYAHLFDDKVMKQLKRRRYTGWGRLSRKLINGIRDKQSGKTILDFLKSDGFANRNFMQLIHDDSLTFKEDIQKAQVSGQGDSLHEHIANLAGSPAIKKGILQTVKVVDELVKVMGRHKPENIVIEMARENQTTQKGQKNSRERMKRIEEGIKELGSQILKEHPVENTQLQNEKLYLYYLQNGRDMYVDQELDINRLSDYDVDHIVPQSFLKDDSIDNKVLTRSDKARGKSDNVPSEEVVKKMKNYWRQLLNAKLITQRKFDNLTKAERGGLSELDKAGFIKRQLVETRQITKHVAQILDSRMNTKYDENDKLIREVKVITLKSKLVSDFRKDFQFYKVREINNYHHAHDAYLNAVVGTALIKKYPKLESEFVYGDYKVYDVRKMIAKSEQEIGKATAKYFFYSNIMNFFKTEITLANGEIRKRPLIETNGETGEIVWDKGRDFATVRKVLSMPQVNIVKKTEVQTGGFSKESILPKRNSDKLIARKKDWDPKKYGGFDSPTVAYSVLVVAKVEKGKSKKLKSVKELLGITIMERSSFEKNPIDFLEAKGYKEVKKDLIIKLPKYSLFELENGRKRMLASAGELQKGNELALPSKYVNFLYLASHYEKLKGSPEDNEQKQLFVEQHKHYLDEIIEQISEFSKRVILADANLDKVLSAYNKHRDKPIREQAENIIHLFTLTNLGAPAAFKYFDTTIDRKRYTSTKEVLDATLIHQSITGLYETRIDLSQLGGDGGPAPGGSEAAAKGGTLQLEEEYRLFEPESTQKQEMDIWLKNFPQAWAETGGMGTAHCQAPVLIQLKATATPISIRQYPMPHEAYQGIKPHIRRMLDQGILKPCQSPWNTPLLPVKKPGTEDYRPVQDLREVNKRVEDIHPTVPNPYNLLSTLPPSHPWYTVLDLKDAFFCLRLHSESQLLFAFEWRDPEIGLSGQLTWTRLPQGFKNSPTLFNEALHSDLADFRVRYPALVLLQYVDDLLLAAATRTECLEGTKALLETLGNKGYRASAKKAQICLQEVTYLGYSLKDGQRWLTKARKEAILSIPVPKNSRQVREFLGKAGYCRLFIPGFAELAAPLYPLTRPGTLFQWGTEQQLAFEDIKKALLSSPALGLPDITKPFELFIDENSGFAKGVLVQKLGPWKRPVAYLSKKLDTVASGWPPCLRMVAAIAILVKDAGKLTLGQPLTILTSHPVEALVRQPPNKWLSNARMTHYQAMLLDAERVHFGPTVSLNPATLLPLPSGGNHHDCLQILAETHGTRPDLTDQPLPDADLTWYTDGSSFIRNGEREAGAAVTTESEVIWAAPLPPGTSAQRAELIALTQALKMAEGKKLTVYTDSRYAFATTHVHGEIYRRRGWLTSEGKEIKNKNEILALLEALFLPKRLSIIHCPGHQKGDSPQAKGNRLADDTAKKAATETHSSLTVLPAGKRTADGSEFEKRTADGSEFESPKKKAKVE

SEQ ID NO: 1240 - protein, 2093 aa, synthetic construct
MPAAKRVKLDGGDKKYSIGLDIGTNSVGWAVITDEYKVPSKKFKVLGNTDRHSIKKNLIGALLFDSGETAEATRLKRTARRRYTRRKNRICYLQEIFSNEMAKVDDSFFHRLEESFLVEEDKKHERHPIFGNIVDEVAYHEKYPTIYHLRKKLVDSTDKADLRLIYLALAHMIKFRGHFLIEGDLNPDNSDVDKLFIQLVQTYNQLFEENPINASGVDAKAILSARLSKSRRLENLIAQLPGEKKNGLFGNLIALSLGLTPNFKSNFDLAEDAKLQLSKDTYDDDLDNLLAQIGDQYADLFLAAKNLSDAILLSDILRVNTEITKAPLSASMIKRYDEHHQDLTLLKALVRQQLPEKYKEIFFDQSKNGYAGYIDGGASQEEFYKFIKPILEKMDGTEELLVKLNREDLLRKQRTFDNGSIPHQIHLGELHAILRRQEDFYPFLKDNREKIEKILTFRIPYYVGPLARGNSRFAWMTRKSEETITPWNFEEVVDKGASAQSFIERMTNFDKNLPNEKVLPKHSLLYEYFTVYNELTKVKYVTEGMRKPAFLSGEQKKAIVDLLFKTNRKVTVKQLKEDYFKKIECFDSVEISGVEDRFNASLGTYHDLLKIIKDKDFLDNEENEDILEDIVLTLTLFEDREMIEERLKTYAHLFDDKVMKQLKRRRYTGWGRLSRKLINGIRDKQSGKTILDFLKSDGFANRNFMQLIHDDSLTFKEDIQKAQVSGQGDSLHEHIANLAGSPAIKKGILQTVKVVDELVKVMGRHKPENIVIEMARENQTTQKGQKNSRERMKRIEEGIKELGSQILKEHPVENTQLQNEKLYLYYLQNGRDMYVDQELDINRLSDYDVDHIVPQSFLKDDSIDNKVLTRSDKARGKSDNVPSEEVVKKMKNYWRQLLNAKLITQRKFDNLTKAERGGLSELDKAGFIKRQLVETRQITKHVAQILDSRMNTKYDENDKLIREVKVITLKSKLVSDFRKDFQFYKVREINNYHHAHDAYLNAVVGTALIKKYPKLESEFVYGDYKVYDVRKMIAKSEQEIGKATAKYFFYSNIMNFFKTEITLANGEIRKRPLIETNGETGEIVWDKGRDFATVRKVLSMPQVNIVKKTEVQTGGFSKESILPKRNSDKLIARKKDWDPKKYGGFDSPTVAYSVLVVAKVEKGKSKKLKSVKELLGITIMERSSFEKNPIDFLEAKGYKEVKKDLIIKLPKYSLFELENGRKRMLASAGELQKGNELALPSKYVNFLYLASHYEKLKGSPEDNEQKQLFVEQHKHYLDEIIEQISEFSKRVILADANLDKVLSAYNKHRDKPIREQAENIIHLFTLTNLGAPAAFKYFDTTIDRKRYTSTKEVLDATLIHQSITGLYETRIDLSQLGGDGGGSSGGGPAPGGTLQLEEEYRLFEPESTQKQEMDIWLKNFPQAWAETGGMGTAHCQAPVLIQLKATATPISIRQYPMPHEAYQGIKPHIRRMLDQGILKPCQSPWNTPLLPVKKPGTEDYRPVQDLREVNKRVEDIHPTVPNPYNLLSTLPPSHPWYTVLDLKDAFFCLRLHSESQLLFAFEWRDPEIGLSGQLTWTRLPQGFKNSPTLFNEALHSDLADFRVRYPALVLLQYVDDLLLAAATRTECLEGTKALLETLGNKGYRASAKKAQICLQEVTYLGYSLKDGQRWLTKARKEAILSIPVPKNSRQVREFLGKAGYCRLFIPGFAELAAPLYPLTRPGTLFQWGTEQQLAFEDIKKALLSSPALGLPDITKPFELFIDENSGFAKGVLVQKLGPWKRPVAYLSKKLDTVASGWPPCLRMVAAIAILVKDAGKLTLGQPLTILTSHPVEALVRQPPNKWLSNARMTHYQAMLLDAERVHFGPTVSLNPATLLPLPSGGNHHDCLQILAETHGTRPDLTDQPLPDADLTWYTDGSSFIRNGEREAGAAVTTESEVIWAAPLPPGTSAQRAELIALTQALKMAEGKKLTVYTDSRYAFATTHVHGEIYRRRGWLTSEGKEIKNKNEILALLEALFLPKRLSIIHCPGHQKGDSPQAKGNRLADDTAKKAATETHSSLTVLPAGKRTADGSEFEKRTADGSEFESPKKKAKVE

SEQ ID NO: 1241 - protein, 2095 aa, synthetic construct
MPAAKRVKLDGGDKKYSIGLDIGTNSVGWAVITDEYKVPSKKFKVLGNTDRHSIKKNLIGALLFDSGETAEATRLKRTARRRYTRRKNRICYLQEIFSNEMAKVDDSFFHRLEESFLVEEDKKHERHPIFGNIVDEVAYHEKYPTIYHLRKKLVDSTDKADLRLIYLALAHMIKFRGHFLIEGDLNPDNSDVDKLFIQLVQTYNQLFEENPINASGVDAKAILSARLSKSRRLENLIAQLPGEKKNGLFGNLIALSLGLTPNFKSNFDLAEDAKLQLSKDTYDDDLDNLLAQIGDQYADLFLAAKNLSDAILLSDILRVNTEITKAPLSASMIKRYDEHHQDLTLLKALVRQQLPEKYKEIFFDQSKNGYAGYIDGGASQEEFYKFIKPILEKMDGTEELLVKLNREDLLRKQRTFDNGSIPHQIHLGELHAILRRQEDFYPFLKDNREKIEKILTFRIPYYVGPLARGNSRFAWMTRKSEETITPWNFEEVVDKGASAQSFIERMTNFDKNLPNEKVLPKHSLLYEYFTVYNELTKVKYVTEGMRKPAFLSGEQKKAIVDLLFKTNRKVTVKQLKEDYFKKIECFDSVEISGVEDRFNASLGTYHDLLKIIKDKDFLDNEENEDILEDIVLTLTLFEDREMIEERLKTYAHLFDDKVMKQLKRRRYTGWGRLSRKLINGIRDKQSGKTILDFLKSDGFANRNFMQLIHDDSLTFKEDIQKAQVSGQGDSLHEHIANLAGSPAIKKGILQTVKVVDELVKVMGRHKPENIVIEMARENQTTQKGQKNSRERMKRIEEGIKELGSQILKEHPVENTQLQNEKLYLYYLQNGRDMYVDQELDINRLSDYDVDHIVPQSFLKDDSIDNKVLTRSDKARGKSDNVPSEEVVKKMKNYWRQLLNAKLITQRKFDNLTKAERGGLSELDKAGFIKRQLVETRQITKHVAQILDSRMNTKYDENDKLIREVKVITLKSKLVSDFRKDFQFYKVREINNYHHAHDAYLNAVVGTALIKKYPKLESEFVYGDYKVYDVRKMIAKSEQEIGKATAKYFFYSNIMNFFKTEITLANGEIRKRPLIETNGETGEIVWDKGRDFATVRKVLSMPQVNIVKKTEVQTGGFSKESILPKRNSDKLIARKKDWDPKKYGGFDSPTVAYSVLVVAKVEKGKSKKLKSVKELLGITIMERSSFEKNPIDFLEAKGYKEVKKDLIIKLPKYSLFELENGRKRMLASAGELQKGNELALPSKYVNFLYLASHYEKLKGSPEDNEQKQLFVEQHKHYLDEIIEQISEFSKRVILADANLDKVLSAYNKHRDKPIREQAENIIHLFTLTNLGAPAAFKYFDTTIDRKRYTSTKEVLDATLIHQSITGLYETRIDLSQLGGDGGEAAAKGGSGSSGGTLQLEEEYRLFEPESTQKQEMDIWLKNFPQAWAETGGMGTAHCQAPVLIQLKATATPISIRQYPMPHEAYQGIKPHIRRMLDQGILKPCQSPWNTPLLPVKKPGTEDYRPVQDLREVNKRVEDIHPTVPNPYNLLSTLPPSHPWYTVLDLKDAFFCLRLHSESQLLFAFEWRDPEIGLSGQLTWTRLPQGFKNSPTLFNEALHSDLADFRVRYPALVLLQYVDDLLLAAATRTECLEGTKALLETLGNKGYRASAKKAQICLQEVTYLGYSLKDGQRWLTKARKEAILSIPVPKNSRQVREFLGKAGYCRLFIPGFAELAAPLYPLTRPGTLFQWGTEQQLAFEDIKKALLSSPALGLPDITKPFELFIDENSGFAKGVLVQKLGPWKRPVAYLSKKLDTVASGWPPCLRMVAAIAILVKDAGKLTLGQPLTILTSHPVEALVRQPPNKWLSNARMTHYQAMLLDAERVHFGPTVSLNPATLLPLPSGGNHHDCLQILAETHGTRPDLTDQPLPDADLTWYTDGSSFIRNGEREAGAAVTTESEVIWAAPLPPGTSAQRAELIALTQALKMAEGKKLTVYTDSRYAFATTHVHGEIYRRRGWLTSEGKEIKNKNEILALLEALFLPKRLSIIHCPGHQKGDSPQAKGNRLADDTAKKAATETHSSLTVLPAGKRTADGSEFEKRTADGSEFESPKKKAKVE

SEQ ID NO: 1242 - protein, 2095 aa, synthetic construct
MPAAKRVKLDGGDKKYSIGLDIGTNSVGWAVITDEYKVPSKKFKVLGNTDRHSIKKNLIGALLFDSGETAEATRLKRTARRRYTRRKNRICYLQEIFSNEMAKVDDSFFHRLEESFLVEEDKKHERHPIFGNIVDEVAYHEKYPTIYHLRKKLVDSTDKADLRLIYLALAHMIKFRGHFLIEGDLNPDNSDVDKLFIQLVQTYNQLFEENPINASGVDAKAILSARLSKSRRLENLIAQLPGEKKNGLFGNLIALSLGLTPNFKSNFDLAEDAKLQLSKDTYDDDLDNLLAQIGDQYADLFLAAKNLSDAILLSDILRVNTEITKAPLSASMIKRYDEHHQDLTLLKALVRQQLPEKYKEIFFDQSKNGYAGYIDGGASQEEFYKFIKPILEKMDGTEELLVKLNREDLLRKQRTFDNGSIPHQIHLGELHAILRRQEDFYPFLKDNREKIEKILTFRIPYYVGPLARGNSRFAWMTRKSEETITPWNFEEVVDKGASAQSFIERMTNFDKNLPNEKVLPKHSLLYEYFTVYNELTKVKYVTEGMRKPAFLSGEQKKAIVDLLFKTNRKVTVKQLKEDYFKKIECFDSVEISGVEDRFNASLGTYHDLLKIIKDKDFLDNEENEDILEDIVLTLTLFEDREMIEERLKTYAHLFDDKVMKQLKRRRYTGWGRLSRKLINGIRDKQSGKTILDFLKSDGFANRNFMQLIHDDSLTFKEDIQKAQVSGQGDSLHEHIANLAGSPAIKKGILQTVKVVDELVKVMGRHKPENIVIEMARENQTTQKGQKNSRERMKRIEEGIKELGSQILKEHPVENTQLQNEKLYLYYLQNGRDMYVDQELDINRLSDYDVDHIVPQSFLKDDSIDNKVLTRSDKARGKSDNVPSEEVVKKMKNYWRQLLNAKLITQRKFDNLTKAERGGLSELDKAGFIKRQLVETRQITKHVAQILDSRMNTKYDENDKLIREVKVITLKSKLVSDFRKDFQFYKVREINNYHHAHDAYLNAVVGTALIKKYPKLESEFVYGDYKVYDVRKMIAKSEQEIGKATAKYFFYSNIMNFFKTEITLANGEIRKRPLIETNGETGEIVWDKGRDFATVRKVLSMPQVNIVKKTEVQTGGFSKESILPKRNSDKLIARKKDWDPKKYGGFDSPTVAYSVLVVAKVEKGKSKKLKSVKELLGITIMERSSFEKNPIDFLEAKGYKEVKKDLIIKLPKYSLFELENGRKRMLASAGELQKGNELALPSKYVNFLYLASHYEKLKGSPEDNEQKQLFVEQHKHYLDEIIEQISEFSKRVILADANLDKVLSAYNKHRDKPIREQAENIIHLFTLTNLGAPAAFKYFDTTIDRKRYTSTKEVLDATLIHQSITGLYETRIDLSQLGGDGGGSSGGSEAAAKGGTLQLEEEYRLFEPESTQKQEMDIWLKNFPQAWAETGGMGTAHCQAPVLIQLKATATPISIRQYPMPHEAYQGIKPHIRRMLDQGILKPCQSPWNTPLLPVKKPGTEDYRPVQDLREVNKRVEDIHPTVPNPYNLLSTLPPSHPWYTVLDLKDAFFCLRLHSESQLLFAFEWRDPEIGLSGQLTWTRLPQGFKNSPTLFNEALHSDLADFRVRYPALVLLQYVDDLLLAAATRTECLEGTKALLETLGNKGYRASAKKAQICLQEVTYLGYSLKDGQRWLTKARKEAILSIPVPKNSRQVREFLGKAGYCRLFIPGFAELAAPLYPLTRPGTLFQWGTEQQLAFEDIKKALLSSPALGLPDITKPFELFIDENSGFAKGVLVQKLGPWKRPVAYLSKKLDTVASGWPPCLRMVAAIAILVKDAGKLTLGQPLTILTSHPVEALVRQPPNKWLSNARMTHYQAMLLDAERVHFGPTVSLNPATLLPLPSGGNHHDCLQILAETHGTRPDLTDQPLPDADLTWYTDGSSFIRNGEREAGAAVTTESEVIWAAPLPPGTSAQRAELIALTQALKMAEGKKLTVYTDSRYAFATTHVHGEIYRRRGWLTSEGKEIKNKNEILALLEALFLPKRLSIIHCPGHQKGDSPQAKGNRLADDTAKKAATETHSSLTVLPAGKRTADGSEFEKRTADGSEFESPKKKAKVE

SEQ ID NO: 1243 - protein, 2099 aa, synthetic construct
MPAAKRVKLDGGDKKYSIGLDIGTNSVGWAVITDEYKVPSKKFKVLGNTDRHSIKKNLIGALLFDSGETAEATRLKRTARRRYTRRKNRICYLQEIFSNEMAKVDDSFFHRLEESFLVEEDKKHERHPIFGNIVDEVAYHEKYPTIYHLRKKLVDSTDKADLRLIYLALAHMIKFRGHFLIEGDLNPDNSDVDKLFIQLVQTYNQLFEENPINASGVDAKAILSARLSKSRRLENLIAQLPGEKKNGLFGNLIALSLGLTPNFKSNFDLAEDAKLQLSKDTYDDDLDNLLAQIGDQYADLFLAAKNLSDAILLSDILRVNTEITKAPLSASMIKRYDEHHQDLTLLKALVRQQLPEKYKEIFFDQSKNGYAGYIDGGASQEEFYKFIKPILEKMDGTEELLVKLNREDLLRKQRTFDNGSIPHQIHLGELHAILRRQEDFYPFLKDNREKIEKILTFRIPYYVGPLARGNSRFAWMTRKSEETITPWNFEEVVDKGASAQSFIERMTNFDKNLPNEKVLPKHSLLYEYFTVYNELTKVKYVTEGMRKPAFLSGEQKKAIVDLLFKTNRKVTVKQLKEDYFKKIECFDSVEISGVEDRFNASLGTYHDLLKIIKDKDFLDNEENEDILEDIVLTLTLFEDREMIEERLKTYAHLFDDKVMKQLKRRRYTGWGRLSRKLINGIRDKQSGKTILDFLKSDGFANRNFMQLIHDDSLTFKEDIQKAQVSGQGDSLHEHIANLAGSPAIKKGILQTVKVVDELVKVMGRHKPENIVIEMARENQTTQKGQKNSRERMKRIEEGIKELGSQILKEHPVENTQLQNEKLYLYYLQNGRDMYVDQELDINRLSDYDVDHIVPQSFLKDDSIDNKVLTRSDKARGKSDNVPSEEVVKKMKNYWRQLLNAKLITQRKFDNLTKAERGGLSELDKAGFIKRQLVETRQITKHVAQILDSRMNTKYDENDKLIREVKVITLKSKLVSDFRKDFQFYKVREINNYHHAHDAYLNAVVGTALIKKYPKLESEFVYGDYKVYDVRKMIAKSEQEIGKATAKYFFYSNIMNFFKTEITLANGEIRKRPLIETNGETGEIVWDKGRDFATVRKVLSMPQVNIVKKTEVQTGGFSKESILPKRNSDKLIARKKDWDPKKYGGFDSPTVAYSVLVVAKVEKGKSKKLKSVKELLGITIMERSSFEKNPIDFLEAKGYKEVKKDLIIKLPKYSLFELENGRKRMLASAGELQKGNELALPSKYVNFLYLASHYEKLKGSPEDNEQKQLFVEQHKHYLDEIIEQISEFSKRVILADANLDKVLSAYNKHRDKPIREQAENIIHLFTLTNLGAPAAFKYFDTTIDRKRYTSTKEVLDATLIHQSITGLYETRIDLSQLGGDGGEAAAKGGGGSEAAAKGGTLQLEEEYRLFEPESTQKQEMDIWLKNFPQAWAETGGMGTAHCQAPVLIQLKATATPISIRQYPMPHEAYQGIKPHIRRMLDQGILKPCQSPWNTPLLPVKKPGTEDYRPVQDLREVNKRVEDIHPTVPNPYNLLSTLPPSHPWYTVLDLKDAFFCLRLHSESQLLFAFEWRDPEIGLSGQLTWTRLPQGFKNSPTLFNEALHSDLADFRVRYPALVLLQYVDDLLLAAATRTECLEGTKALLETLGNKGYRASAKKAQICLQEVTYLGYSLKDGQRWLTKARKEAILSIPVPKNSRQVREFLGKAGYCRLFIPGFAELAAPLYPLTRPGTLFQWGTEQQLAFEDIKKALLSSPALGLPDITKPFELFIDENSGFAKGVLVQKLGPWKRPVAYLSKKLDTVASGWPPCLRMVAAIAILVKDAGKLTLGQPLTILTSHPVEALVRQPPNKWLSNARMTHYQAMLLDAERVHFGPTVSLNPATLLPLPSGGNHHDCLQILAETHGTRPDLTDQPLPDADLTWYTDGSSFIRNGEREAGAAVTTESEVIWAAPLPPGTSAQRAELIALTQALKMAEGKKLTVYTDSRYAFATTHVHGEIYRRRGWLTSEGKEIKNKNEILALLEALFLPKRLSIIHCPGHQKGDSPQAKGNRLADDTAKKAATETHSSLTVLPAGKRTADGSEFEKRTADGSEFESPKKKAKVE

SEQ ID NO: 1244 - protein, 2093 aa, synthetic construct
MPAAKRVKLDGGDKKYSIGLDIGTNSVGWAVITDEYKVPSKKFKVLGNTDRHSIKKNLIGALLFDSGETAEATRLKRTARRRYTRRKNRICYLQEIFSNEMAKVDDSFFHRLEESFLVEEDKKHERHPIFGNIVDEVAYHEKYPTIYHLRKKLVDSTDKADLRLIYLALAHMIKFRGHFLIEGDLNPDNSDVDKLFIQLVQTYNQLFEENPINASGVDAKAILSARLSKSRRLENLIAQLPGEKKNGLFGNLIALSLGLTPNFKSNFDLAEDAKLQLSKDTYDDDLDNLLAQIGDQYADLFLAAKNLSDAILLSDILRVNTEITKAPLSASMIKRYDEHHQDLTLLKALVRQQLPEKYKEIFFDQSKNGYAGYIDGGASQEEFYKFIKPILEKMDGTEELLVKLNREDLLRKQRTFDNGSIPHQIHLGELHAILRRQEDFYPFLKDNREKIEKILTFRIPYYVGPLARGNSRFAWMTRKSEETITPWNFEEVVDKGASAQSFIERMTNFDKNLPNEKVLPKHSLLYEYFTVYNELTKVKYVTEGMRKPAFLSGEQKKAIVDLLFKTNRKVTVKQLKEDYFKKIECFDSVEISGVEDRFNASLGTYHDLLKIIKDKDFLDNEENEDILEDIVLTLTLFEDREMIEERLKTYAHLFDDKVMKQLKRRRYTGWGRLSRKLINGIRDKQSGKTILDFLKSDGFANRNFMQLIHDDSLTFKEDIQKAQVSGQGDSLHEHIANLAGSPAIKKGILQTVKVVDELVKVMGRHKPENIVIEMARENQTTQKGQKNSRERMKRIEEGIKELGSQILKEHPVENTQLQNEKLYLYYLQNGRDMYVDQELDINRLSDYDVDHIVPQSFLKDDSIDNKVLTRSDKARGKSDNVPSEEVVKKMKNYWRQLLNAKLITQRKFDNLTKAERGGLSELDKAGFIKRQLVETRQITKHVAQILDSRMNTKYDENDKLIREVKVITLKSKLVSDFRKDFQFYKVREINNYHHAHDAYLNAVVGTALIKKYPKLESEFVYGDYKVYDVRKMIAKSEQEIGKATAKYFFYSNIMNFFKTEITLANGEIRKRPLIETNGETGEIVWDKGRDFATVRKVLSMPQVNIVKKTEVQTGGFSKESILPKRNSDKLIARKKDWDPKKYGGFDSPTVAYSVLVVAKVEKGKSKKLKSVKELLGITIMERSSFEKNPIDFLEAKGYKEVKKDLIIKLPKYSLFELENGRKRMLASAGELQKGNELALPSKYVNFLYLASHYEKLKGSPEDNEQKQLFVEQHKHYLDEIIEQISEFSKRVILADANLDKVLSAYNKHRDKPIREQAENIIHLFTLTNLGAPAAFKYFDTTIDRKRYTSTKEVLDATLIHQSITGLYETRIDLSQLGGDGGGGSGSSPAPGGTLQLEEEYRLFEPESTQKQEMDIWLKNFPQAWAETGGMGTAHCQAPVLIQLKATATPISIRQYPMPHEAYQGIKPHIRRMLDQGILKPCQSPWNTPLLPVKKPGTEDYRPVQDLREVNKRVEDIHPTVPNPYNLLSTLPPSHPWYTVLDLKDAFFCLRLHSESQLLFAFEWRDPEIGLSGQLTWTRLPQGFKNSPTLFNEALHSDLADFRVRYPALVLLQYVDDLLLAAATRTECLEGTKALLETLGNKGYRASAKKAQICLQEVTYLGYSLKDGQRWLTKARKEAILSIPVPKNSRQVREFLGKAGYCRLFIPGFAELAAPLYPLTRPGTLFQWGTEQQLAFEDIKKALLSSPALGLPDITKPFELFIDENSGFAKGVLVQKLGPWKRPVAYLSKKLDTVASGWPPCLRMVAAIAILVKDAGKLTLGQPLTILTSHPVEALVRQPPNKWLSNARMTHYQAMLLDAERVHFGPTVSLNPATLLPLPSGGNHHDCLQILAETHGTRPDLTDQPLPDADLTWYTDGSSFIRNGEREAGAAVTTESEVIWAAPLPPGTSAQRAELIALTQALKMAEGKKLTVYTDSRYAFATTHVHGEIYRRRGWLTSEGKEIKNKNEILALLEALFLPKRLSIIHCPGHQKGDSPQAKGNRLADDTAKKAATETHSSLTVLPAGKRTADGSEFEKRTADGSEFESPKKKAKVE

SEQ ID NO: 1245 - protein, 2090 aa, synthetic construct
MPAAKRVKLDGGDKKYSIGLDIGTNSVGWAVITDEYKVPSKKFKVLGNTDRHSIKKNLIGALLFDSGETAEATRLKRTARRRYTRRKNRICYLQEIFSNEMAKVDDSFFHRLEESFLVEEDKKHERHPIFGNIVDEVAYHEKYPTIYHLRKKLVDSTDKADLRLIYLALAHMIKFRGHFLIEGDLNPDNSDVDKLFIQLVQTYNQLFEENPINASGVDAKAILSARLSKSRRLENLIAQLPGEKKNGLFGNLIALSLGLTPNFKSNFDLAEDAKLQLSKDTYDDDLDNLLAQIGDQYADLFLAAKNLSDAILLSDILRVNTEITKAPLSASMIKRYDEHHQDLTLLKALVRQQLPEKYKEIFFDQSKNGYAGYIDGGASQEEFYKFIKPILEKMDGTEELLVKLNREDLLRKQRTFDNGSIPHQIHLGELHAILRRQEDFYPFLKDNREKIEKILTFRIPYYVGPLARGNSRFAWMTRKSEETITPWNFEEVVDKGASAQSFIERMTNFDKNLPNEKVLPKHSLLYEYFTVYNELTKVKYVTEGMRKPAFLSGEQKKAIVDLLFKTNRKVTVKQLKEDYFKKIECFDSVEISGVEDRFNASLGTYHDLLKIIKDKDFLDNEENEDILEDIVLTLTLFEDREMIEERLKTYAHLFDDKVMKQLKRRRYTGWGRLSRKLINGIRDKQSGKTILDFLKSDGFANRNFMQLIHDDSLTFKEDIQKAQVSGQGDSLHEHIANLAGSPAIKKGILQTVKVVDELVKVMGRHKPENIVIEMARENQTTQKGQKNSRERMKRIEEGIKELGSQILKEHPVENTQLQNEKLYLYYLQNGRDMYVDQELDINRLSDYDVDHIVPQSFLKDDSIDNKVLTRSDKARGKSDNVPSEEVVKKMKNYWRQLLNAKLITQRKFDNLTKAERGGLSELDKAGFIKRQLVETRQITKHVAQILDSRMNTKYDENDKLIREVKVITLKSKLVSDFRKDFQFYKVREINNYHHAHDAYLNAVVGTALIKKYPKLESEFVYGDYKVYDVRKMIAKSEQEIGKATAKYFFYSNIMNFFKTEITLANGEIRKRPLIETNGETGEIVWDKGRDFATVRKVLSMPQVNIVKKTEVQTGGFSKESILPKRNSDKLIARKKDWDPKKYGGFDSPTVAYSVLVVAKVEKGKSKKLKSVKELLGITIMERSSFEKNPIDFLEAKGYKEVKKDLIIKLPKYSLFELENGRKRMLASAGELQKGNELALPSKYVNFLYLASHYEKLKGSPEDNEQKQLFVEQHKHYLDEIIEQISEFSKRVILADANLDKVLSAYNKHRDKPIREQAENIIHLFTLTNLGAPAAFKYFDTTIDRKRYTSTKEVLDATLIHQSITGLYETRIDLSQLGGDGGGSSPAPGGTLQLEEEYRLFEPESTQKQEMDIWLKNFPQAWAETGGMGTAHCQAPVLIQLKATATPISIRQYPMPHEAYQGIKPHIRRMLDQGILKPCQSPWNTPLLPVKKPGTEDYRPVQDLREVNKRVEDIHPTVPNPYNLLSTLPPSHPWYTVLDLKDAFFCLRLHSESQLLFAFEWRDPEIGLSGQLTWTRLPQGFKNSPTLFNEALHSDLADFRVRYPALVLLQYVDDLLLAAATRTECLEGTKALLETLGNKGYRASAKKAQICLQEVTYLGYSLKDGQRWLTKARKEAILSIPVPKNSRQVREFLGKAGYCRLFIPGFAELAAPLYPLTRPGTLFQWGTEQQLAFEDIKKALLSSPALGLPDITKPFELFIDENSGFAKGVLVQKLGPWKRPVAYLSKKLDTVASGWPPCLRMVAAIAILVKDAGKLTLGQPLTILTSHPVEALVRQPPNKWLSNARMTHYQAMLLDAERVHFGPTVSLNPATLLPLPSGGNHHDCLQILAETHGTRPDLTDQPLPDADLTWYTDGSSFIRNGEREAGAAVTTESEVIWAAPLPPGTSAQRAELIALTQALKMAEGKKLTVYTDSRYAFATTHVHGEIYRRRGWLTSEGKEIKNKNEILALLEALFLPKRLSIIHCPGHQKGDSPQAKGNRLADDTAKKAATETHSSLTVLPAGKRTADGSEFEKRTADGSEFESPKKKAKVE

SEQ ID NO: 1246 - protein, 2089 aa, synthetic construct
MPAAKRVKLDGGDKKYSIGLDIGTNSVGWAVITDEYKVPSKKFKVLGNTDRHSIKKNLIGALLFDSGETAEATRLKRTARRRYTRRKNRICYLQEIFSNEMAKVDDSFFHRLEESFLVEEDKKHERHPIFGNIVDEVAYHEKYPTIYHLRKKLVDSTDKADLRLIYLALAHMIKFRGHFLIEGDLNPDNSDVDKLFIQLVQTYNQLFEENPINASGVDAKAILSARLSKSRRLENLIAQLPGEKKNGLFGNLIALSLGLTPNFKSNFDLAEDAKLQLSKDTYDDDLDNLLAQIGDQYADLFLAAKNLSDAILLSDILRVNTEITKAPLSASMIKRYDEHHQDLTLLKALVRQQLPEKYKEIFFDQSKNGYAGYIDGGASQEEFYKFIKPILEKMDGTEELLVKLNREDLLRKQRTFDNGSIPHQIHLGELHAILRRQEDFYPFLKDNREKIEKILTFRIPYYVGPLARGNSRFAWMTRKSEETITPWNFEEVVDKGASAQSFIERMTNFDKNLPNEKVLPKHSLLYEYFTVYNELTKVKYVTEGMRKPAFLSGEQKKAIVDLLFKTNRKVTVKQLKEDYFKKIECFDSVEISGVEDRFNASLGTYHDLLKIIKDKDFLDNEENEDILEDIVLTLTLFEDREMIEERLKTYAHLFDDKVMKQLKRRRYTGWGRLSRKLINGIRDKQSGKTILDFLKSDGFANRNFMQLIHDDSLTFKEDIQKAQVSGQGDSLHEHIANLAGSPAIKKGILQTVKVVDELVKVMGRHKPENIVIEMARENQTTQKGQKNSRERMKRIEEGIKELGSQILKEHPVENTQLQNEKLYLYYLQNGRDMYVDQELDINRLSDYDVDHIVPQSFLKDDSIDNKVLTRSDKARGKSDNVPSEEVVKKMKNYWRQLLNAKLITQRKFDNLTKAERGGLSELDKAGFIKRQLVETRQITKHVAQILDSRMNTKYDENDKLIREVKVITLKSKLVSDFRKDFQFYKVREINNYHHAHDAYLNAVVGTALIKKYPKLESEFVYGDYKVYDVRKMIAKSEQEIGKATAKYFFYSNIMNFFKTEITLANGEIRKRPLIETNGETGEIVWDKGRDFATVRKVLSMPQVNIVKKTEVQTGGFSKESILPKRNSDKLIARKKDWDPKKYGGFDSPTVAYSVLVVAKVEKGKSKKLKSVKELLGITIMERSSFEKNPIDFLEAKGYKEVKKDLIIKLPKYSLFELENGRKRMLASAGELQKGNELALPSKYVNFLYLASHYEKLKGSPEDNEQKQLFVEQHKHYLDEIIEQISEFSKRVILADANLDKVLSAYNKHRDKPIREQAENIIHLFTLTNLGAPAAFKYFDTTIDRKRYTSTKEVLDATLIHQSITGLYETRIDLSQLGGDGGPAPAPGGTLQLEEEYRLFEPESTQKQEMDIWLKNFPQAWAETGGMGTAHCQAPVLIQLKATATPISIRQYPMPHEAYQGIKPHIRRMLDQGILKPCQSPWNTPLLPVKKPGTEDYRPVQDLREVNKRVEDIHPTVPNPYNLLSTLPPSHPWYTVLDLKDAFFCLRLHSESQLLFAFEWRDPEIGLSGQLTWTRLPQGFKNSPTLFNEALHSDLADFRVRYPALVLLQYVDDLLLAAATRTECLEGTKALLETLGNKGYRASAKKAQICLQEVTYLGYSLKDGQRWLTKARKEAILSIPVPKNSRQVREFLGKAGYCRLFIPGFAELAAPLYPLTRPGTLFQWGTEQQLAFEDIKKALLSSPALGLPDITKPFELFIDENSGFAKGVLVQKLGPWKRPVAYLSKKLDTVASGWPPCLRMVAAIAILVKDAGKLTLGQPLTILTSHPVEALVRQPPNKWLSNARMTHYQAMLLDAERVHFGPTVSLNPATLLPLPSGGNHHDCLQILAETHGTRPDLTDQPLPDADLTWYTDGSSFIRNGEREAGAAVTTESEVIWAAPLPPGTSAQRAELIALTQALKMAEGKKLTVYTDSRYAFATTHVHGEIYRRRGWLTSEGKEIKNKNEILALLEALFLPKRLSIIHCPGHQKGDSPQAKGNRLADDTAKKAATETHSSLTVLPAGKRTADGSEFEKRTADGSEFESPKKKAKVE

SEQ ID NO: 1247 - protein, 2093 aa, synthetic construct
MPAAKRVKLDGGDKKYSIGLDIGTNSVGWAVITDEYKVPSKKFKVLGNTDRHSIKKNLIGALLFDSGETAEATRLKRTARRRYTRRKNRICYLQEIFSNEMAKVDDSFFHRLEESFLVEEDKKHERHPIFGNIVDEVAYHEKYPTIYHLRKKLVDSTDKADLRLIYLALAHMIKFRGHFLIEGDLNPDNSDVDKLFIQLVQTYNQLFEENPINASGVDAKAILSARLSKSRRLENLIAQLPGEKKNGLFGNLIALSLGLTPNFKSNFDLAEDAKLQLSKDTYDDDLDNLLAQIGDQYADLFLAAKNLSDAILLSDILRVNTEITKAPLSASMIKRYDEHHQDLTLLKALVRQQLPEKYKEIFFDQSKNGYAGYIDGGASQEEFYKFIKPILEKMDGTEELLVKLNREDLLRKQRTFDNGSIPHQIHLGELHAILRRQEDFYPFLKDNREKIEKILTFRIPYYVGPLARGNSRFAWMTRKSEETITPWNFEEVVDKGASAQSFIERMTNFDKNLPNEKVLPKHSLLYEYFTVYNELTKVKYVTEGMRKPAFLSGEQKKAIVDLLFKTNRKVTVKQLKEDYFKKIECFDSVEISGVEDRFNASLGTYHDLLKIIKDKDFLDNEENEDILEDIVLTLTLFEDREMIEERLKTYAHLFDDKVMKQLKRRRYTGWGRLSRKLINGIRDKQSGKTILDFLKSDGFANRNFMQLIHDDSLTFKEDIQKAQVSGQGDSLHEHIANLAGSPAIKKGILQTVKVVDELVKVMGRHKPENIVIEMARENQTTQKGQKNSRERMKRIEEGIKELGSQILKEHPVENTQLQNEKLYLYYLQNGRDMYVDQELDINRLSDYDVDHIVPQSFLKDDSIDNKVLTRSDKARGKSDNVPSEEVVKKMKNYWRQLLNAKLITQRKFDNLTKAERGGLSELDKAGFIKRQLVETRQITKHVAQILDSRMNTKYDENDKLIREVKVITLKSKLVSDFRKDFQFYKVREINNYHHAHDAYLNAVVGTALIKKYPKLESEFVYGDYKVYDVRKMIAKSEQEIGKATAKYFFYSNIMNFFKTEITLANGEIRKRPLIETNGETGEIVWDKGRDFATVRKVLSMPQVNIVKKTEVQTGGFSKESILPKRNSDKLIARKKDWDPKKYGGFDSPTVAYSVLVVAKVEKGKSKKLKSVKELLGITIMERSSFEKNPIDFLEAKGYKEVKKDLIIKLPKYSLFELENGRKRMLASAGELQKGNELALPSKYVNFLYLASHYEKLKGSPEDNEQKQLFVEQHKHYLDEIIEQISEFSKRVILADANLDKVLSAYNKHRDKPIREQAENIIHLFTLTNLGAPAAFKYFDTTIDRKRYTSTKEVLDATLIHQSITGLYETRIDLSQLGGDGGGGGGSSGGSGGTLQLEEEYRLFEPESTQKQEMDIWLKNFPQAWAETGGMGTAHCQAPVLIQLKATATPISIRQYPMPHEAYQGIKPHIRRMLDQGILKPCQSPWNTPLLPVKKPGTEDYRPVQDLREVNKRVEDIHPTVPNPYNLLSTLPPSHPWYTVLDLKDAFFCLRLHSESQLLFAFEWRDPEIGLSGQLTWTRLPQGFKNSPTLFNEALHSDLADFRVRYPALVLLQYVDDLLLAAATRTECLEGTKALLETLGNKGYRASAKKAQICLQEVTYLGYSLKDGQRWLTKARKEAILSIPVPKNSRQVREFLGKAGYCRLFIPGFAELAAPLYPLTRPGTLFQWGTEQQLAFEDIKKALLSSPALGLPDITKPFELFIDENSGFAKGVLVQKLGPWKRPVAYLSKKLDTVASGWPPCLRMVAAIAILVKDAGKLTLGQPLTILTSHPVEALVRQPPNKWLSNARMTHYQAMLLDAERVHFGPTVSLNPATLLPLPSGGNHHDCLQILAETHGTRPDLTDQPLPDADLTWYTDGSSFIRNGEREAGAAVTTESEVIWAAPLPPGTSAQRAELIALTQALKMAEGKKLTVYTDSRYAFATTHVHGEIYRRRGWLTSEGKEIKNKNEILALLEALFLPKRLSIIHCPGHQKGDSPQAKGNRLADDTAKKAATETHSSLTVLPAGKRTADGSEFEKRTADGSEFESPKKKAKVE

SEQ ID NO: 1248 - protein, 2090 aa, synthetic construct
MPAAKRVKLDGGDKKYSIGLDIGTNSVGWAVITDEYKVPSKKFKVLGNTDRHSIKKNLIGALLFDSGETAEATRLKRTARRRYTRRKNRICYLQEIFSNEMAKVDDSFFHRLEESFLVEEDKKHERHPIFGNIVDEVAYHEKYPTIYHLRKKLVDSTDKADLRLIYLALAHMIKFRGHFLIEGDLNPDNSDVDKLFIQLVQTYNQLFEENPINASGVDAKAILSARLSKSRRLENLIAQLPGEKKNGLFGNLIALSLGLTPNFKSNFDLAEDAKLQLSKDTYDDDLDNLLAQIGDQYADLFLAAKNLSDAILLSDILRVNTEITKAPLSASMIKRYDEHHQDLTLLKALVRQQLPEKYKEIFFDQSKNGYAGYIDGGASQEEFYKFIKPILEKMDGTEELLVKLNREDLLRKQRTFDNGSIPHQIHLGELHAILRRQEDFYPFLKDNREKIEKILTFRIPYYVGPLARGNSRFAWMTRKSEETITPWNFEEVVDKGASAQSFIERMTNFDKNLPNEKVLPKHSLLYEYFTVYNELTKVKYVTEGMRKPAFLSGEQKKAIVDLLFKTNRKVTVKQLKEDYFKKIECFDSVEISGVEDRFNASLGTYHDLLKIIKDKDFLDNEENEDILEDIVLTLTLFEDREMIEERLKTYAHLFDDKVMKQLKRRRYTGWGRLSRKLINGIRDKQSGKTILDFLKSDGFANRNFMQLIHDDSLTFKEDIQKAQVSGQGDSLHEHIANLAGSPAIKKGILQTVKVVDELVKVMGRHKPENIVIEMARENQTTQKGQKNSRERMKRIEEGIKELGSQILKEHPVENTQLQNEKLYLYYLQNGRDMYVDQELDINRLSDYDVDHIVPQSFLKDDSIDNKVLTRSDKARGKSDNVPSEEVVKKMKNYWRQLLNAKLITQRKFDNLTKAERGGLSELDKAGFIKRQLVETRQITKHVAQILDSRMNTKYDENDKLIREVKVITLKSKLVSDFRKDFQFYKVREINNYHHAHDAYLNAVVGTALIKKYPKLESEFVYGDYKVYDVRKMIAKSEQEIGKATAKYFFYSNIMNFFKTEITLANGEIRKRPLIETNGETGEIVWDKGRDFATVRKVLSMPQVNIVKKTEVQTGGFSKESILPKRNSDKLIARKKDWDPKKYGGFDSPTVAYSVLVVAKVEKGKSKKLKSVKELLGITIMERSSFEKNPIDFLEAKGYKEVKKDLIIKLPKYSLFELENGRKRMLASAGELQKGNELALPSKYVNFLYLASHYEKLKGSPEDNEQKQLFVEQHKHYLDEIIEQISEFSKRVILADANLDKVLSAYNKHRDKPIREQAENIIHLFTLTNLGAPAAFKYFDTTIDRKRYTSTKEVLDATLIHQSITGLYETRIDLSQLGGDGGPAPGGGGGTLQLEEEYRLFEPESTQKQEMDIWLKNFPQAWAETGGMGTAHCQAPVLIQLKATATPISIRQYPMPHEAYQGIKPHIRRMLDQGILKPCQSPWNTPLLPVKKPGTEDYRPVQDLREVNKRVEDIHPTVPNPYNLLSTLPPSHPWYTVLDLKDAFFCLRLHSESQLLFAFEWRDPEIGLSGQLTWTRLPQGFKNSPTLFNEALHSDLADFRVRYPALVLLQYVDDLLLAAATRTECLEGTKALLETLGNKGYRASAKKAQICLQEVTYLGYSLKDGQRWLTKARKEAILSIPVPKNSRQVREFLGKAGYCRLFIPGFAELAAPLYPLTRPGTLFQWGTEQQLAFEDIKKALLSSPALGLPDITKPFELFIDENSGFAKGVLVQKLGPWKRPVAYLSKKLDTVASGWPPCLRMVAAIAILVKDAGKLTLGQPLTILTSHPVEALVRQPPNKWLSNARMTHYQAMLLDAERVHFGPTVSLNPATLLPLPSGGNHHDCLQILAETHGTRPDLTDQPLPDADLTWYTDGSSFIRNGEREAGAAVTTESEVIWAAPLPPGTSAQRAELIALTQALKMAEGKKLTVYTDSRYAFATTHVHGEIYRRRGWLTSEGKEIKNKNEILALLEALFLPKRLSIIHCPGHQKGDSPQAKGNRLADDTAKKAATETHSSLTVLPAGKRTADGSEFEKRTADGSEFESPKKKAKVE

SEQ ID NO: 1249 - protein, 2090 aa, synthetic construct
MPAAKRVKLDGGDKKYSIGLDIGTNSVGWAVITDEYKVPSKKFKVLGNTDRHSIKKNLIGALLFDSGETAEATRLKRTARRRYTRRKNRICYLQEIFSNEMAKVDDSFFHRLEESFLVEEDKKHERHPIFGNIVDEVAYHEKYPTIYHLRKKLVDSTDKADLRLIYLALAHMIKFRGHFLIEGDLNPDNSDVDKLFIQLVQTYNQLFEENPINASGVDAKAILSARLSKSRRLENLIAQLPGEKKNGLFGNLIALSLGLTPNFKSNFDLAEDAKLQLSKDTYDDDLDNLLAQIGDQYADLFLAAKNLSDAILLSDILRVNTEITKAPLSASMIKRYDEHHQDLTLLKALVRQQLPEKYKEIFFDQSKNGYAGYIDGGASQEEFYKFIKPILEKMDGTEELLVKLNREDLLRKQRTFDNGSIPHQIHLGELHAILRRQEDFYPFLKDNREKIEKILTFRIPYYVGPLARGNSRFAWMTRKSEETITPWNFEEVVDKGASAQSFIERMTNFDKNLPNEKVLPKHSLLYEYFTVYNELTKVKYVTEGMRKPAFLSGEQKKAIVDLLFKTNRKVTVKQLKEDYFKKIECFDSVEISGVEDRFNASLGTYHDLLKIIKDKDFLDNEENEDILEDIVLTLTLFEDREMIEERLKTYAHLFDDKVMKQLKRRRYTGWGRLSRKLINGIRDKQSGKTILDFLKSDGFANRNFMQLIHDDSLTFKEDIQKAQVSGQGDSLHEHIANLAGSPAIKKGILQTVKVVDELVKVMGRHKPENIVIEMARENQTTQKGQKNSRERMKRIEEGIKELGSQILKEHPVENTQLQNEKLYLYYLQNGRDMYVDQELDINRLSDYDVDHIVPQSFLKDDSIDNKVLTRSDKARGKSDNVPSEEVVKKMKNYWRQLLNAKLITQRKFDNLTKAERGGLSELDKAGFIKRQLVETRQITKHVAQILDSRMNTKYDENDKLIREVKVITLKSKLVSDFRKDFQFYKVREINNYHHAHDAYLNAVVGTALIKKYPKLESEFVYGDYKVYDVRKMIAKSEQEIGKATAKYFFYSNIMNFFKTEITLANGEIRKRPLIETNGETGEIVWDKGRDFATVRKVLSMPQVNIVKKTEVQTGGFSKESILPKRNSDKLIARKKDWDPKKYGGFDSPTVAYSVLVVAKVEKGKSKKLKSVKELLGITIMERSSFEKNPIDFLEAKGYKEVKKDLIIKLPKYSLFELENGRKRMLASAGELQKGNELALPSKYVNFLYLASHYEKLKGSPEDNEQKQLFVEQHKHYLDEIIEQISEFSKRVILADANLDKVLSAYNKHRDKPIREQAENIIHLFTLTNLGAPAAFKYFDTTIDRKRYTSTKEVLDATLIHQSITGLYETRIDLSQLGGDGGGSSGGGGGTLQLEEEYRLFEPESTQKQEMDIWLKNFPQAWAETGGMGTAHCQAPVLIQLKATATPISIRQYPMPHEAYQGIKPHIRRMLDQGILKPCQSPWNTPLLPVKKPGTEDYRPVQDLREVNKRVEDIHPTVPNPYNLLSTLPPSHPWYTVLDLKDAFFCLRLHSESQLLFAFEWRDPEIGLSGQLTWTRLPQGFKNSPTLFNEALHSDLADFRVRYPALVLLQYVDDLLLAAATRTECLEGTKALLETLGNKGYRASAKKAQICLQEVTYLGYSLKDGQRWLTKARKEAILSIPVPKNSRQVREFLGKAGYCRLFIPGFAELAAPLYPLTRPGTLFQWGTEQQLAFEDIKKALLSSPALGLPDITKPFELFIDENSGFAKGVLVQKLGPWKRPVAYLSKKLDTVASGWPPCLRMVAAIAILVKDAGKLTLGQPLTILTSHPVEALVRQPPNKWLSNARMTHYQAMLLDAERVHFGPTVSLNPATLLPLPSGGNHHDCLQILAETHGTRPDLTDQPLPDADLTWYTDGSSFIRNGEREAGAAVTTESEVIWAAPLPPGTSAQRAELIALTQALKMAEGKKLTVYTDSRYAFATTHVHGEIYRRRGWLTSEGKEIKNKNEILALLEALFLPKRLSIIHCPGHQKGDSPQAKGNRLADDTAKKAATETHSSLTVLPAGKRTADGSEFEKRTADGSEFESPKKKAKVE

SEQ ID NO: 1250 - protein, 2090 aa, synthetic construct
MPAAKRVKLDGGDKKYSIGLDIGTNSVGWAVITDEYKVPSKKFKVLGNTDRHSIKKNLIGALLFDSGETAEATRLKRTARRRYTRRKNRICYLQEIFSNEMAKVDDSFFHRLEESFLVEEDKKHERHPIFGNIVDEVAYHEKYPTIYHLRKKLVDSTDKADLRLIYLALAHMIKFRGHFLIEGDLNPDNSDVDKLFIQLVQTYNQLFEENPINASGVDAKAILSARLSKSRRLENLIAQLPGEKKNGLFGNLIALSLGLTPNFKSNFDLAEDAKLQLSKDTYDDDLDNLLAQIGDQYADLFLAAKNLSDAILLSDILRVNTEITKAPLSASMIKRYDEHHQDLTLLKALVRQQLPEKYKEIFFDQSKNGYAGYIDGGASQEEFYKFIKPILEKMDGTEELLVKLNREDLLRKQRTFDNGSIPHQIHLGELHAILRRQEDFYPFLKDNREKIEKILTFRIPYYVGPLARGNSRFAWMTRKSEETITPWNFEEVVDKGASAQSFIERMTNFDKNLPNEKVLPKHSLLYEYFTVYNELTKVKYVTEGMRKPAFLSGEQKKAIVDLLFKTNRKVTVKQLKEDYFKKIECFDSVEISGVEDRFNASLGTYHDLLKIIKDKDFLDNEENEDILEDIVLTLTLFEDREMIEERLKTYAHLFDDKVMKQLKRRRYTGWGRLSRKLINGIRDKQSGKTILDFLKSDGFANRNFMQLIHDDSLTFKEDIQKAQVSGQGDSLHEHIANLAGSPAIKKGILQTVKVVDELVKVMGRHKPENIVIEMARENQTTQKGQKNSRERMKRIEEGIKELGSQILKEHPVENTQLQNEKLYLYYLQNGRDMYVDQELDINRLSDYDVDHIVPQSFLKDDSIDNKVLTRSDKARGKSDNVPSEEVVKKMKNYWRQLLNAKLITQRKFDNLTKAERGGLSELDKAGFIKRQLVETRQITKHVAQILDSRMNTKYDENDKLIREVKVITLKSKLVSDFRKDFQFYKVREINNYHHAHDAYLNAVVGTALIKKYPKLESEFVYGDYKVYDVRKMIAKSEQEIGKATAKYFFYSNIMNFFKTEITLANGEIRKRPLIETNGETGEIVWDKGRDFATVRKVLSMPQVNIVKKTEVQTGGFSKESILPKRNSDKLIARKKDWDPKKYGGFDSPTVAYSVLVVAKVEKGKSKKLKSVKELLGITIMERSSFEKNPIDFLEAKGYKEVKKDLIIKLPKYSLFELENGRKRMLASAGELQKGNELALPSKYVNFLYLASHYEKLKGSPEDNEQKQLFVEQHKHYLDEIIEQISEFSKRVILADANLDKVLSAYNKHRDKPIREQAENIIHLFTLTNLGAPAAFKYFDTTIDRKRYTSTKEVLDATLIHQSITGLYETRIDLSQLGGDGGGSSGSSGGTLQLEEEYRLFEPESTQKQEMDIWLKNFPQAWAETGGMGTAHCQAPVLIQLKATATPISIRQYPMPHEAYQGIKPHIRRMLDQGILKPCQSPWNTPLLPVKKPGTEDYRPVQDLREVNKRVEDIHPTVPNPYNLLSTLPPSHPWYTVLDLKDAFFCLRLHSESQLLFAFEWRDPEIGLSGQLTWTRLPQGFKNSPTLFNEALHSDLADFRVRYPALVLLQYVDDLLLAAATRTECLEGTKALLETLGNKGYRASAKKAQICLQEVTYLGYSLKDGQRWLTKARKEAILSIPVPKNSRQVREFLGKAGYCRLFIPGFAELAAPLYPLTRPGTLFQWGTEQQLAFEDIKKALLSSPALGLPDITKPFELFIDENSGFAKGVLVQKLGPWKRPVAYLSKKLDTVASGWPPCLRMVAAIAILVKDAGKLTLGQPLTILTSHPVEALVRQPPNKWLSNARMTHYQAMLLDAERVHFGPTVSLNPATLLPLPSGGNHHDCLQILAETHGTRPDLTDQPLPDADLTWYTDGSSFIRNGEREAGAAVTTESEVIWAAPLPPGTSAQRAELIALTQALKMAEGKKLTVYTDSRYAFATTHVHGEIYRRRGWLTSEGKEIKNKNEILALLEALFLPKRLSIIHCPGHQKGDSPQAKGNRLADDTAKKAATETHSSLTVLPAGKRTADGSEFEKRTADGSEFESPKKKAKVE

SEQ ID NO: 1251 - protein, 2088 aa, synthetic construct
MPAAKRVKLDGGDKKYSIGLDIGTNSVGWAVITDEYKVPSKKFKVLGNTDRHSIKKNLIGALLFDSGETAEATRLKRTARRRYTRRKNRICYLQEIFSNEMAKVDDSFFHRLEESFLVEEDKKHERHPIFGNIVDEVAYHEKYPTIYHLRKKLVDSTDKADLRLIYLALAHMIKFRGHFLIEGDLNPDNSDVDKLFIQLVQTYNQLFEENPINASGVDAKAILSARLSKSRRLENLIAQLPGEKKNGLFGNLIALSLGLTPNFKSNFDLAEDAKLQLSKDTYDDDLDNLLAQIGDQYADLFLAAKNLSDAILLSDILRVNTEITKAPLSASMIKRYDEHHQDLTLLKALVRQQLPEKYKEIFFDQSKNGYAGYIDGGASQEEFYKFIKPILEKMDGTEELLVKLNREDLLRKQRTFDNGSIPHQIHLGELHAILRRQEDFYPFLKDNREKIEKILTFRIPYYVGPLARGNSRFAWMTRKSEETITPWNFEEVVDKGASAQSFIERMTNFDKNLPNEKVLPKHSLLYEYFTVYNELTKVKYVTEGMRKPAFLSGEQKKAIVDLLFKTNRKVTVKQLKEDYFKKIECFDSVEISGVEDRFNASLGTYHDLLKIIKDKDFLDNEENEDILEDIVLTLTLFEDREMIEERLKTYAHLFDDKVMKQLKRRRYTGWGRLSRKLINGIRDKQSGKTILDFLKSDGFANRNFMQLIHDDSLTFKEDIQKAQVSGQGDSLHEHIANLAGSPAIKKGILQTVKVVDELVKVMGRHKPENIVIEMARENQTTQKGQKNSRERMKRIEEGIKELGSQILKEHPVENTQLQNEKLYLYYLQNGRDMYVDQELDINRLSDYDVDHIVPQSFLKDDSIDNKVLTRSDKARGKSDNVPSEEVVKKMKNYWRQLLNAKLITQRKFDNLTKAERGGLSELDKAGFIKRQLVETRQITKHVAQILDSRMNTKYDENDKLIREVKVITLKSKLVSDFRKDFQFYKVREINNYHHAHDAYLNAVVGTALIKKYPKLESEFVYGDYKVYDVRKMIAKSEQEIGKATAKYFFYSNIMNFFKTEITLANGEIRKRPLIETNGETGEIVWDKGRDFATVRKVLSMPQVNIVKKTEVQTGGFSKESILPKRNSDKLIARKKDWDPKKYGGFDSPTVAYSVLVVAKVEKGKSKKLKSVKELLGITIMERSSFEKNPIDFLEAKGYKEVKKDLIIKLPKYSLFELENGRKRMLASAGELQKGNELALPSKYVNFLYLASHYEKLKGSPEDNEQKQLFVEQHKHYLDEIIEQISEFSKRVILADANLDKVLSAYNKHRDKPIREQAENIIHLFTLTNLGAPAAFKYFDTTIDRKRYTSTKEVLDATLIHQSITGLYETRIDLSQLGGDGGGGGGGGTLQLEEEYRLFEPESTQKQEMDIWLKNFPQAWAETGGMGTAHCQAPVLIQLKATATPISIRQYPMPHEAYQGIKPHIRRMLDQGILKPCQSPWNTPLLPVKKPGTEDYRPVQDLREVNKRVEDIHPTVPNPYNLLSTLPPSHPWYTVLDLKDAFFCLRLHSESQLLFAFEWRDPEIGLSGQLTWTRLPQGFKNSPTLFNEALHSDLADFRVRYPALVLLQYVDDLLLAAATRTECLEGTKALLETLGNKGYRASAKKAQICLQEVTYLGYSLKDGQRWLTKARKEAILSIPVPKNSRQVREFLGKAGYCRLFIPGFAELAAPLYPLTRPGTLFQWGTEQQLAFEDIKKALLSSPALGLPDITKPFELFIDENSGFAKGVLVQKLGPWKRPVAYLSKKLDTVASGWPPCLRMVAAIAILVKDAGKLTLGQPLTILTSHPVEALVRQPPNKWLSNARMTHYQAMLLDAERVHFGPTVSLNPATLLPLPSGGNHHDCLQILAETHGTRPDLTDQPLPDADLTWYTDGSSFIRNGEREAGAAVTTESEVIWAAPLPPGTSAQRAELIALTQALKMAEGKKLTVYTDSRYAFATTHVHGEIYRRRGWLTSEGKEIKNKNEILALLEALFLPKRLSIIHCPGHQKGDSPQAKGNRLADDTAKKAATETHSSLTVLPAGKRTADGSEFEKRTADGSEFESPKKKAKVE

SEQ ID NO: 1252 - protein, 2090 aa, synthetic construct
MPAAKRVKLDGGDKKYSIGLDIGTNSVGWAVITDEYKVPSKKFKVLGNTDRHSIKKNLIGALLFDSGETAEATRLKRTARRRYTRRKNRICYLQEIFSNEMAKVDDSFFHRLEESFLVEEDKKHERHPIFGNIVDEVAYHEKYPTIYHLRKKLVDSTDKADLRLIYLALAHMIKFRGHFLIEGDLNPDNSDVDKLFIQLVQTYNQLFEENPINASGVDAKAILSARLSKSRRLENLIAQLPGEKKNGLFGNLIALSLGLTPNFKSNFDLAEDAKLQLSKDTYDDDLDNLLAQIGDQYADLFLAAKNLSDAILLSDILRVNTEITKAPLSASMIKRYDEHHQDLTLLKALVRQQLPEKYKEIFFDQSKNGYAGYIDGGASQEEFYKFIKPILEKMDGTEELLVKLNREDLLRKQRTFDNGSIPHQIHLGELHAILRRQEDFYPFLKDNREKIEKILTFRIPYYVGPLARGNSRFAWMTRKSEETITPWNFEEVVDKGASAQSFIERMTNFDKNLPNEKVLPKHSLLYEYFTVYNELTKVKYVTEGMRKPAFLSGEQKKAIVDLLFKTNRKVTVKQLKEDYFKKIECFDSVEISGVEDRFNASLGTYHDLLKIIKDKDFLDNEENEDILEDIVLTLTLFEDREMIEERLKTYAHLFDDKVMKQLKRRRYTGWGRLSRKLINGIRDKQSGKTILDFLKSDGFANRNFMQLIHDDSLTFKEDIQKAQVSGQGDSLHEHIANLAGSPAIKKGILQTVKVVDELVKVMGRHKPENIVIEMARENQTTQKGQKNSRERMKRIEEGIKELGSQILKEHPVENTQLQNEKLYLYYLQNGRDMYVDQELDINRLSDYDVDHIVPQSFLKDDSIDNKVLTRSDKARGKSDNVPSEEVVKKMKNYWRQLLNAKLITQRKFDNLTKAERGGLSELDKAGFIKRQLVETRQITKHVAQILDSRMNTKYDENDKLIREVKVITLKSKLVSDFRKDFQFYKVREINNYHHAHDAYLNAVVGTALIKKYPKLESEFVYGDYKVYDVRKMIAKSEQEIGKATAKYFFYSNIMNFFKTEITLANGEIRKRPLIETNGETGEIVWDKGRDFATVRKVLSMPQVNIVKKTEVQTGGFSKESILPKRNSDKLIARKKDWDPKKYGGFDSPTVAYSVLVVAKVEKGKSKKLKSVKELLGITIMERSSFEKNPIDFLEAKGYKEVKKDLIIKLPKYSLFELENGRKRMLASAGELQKGNELALPSKYVNFLYLASHYEKLKGSPEDNEQKQLFVEQHKHYLDEIIEQISEFSKRVILADANLDKVLSAYNKHRDKPIREQAENIIHLFTLTNLGAPAAFKYFDTTIDRKRYTSTKEVLDATLIHQSITGLYETRIDLSQLGGDGGPAPGSSGGTLQLEEEYRLFEPESTQKQEMDIWLKNFPQAWAETGGMGTAHCQAPVLIQLKATATPISIRQYPMPHEAYQGIKPHIRRMLDQGILKPCQSPWNTPLLPVKKPGTEDYRPVQDLREVNKRVEDIHPTVPNPYNLLSTLPPSHPWYTVLDLKDAFFCLRLHSESQLLFAFEWRDPEIGLSGQLTWTRLPQGFKNSPTLFNEALHSDLADFRVRYPALVLLQYVDDLLLAAATRTECLEGTKALLETLGNKGYRASAKKAQICLQEVTYLGYSLKDGQRWLTKARKEAILSIPVPKNSRQVREFLGKAGYCRLFIPGFAELAAPLYPLTRPGTLFQWGTEQQLAFEDIKKALLSSPALGLPDITKPFELFIDENSGFAKGVLVQKLGPWKRPVAYLSKKLDTVASGWPPCLRMVAAIAILVKDAGKLTLGQPLTILTSHPVEALVRQPPNKWLSNARMTHYQAMLLDAERVHFGPTVSLNPATLLPLPSGGNHHDCLQILAETHGTRPDLTDQPLPDADLTWYTDGSSFIRNGEREAGAAVTTESEVIWAAPLPPGTSAQRAELIALTQALKMAEGKKLTVYTDSRYAFATTHVHGEIYRRRGWLTSEGKEIKNKNEILALLEALFLPKRLSIIHCPGHQKGDSPQAKGNRLADDTAKKAATETHSSLTVLPAGKRTADGSEFEKRTADGSEFESPKKKAKVE

SEQ ID NO: 1253 - protein, 2095 aa, synthetic construct
MPAAKRVKLDGGDKKYSIGLDIGTNSVGWAVITDEYKVPSKKFKVLGNTDRHSIKKNLIGALLFDSGETAEATRLKRTARRRYTRRKNRICYLQEIFSNEMAKVDDSFFHRLEESFLVEEDKKHERHPIFGNIVDEVAYHEKYPTIYHLRKKLVDSTDKADLRLIYLALAHMIKFRGHFLIEGDLNPDNSDVDKLFIQLVQTYNQLFEENPINASGVDAKAILSARLSKSRRLENLIAQLPGEKKNGLFGNLIALSLGLTPNFKSNFDLAEDAKLQLSKDTYDDDLDNLLAQIGDQYADLFLAAKNLSDAILLSDILRVNTEITKAPLSASMIKRYDEHHQDLTLLKALVRQQLPEKYKEIFFDQSKNGYAGYIDGGASQEEFYKFIKPILEKMDGTEELLVKLNREDLLRKQRTFDNGSIPHQIHLGELHAILRRQEDFYPFLKDNREKIEKILTFRIPYYVGPLARGNSRFAWMTRKSEETITPWNFEEVVDKGASAQSFIERMTNFDKNLPNEKVLPKHSLLYEYFTVYNELTKVKYVTEGMRKPAFLSGEQKKAIVDLLFKTNRKVTVKQLKEDYFKKIECFDSVEISGVEDRFNASLGTYHDLLKIIKDKDFLDNEENEDILEDIVLTLTLFEDREMIEERLKTYAHLFDDKVMKQLKRRRYTGWGRLSRKLINGIRDKQSGKTILDFLKSDGFANRNFMQLIHDDSLTFKEDIQKAQVSGQGDSLHEHIANLAGSPAIKKGILQTVKVVDELVKVMGRHKPENIVIEMARENQTTQKGQKNSRERMKRIEEGIKELGSQILKEHPVENTQLQNEKLYLYYLQNGRDMYVDQELDINRLSDYDVDHIVPQSFLKDDSIDNKVLTRSDKARGKSDNVPSEEVVKKMKNYWRQLLNAKLITQRKFDNLTKAERGGLSELDKAGFIKRQLVETRQITKHVAQILDSRMNTKYDENDKLIREVKVITLKSKLVSDFRKDFQFYKVREINNYHHAHDAYLNAVVGTALIKKYPKLESEFVYGDYKVYDVRKMIAKSEQEIGKATAKYFFYSNIMNFFKTEITLANGEIRKRPLIETNGETGEIVWDKGRDFATVRKVLSMPQVNIVKKTEVQTGGFSKESILPKRNSDKLIARKKDWDPKKYGGFDSPTVAYSVLVVAKVEKGKSKKLKSVKELLGITIMERSSFEKNPIDFLEAKGYKEVKKDLIIKLPKYSLFELENGRKRMLASAGELQKGNELALPSKYVNFLYLASHYEKLKGSPEDNEQKQLFVEQHKHYLDEIIEQISEFSKRVILADANLDKVLSAYNKHRDKPIREQAENIIHLFTLTNLGAPAAFKYFDTTIDRKRYTSTKEVLDATLIHQSITGLYETRIDLSQLGGDGGEAAAKGGGPAPGGTLQLEEEYRLFEPESTQKQEMDIWLKNFPQAWAETGGMGTAHCQAPVLIQLKATATPISIRQYPMPHEAYQGIKPHIRRMLDQGILKPCQSPWNTPLLPVKKPGTEDYRPVQDLREVNKRVEDIHPTVPNPYNLLSTLPPSHPWYTVLDLKDAFFCLRLHSESQLLFAFEWRDPEIGLSGQLTWTRLPQGFKNSPTLFNEALHSDLADFRVRYPALVLLQYVDDLLLAAATRTECLEGTKALLETLGNKGYRASAKKAQICLQEVTYLGYSLKDGQRWLTKARKEAILSIPVPKNSRQVREFLGKAGYCRLFIPGFAELAAPLYPLTRPGTLFQWGTEQQLAFEDIKKALLSSPALGLPDITKPFELFIDENSGFAKGVLVQKLGPWKRPVAYLSKKLDTVASGWPPCLRMVAAIAILVKDAGKLTLGQPLTILTSHPVEALVRQPPNKWLSNARMTHYQAMLLDAERVHFGPTVSLNPATLLPLPSGGNHHDCLQILAETHGTRPDLTDQPLPDADLTWYTDGSSFIRNGEREAGAAVTTESEVIWAAPLPPGTSAQRAELIALTQALKMAEGKKLTVYTDSRYAFATTHVHGEIYRRRGWLTSEGKEIKNKNEILALLEALFLPKRLSIIHCPGHQKGDSPQAKGNRLADDTAKKAATETHSSLTVLPAGKRTADGSEFEKRTADGSEFESPKKKAKVE

SEQ ID NO: 1254 - protein, 2095 aa, synthetic construct
MPAAKRVKLDGGDKKYSIGLDIGTNSVGWAVITDEYKVPSKKFKVLGNTDRHSIKKNLIGALLFDSGETAEATRLKRTARRRYTRRKNRICYLQEIFSNEMAKVDDSFFHRLEESFLVEEDKKHERHPIFGNIVDEVAYHEKYPTIYHLRKKLVDSTDKADLRLIYLALAHMIKFRGHFLIEGDLNPDNSDVDKLFIQLVQTYNQLFEENPINASGVDAKAILSARLSKSRRLENLIAQLPGEKKNGLFGNLIALSLGLTPNFKSNFDLAEDAKLQLSKDTYDDDLDNLLAQIGDQYADLFLAAKNLSDAILLSDILRVNTEITKAPLSASMIKRYDEHHQDLTLLKALVRQQLPEKYKEIFFDQSKNGYAGYIDGGASQEEFYKFIKPILEKMDGTEELLVKLNREDLLRKQRTFDNGSIPHQIHLGELHAILRRQEDFYPFLKDNREKIEKILTFRIPYYVGPLARGNSRFAWMTRKSEETITPWNFEEVVDKGASAQSFIERMTNFDKNLPNEKVLPKHSLLYEYFTVYNELTKVKYVTEGMRKPAFLSGEQKKAIVDLLFKTNRKVTVKQLKEDYFKKIECFDSVEISGVEDRFNASLGTYHDLLKIIKDKDFLDNEENEDILEDIVLTLTLFEDREMIEERLKTYAHLFDDKVMKQLKRRRYTGWGRLSRKLINGIRDKQSGKTILDFLKSDGFANRNFMQLIHDDSLTFKEDIQKAQVSGQGDSLHEHIANLAGSPAIKKGILQTVKVVDELVKVMGRHKPENIVIEMARENQTTQKGQKNSRERMKRIEEGIKELGSQILKEHPVENTQLQNEKLYLYYLQNGRDMYVDQELDINRLSDYDVDHIVPQSFLKDDSIDNKVLTRSDKARGKSDNVPSEEVVKKMKNYWRQLLNAKLITQRKFDNLTKAERGGLSELDKAGFIKRQLVETRQITKHVAQILDSRMNTKYDENDKLIREVKVITLKSKLVSDFRKDFQFYKVREINNYHHAHDAYLNAVVGTALIKKYPKLESEFVYGDYKVYDVRKMIAKSEQEIGKATAKYFFYSNIMNFFKTEITLANGEIRKRPLIETNGETGEIVWDKGRDFATVRKVLSMPQVNIVKKTEVQTGGFSKESILPKRNSDKLIARKKDWDPKKYGGFDSPTVAYSVLVVAKVEKGKSKKLKSVKELLGITIMERSSFEKNPIDFLEAKGYKEVKKDLIIKLPKYSLFELENGRKRMLASAGELQKGNELALPSKYVNFLYLASHYEKLKGSPEDNEQKQLFVEQHKHYLDEIIEQISEFSKRVILADANLDKVLSAYNKHRDKPIREQAENIIHLFTLTNLGAPAAFKYFDTTIDRKRYTSTKEVLDATLIHQSITGLYETRIDLSQLGGDGGEAAAKPAPGGSGGTLQLEEEYRLFEPESTQKQEMDIWLKNFPQAWAETGGMGTAHCQAPVLIQLKATATPISIRQYPMPHEAYQGIKPHIRRMLDQGILKPCQSPWNTPLLPVKKPGTEDYRPVQDLREVNKRVEDIHPTVPNPYNLLSTLPPSHPWYTVLDLKDAFFCLRLHSESQLLFAFEWRDPEIGLSGQLTWTRLPQGFKNSPTLFNEALHSDLADFRVRYPALVLLQYVDDLLLAAATRTECLEGTKALLETLGNKGYRASAKKAQICLQEVTYLGYSLKDGQRWLTKARKEAILSIPVPKNSRQVREFLGKAGYCRLFIPGFAELAAPLYPLTRPGTLFQWGTEQQLAFEDIKKALLSSPALGLPDITKPFELFIDENSGFAKGVLVQKLGPWKRPVAYLSKKLDTVASGWPPCLRMVAAIAILVKDAGKLTLGQPLTILTSHPVEALVRQPPNKWLSNARMTHYQAMLLDAERVHFGPTVSLNPATLLPLPSGGNHHDCLQILAETHGTRPDLTDQPLPDADLTWYTDGSSFIRNGEREAGAAVTTESEVIWAAPLPPGTSAQRAELIALTQALKMAEGKKLTVYTDSRYAFATTHVHGEIYRRRGWLTSEGKEIKNKNEILALLEALFLPKRLSIIHCPGHQKGDSPQAKGNRLADDTAKKAATETHSSLTVLPAGKRTADGSEFEKRTADGSEFESPKKKAKVE

SEQ ID NO: 1255 - protein, 2093 aa, synthetic construct
MPAAKRVKLDGGDKKYSIGLDIGTNSVGWAVITDEYKVPSKKFKVLGNTDRHSIKKNLIGALLFDSGETAEATRLKRTARRRYTRRKNRICYLQEIFSNEMAKVDDSFFHRLEESFLVEEDKKHERHPIFGNIVDEVAYHEKYPTIYHLRKKLVDSTDKADLRLIYLALAHMIKFRGHFLIEGDLNPDNSDVDKLFIQLVQTYNQLFEENPINASGVDAKAILSARLSKSRRLENLIAQLPGEKKNGLFGNLIALSLGLTPNFKSNFDLAEDAKLQLSKDTYDDDLDNLLAQIGDQYADLFLAAKNLSDAILLSDILRVNTEITKAPLSASMIKRYDEHHQDLTLLKALVRQQLPEKYKEIFFDQSKNGYAGYIDGGASQEEFYKFIKPILEKMDGTEELLVKLNREDLLRKQRTFDNGSIPHQIHLGELHAILRRQEDFYPFLKDNREKIEKILTFRIPYYVGPLARGNSRFAWMTRKSEETITPWNFEEVVDKGASAQSFIERMTNFDKNLPNEKVLPKHSLLYEYFTVYNELTKVKYVTEGMRKPAFLSGEQKKAIVDLLFKTNRKVTVKQLKEDYFKKIECFDSVEISGVEDRFNASLGTYHDLLKIIKDKDFLDNEENEDILEDIVLTLTLFEDREMIEERLKTYAHLFDDKVMKQLKRRRYTGWGRLSRKLINGIRDKQSGKTILDFLKSDGFANRNFMQLIHDDSLTFKEDIQKAQVSGQGDSLHEHIANLAGSPAIKKGILQTVKVVDELVKVMGRHKPENIVIEMARENQTTQKGQKNSRERMKRIEEGIKELGSQILKEHPVENTQLQNEKLYLYYLQNGRDMYVDQELDINRLSDYDVDHIVPQSFLKDDSIDNKVLTRSDKARGKSDNVPSEEVVKKMKNYWRQLLNAKLITQRKFDNLTKAERGGLSELDKAGFIKRQLVETRQITKHVAQILDSRMNTKYDENDKLIREVKVITLKSKLVSDFRKDFQFYKVREINNYHHAHDAYLNAVVGTALIKKYPKLESEFVYGDYKVYDVRKMIAKSEQEIGKATAKYFFYSNIMNFFKTEITLANGEIRKRPLIETNGETGEIVWDKGRDFATVRKVLSMPQVNIVKKTEVQTGGFSKESILPKRNSDKLIARKKDWDPKKYGGFDSPTVAYSVLVVAKVEKGKSKKLKSVKELLGITIMERSSFEKNPIDFLEAKGYKEVKKDLIIKLPKYSLFELENGRKRMLASAGELQKGNELALPSKYVNFLYLASHYEKLKGSPEDNEQKQLFVEQHKHYLDEIIEQISEFSKRVILADANLDKVLSAYNKHRDKPIREQAENIIHLFTLTNLGAPAAFKYFDTTIDRKRYTSTKEVLDATLIHQSITGLYETRIDLSQLGGDGGGSSGSSGSSGGTLQLEEEYRLFEPESTQKQEMDIWLKNFPQAWAETGGMGTAHCQAPVLIQLKATATPISIRQYPMPHEAYQGIKPHIRRMLDQGILKPCQSPWNTPLLPVKKPGTEDYRPVQDLREVNKRVEDIHPTVPNPYNLLSTLPPSHPWYTVLDLKDAFFCLRLHSESQLLFAFEWRDPEIGLSGQLTWTRLPQGFKNSPTLFNEALHSDLADFRVRYPALVLLQYVDDLLLAAATRTECLEGTKALLETLGNKGYRASAKKAQICLQEVTYLGYSLKDGQRWLTKARKEAILSIPVPKNSRQVREFLGKAGYCRLFIPGFAELAAPLYPLTRPGTLFQWGTEQQLAFEDIKKALLSSPALGLPDITKPFELFIDENSGFAKGVLVQKLGPWKRPVAYLSKKLDTVASGWPPCLRMVAAIAILVKDAGKLTLGQPLTILTSHPVEALVRQPPNKWLSNARMTHYQAMLLDAERVHFGPTVSLNPATLLPLPSGGNHHDCLQILAETHGTRPDLTDQPLPDADLTWYTDGSSFIRNGEREAGAAVTTESEVIWAAPLPPGTSAQRAELIALTQALKMAEGKKLTVYTDSRYAFATTHVHGEIYRRRGWLTSEGKEIKNKNEILALLEALFLPKRLSIIHCPGHQKGDSPQAKGNRLADDTAKKAATETHSSLTVLPAGKRTADGSEFEKRTADGSEFESPKKKAKVE

SEQ ID NO: 1256 - protein, 2093 aa, synthetic construct
MPAAKRVKLDGGDKKYSIGLDIGTNSVGWAVITDEYKVPSKKFKVLGNTDRHSIKKNLIGALLFDSGETAEATRLKRTARRRYTRRKNRICYLQEIFSNEMAKVDDSFFHRLEESFLVEEDKKHERHPIFGNIVDEVAYHEKYPTIYHLRKKLVDSTDKADLRLIYLALAHMIKFRGHFLIEGDLNPDNSDVDKLFIQLVQTYNQLFEENPINASGVDAKAILSARLSKSRRLENLIAQLPGEKKNGLFGNLIALSLGLTPNFKSNFDLAEDAKLQLSKDTYDDDLDNLLAQIGDQYADLFLAAKNLSDAILLSDILRVNTEITKAPLSASMIKRYDEHHQDLTLLKALVRQQLPEKYKEIFFDQSKNGYAGYIDGGASQEEFYKFIKPILEKMDGTEELLVKLNREDLLRKQRTFDNGSIPHQIHLGELHAILRRQEDFYPFLKDNREKIEKILTFRIPYYVGPLARGNSRFAWMTRKSEETITPWNFEEVVDKGASAQSFIERMTNFDKNLPNEKVLPKHSLLYEYFTVYNELTKVKYVTEGMRKPAFLSGEQKKAIVDLLFKTNRKVTVKQLKEDYFKKIECFDSVEISGVEDRFNASLGTYHDLLKIIKDKDFLDNEENEDILEDIVLTLTLFEDREMIEERLKTYAHLFDDKVMKQLKRRRYTGWGRLSRKLINGIRDKQSGKTILDFLKSDGFANRNFMQLIHDDSLTFKEDIQKAQVSGQGDSLHEHIANLAGSPAIKKGILQTVKVVDELVKVMGRHKPENIVIEMARENQTTQKGQKNSRERMKRIEEGIKELGSQILKEHPVENTQLQNEKLYLYYLQNGRDMYVDQELDINRLSDYDVDHIVPQSFLKDDSIDNKVLTRSDKARGKSDNVPSEEVVKKMKNYWRQLLNAKLITQRKFDNLTKAERGGLSELDKAGFIKRQLVETRQITKHVAQILDSRMNTKYDENDKLIREVKVITLKSKLVSDFRKDFQFYKVREINNYHHAHDAYLNAVVGTALIKKYPKLESEFVYGDYKVYDVRKMIAKSEQEIGKATAKYFFYSNIMNFFKTEITLANGEIRKRPLIETNGETGEIVWDKGRDFATVRKVLSMPQVNIVKKTEVQTGGFSKESILPKRNSDKLIARKKDWDPKKYGGFDSPTVAYSVLVVAKVEKGKSKKLKSVKELLGITIMERSSFEKNPIDFLEAKGYKEVKKDLIIKLPKYSLFELENGRKRMLASAGELQKGNELALPSKYVNFLYLASHYEKLKGSPEDNEQKQLFVEQHKHYLDEIIEQISEFSKRVILADANLDKVLSAYNKHRDKPIREQAENIIHLFTLTNLGAPAAFKYFDTTIDRKRYTSTKEVLDATLIHQSITGLYETRIDLSQLGGDGGPAPGGSGGGGGTLQLEEEYRLFEPESTQKQEMDIWLKNFPQAWAETGGMGTAHCQAPVLIQLKATATPISIRQYPMPHEAYQGIKPHIRRMLDQGILKPCQSPWNTPLLPVKKPGTEDYRPVQDLREVNKRVEDIHPTVPNPYNLLSTLPPSHPWYTVLDLKDAFFCLRLHSESQLLFAFEWRDPEIGLSGQLTWTRLPQGFKNSPTLFNEALHSDLADFRVRYPALVLLQYVDDLLLAAATRTECLEGTKALLETLGNKGYRASAKKAQICLQEVTYLGYSLKDGQRWLTKARKEAILSIPVPKNSRQVREFLGKAGYCRLFIPGFAELAAPLYPLTRPGTLFQWGTEQQLAFEDIKKALLSSPALGLPDITKPFELFIDENSGFAKGVLVQKLGPWKRPVAYLSKKLDTVASGWPPCLRMVAAIAILVKDAGKLTLGQPLTILTSHPVEALVRQPPNKWLSNARMTHYQAMLLDAERVHFGPTVSLNPATLLPLPSGGNHHDCLQILAETHGTRPDLTDQPLPDADLTWYTDGSSFIRNGEREAGAAVTTESEVIWAAPLPPGTSAQRAELIALTQALKMAEGKKLTVYTDSRYAFATTHVHGEIYRRRGWLTSEGKEIKNKNEILALLEALFLPKRLSIIHCPGHQKGDSPQAKGNRLADDTAKKAATETHSSLTVLPAGKRTADGSEFEKRTADGSEFESPKKKAKVE

SEQ ID NO: 1257 - protein, 2093 aa, synthetic construct
MPAAKRVKLDGGDKKYSIGLDIGTNSVGWAVITDEYKVPSKKFKVLGNTDRHSIKKNLIGALLFDSGETAEATRLKRTARRRYTRRKNRICYLQEIFSNEMAKVDDSFFHRLEESFLVEEDKKHERHPIFGNIVDEVAYHEKYPTIYHLRKKLVDSTDKADLRLIYLALAHMIKFRGHFLIEGDLNPDNSDVDKLFIQLVQTYNQLFEENPINASGVDAKAILSARLSKSRRLENLIAQLPGEKKNGLFGNLIALSLGLTPNFKSNFDLAEDAKLQLSKDTYDDDLDNLLAQIGDQYADLFLAAKNLSDAILLSDILRVNTEITKAPLSASMIKRYDEHHQDLTLLKALVRQQLPEKYKEIFFDQSKNGYAGYIDGGASQEEFYKFIKPILEKMDGTEELLVKLNREDLLRKQRTFDNGSIPHQIHLGELHAILRRQEDFYPFLKDNREKIEKILTFRIPYYVGPLARGNSRFAWMTRKSEETITPWNFEEVVDKGASAQSFIERMTNFDKNLPNEKVLPKHSLLYEYFTVYNELTKVKYVTEGMRKPAFLSGEQKKAIVDLLFKTNRKVTVKQLKEDYFKKIECFDSVEISGVEDRFNASLGTYHDLLKIIKDKDFLDNEENEDILEDIVLTLTLFEDREMIEERLKTYAHLFDDKVMKQLKRRRYTGWGRLSRKLINGIRDKQSGKTILDFLKSDGFANRNFMQLIHDDSLTFKEDIQKAQVSGQGDSLHEHIANLAGSPAIKKGILQTVKVVDELVKVMGRHKPENIVIEMARENQTTQKGQKNSRERMKRIEEGIKELGSQILKEHPVENTQLQNEKLYLYYLQNGRDMYVDQELDINRLSDYDVDHIVPQSFLKDDSIDNKVLTRSDKARGKSDNVPSEEVVKKMKNYWRQLLNAKLITQRKFDNLTKAERGGLSELDKAGFIKRQLVETRQITKHVAQILDSRMNTKYDENDKLIREVKVITLKSKLVSDFRKDFQFYKVREINNYHHAHDAYLNAVVGTALIKKYPKLESEFVYGDYKVYDVRKMIAKSEQEIGKATAKYFFYSNIMNFFKTEITLANGEIRKRPLIETNGETGEIVWDKGRDFATVRKVLSMPQVNIVKKTEVQTGGFSKESILPKRNSDKLIARKKDWDPKKYGGFDSPTVAYSVLVVAKVEKGKSKKLKSVKELLGITIMERSSFEKNPIDFLEAKGYKEVKKDLIIKLPKYSLFELENGRKRMLASAGELQKGNELALPSKYVNFLYLASHYEKLKGSPEDNEQKQLFVEQHKHYLDEIIEQISEFSKRVILADANLDKVLSAYNKHRDKPIREQAENIIHLFTLTNLGAPAAFKYFDTTIDRKRYTSTKEVLDATLIHQSITGLYETRIDLSQLGGDGGGGSPAPGGGGGTLQLEEEYRLFEPESTQKQEMDIWLKNFPQAWAETGGMGTAHCQAPVLIQLKATATPISIRQYPMPHEAYQGIKPHIRRMLDQGILKPCQSPWNTPLLPVKKPGTEDYRPVQDLREVNKRVEDIHPTVPNPYNLLSTLPPSHPWYTVLDLKDAFFCLRLHSESQLLFAFEWRDPEIGLSGQLTWTRLPQGFKNSPTLFNEALHSDLADFRVRYPALVLLQYVDDLLLAAATRTECLEGTKALLETLGNKGYRASAKKAQICLQEVTYLGYSLKDGQRWLTKARKEAILSIPVPKNSRQVREFLGKAGYCRLFIPGFAELAAPLYPLTRPGTLFQWGTEQQLAFEDIKKALLSSPALGLPDITKPFELFIDENSGFAKGVLVQKLGPWKRPVAYLSKKLDTVASGWPPCLRMVAAIAILVKDAGKLTLGQPLTILTSHPVEALVRQPPNKWLSNARMTHYQAMLLDAERVHFGPTVSLNPATLLPLPSGGNHHDCLQILAETHGTRPDLTDQPLPDADLTWYTDGSSFIRNGEREAGAAVTTESEVIWAAPLPPGTSAQRAELIALTQALKMAEGKKLTVYTDSRYAFATTHVHGEIYRRRGWLTSEGKEIKNKNEILALLEALFLPKRLSIIHCPGHQKGDSPQAKGNRLADDTAKKAATETHSSLTVLPAGKRTADGSEFEKRTADGSEFESPKKKAKVE

SEQ ID NO: 1258 - protein, 2093 aa, synthetic construct
MPAAKRVKLDGGDKKYSIGLDIGTNSVGWAVITDEYKVPSKKFKVLGNTDRHSIKKNLIGALLFDSGETAEATRLKRTARRRYTRRKNRICYLQEIFSNEMAKVDDSFFHRLEESFLVEEDKKHERHPIFGNIVDEVAYHEKYPTIYHLRKKLVDSTDKADLRLIYLALAHMIKFRGHFLIEGDLNPDNSDVDKLFIQLVQTYNQLFEENPINASGVDAKAILSARLSKSRRLENLIAQLPGEKKNGLFGNLIALSLGLTPNFKSNFDLAEDAKLQLSKDTYDDDLDNLLAQIGDQYADLFLAAKNLSDAILLSDILRVNTEITKAPLSASMIKRYDEHHQDLTLLKALVRQQLPEKYKEIFFDQSKNGYAGYIDGGASQEEFYKFIKPILEKMDGTEELLVKLNREDLLRKQRTFDNGSIPHQIHLGELHAILRRQEDFYPFLKDNREKIEKILTFRIPYYVGPLARGNSRFAWMTRKSEETITPWNFEEVVDKGASAQSFIERMTNFDKNLPNEKVLPKHSLLYEYFTVYNELTKVKYVTEGMRKPAFLSGEQKKAIVDLLFKTNRKVTVKQLKEDYFKKIECFDSVEISGVEDRFNASLGTYHDLLKIIKDKDFLDNEENEDILEDIVLTLTLFEDREMIEERLKTYAHLFDDKVMKQLKRRRYTGWGRLSRKLINGIRDKQSGKTILDFLKSDGFANRNFMQLIHDDSLTFKEDIQKAQVSGQGDSLHEHIANLAGSPAIKKGILQTVKVVDELVKVMGRHKPENIVIEMARENQTTQKGQKNSRERMKRIEEGIKELGSQILKEHPVENTQLQNEKLYLYYLQNGRDMYVDQELDINRLSDYDVDHIVPQSFLKDDSIDNKVLTRSDKARGKSDNVPSEEVVKKMKNYWRQLLNAKLITQRKFDNLTKAERGGLSELDKAGFIKRQLVETRQITKHVAQILDSRMNTKYDENDKLIREVKVITLKSKLVSDFRKDFQFYKVREINNYHHAHDAYLNAVVGTALIKKYPKLESEFVYGDYKVYDVRKMIAKSEQEIGKATAKYFFYSNIMNFFKTEITLANGEIRKRPLIETNGETGEIVWDKGRDFATVRKVLSMPQVNIVKKTEVQTGGFSKESILPKRNSDKLIARKKDWDPKKYGGFDSPTVAYSVLVVAKVEKGKSKKLKSVKELLGITIMERSSFEKNPIDFLEAKGYKEVKKDLIIKLPKYSLFELENGRKRMLASAGELQKGNELALPSKYVNFLYLASHYEKLKGSPEDNEQKQLFVEQHKHYLDEIIEQISEFSKRVILADANLDKVLSAYNKHRDKPIREQAENIIHLFTLTNLGAPAAFKYFDTTIDRKRYTSTKEVLDATLIHQSITGLYETRIDLSQLGGDGGGSSGGGGGSGGTLQLEEEYRLFEPESTQKQEMDIWLKNFPQAWAETGGMGTAHCQAPVLIQLKATATPISIRQYPMPHEAYQGIKPHIRRMLDQGILKPCQSPWNTPLLPVKKPGTEDYRPVQDLREVNKRVEDIHPTVPNPYNLLSTLPPSHPWYTVLDLKDAFFCLRLHSESQLLFAFEWRDPEIGLSGQLTWTRLPQGFKNSPTLFNEALHSDLADFRVRYPALVLLQYVDDLLLAAATRTECLEGTKALLETLGNKGYRASAKKAQICLQEVTYLGYSLKDGQRWLTKARKEAILSIPVPKNSRQVREFLGKAGYCRLFIPGFAELAAPLYPLTRPGTLFQWGTEQQLAFEDIKKALLSSPALGLPDITKPFELFIDENSGFAKGVLVQKLGPWKRPVAYLSKKLDTVASGWPPCLRMVAAIAILVKDAGKLTLGQPLTILTSHPVEALVRQPPNKWLSNARMTHYQAMLLDAERVHFGPTVSLNPATLLPLPSGGNHHDCLQILAETHGTRPDLTDQPLPDADLTWYTDGSSFIRNGEREAGAAVTTESEVIWAAPLPPGTSAQRAELIALTQALKMAEGKKLTVYTDSRYAFATTHVHGEIYRRRGWLTSEGKEIKNKNEILALLEALFLPKRLSIIHCPGHQKGDSPQAKGNRLADDTAKKAATETHSSLTVLPAGKRTADGSEFEKRTADGSEFESPKKKAKVE

SEQ ID NO: 1259 - protein, 2095 aa, synthetic construct
MPAAKRVKLDGGDKKYSIGLDIGTNSVGWAVITDEYKVPSKKFKVLGNTDRHSIKKNLIGALLFDSGETAEATRLKRTARRRYTRRKNRICYLQEIFSNEMAKVDDSFFHRLEESFLVEEDKKHERHPIFGNIVDEVAYHEKYPTIYHLRKKLVDSTDKADLRLIYLALAHMIKFRGHFLIEGDLNPDNSDVDKLFIQLVQTYNQLFEENPINASGVDAKAILSARLSKSRRLENLIAQLPGEKKNGLFGNLIALSLGLTPNFKSNFDLAEDAKLQLSKDTYDDDLDNLLAQIGDQYADLFLAAKNLSDAILLSDILRVNTEITKAPLSASMIKRYDEHHQDLTLLKALVRQQLPEKYKEIFFDQSKNGYAGYIDGGASQEEFYKFIKPILEKMDGTEELLVKLNREDLLRKQRTFDNGSIPHQIHLGELHAILRRQEDFYPFLKDNREKIEKILTFRIPYYVGPLARGNSRFAWMTRKSEETITPWNFEEVVDKGASAQSFIERMTNFDKNLPNEKVLPKHSLLYEYFTVYNELTKVKYVTEGMRKPAFLSGEQKKAIVDLLFKTNRKVTVKQLKEDYFKKIECFDSVEISGVEDRFNASLGTYHDLLKIIKDKDFLDNEENEDILEDIVLTLTLFEDREMIEERLKTYAHLFDDKVMKQLKRRRYTGWGRLSRKLINGIRDKQSGKTILDFLKSDGFANRNFMQLIHDDSLTFKEDIQKAQVSGQGDSLHEHIANLAGSPAIKKGILQTVKVVDELVKVMGRHKPENIVIEMARENQTTQKGQKNSRERMKRIEEGIKELGSQILKEHPVENTQLQNEKLYLYYLQNGRDMYVDQELDINRLSDYDVDHIVPQSFLKDDSIDNKVLTRSDKARGKSDNVPSEEVVKKMKNYWRQLLNAKLITQRKFDNLTKAERGGLSELDKAGFIKRQLVETRQITKHVAQILDSRMNTKYDENDKLIREVKVITLKSKLVSDFRKDFQFYKVREINNYHHAHDAYLNAVVGTALIKKYPKLESEFVYGDYKVYDVRKMIAKSEQEIGKATAKYFFYSNIMNFFKTEITLANGEIRKRPLIETNGETGEIVWDKGRDFATVRKVLSMPQVNIVKKTEVQTGGFSKESILPKRNSDKLIARKKDWDPKKYGGFDSPTVAYSVLVVAKVEKGKSKKLKSVKELLGITIMERSSFEKNPIDFLEAKGYKEVKKDLIIKLPKYSLFELENGRKRMLASAGELQKGNELALPSKYVNFLYLASHYEKLKGSPEDNEQKQLFVEQHKHYLDEIIEQISEFSKRVILADANLDKVLSAYNKHRDKPIREQAENIIHLFTLTNLGAPAAFKYFDTTIDRKRYTSTKEVLDATLIHQSITGLYETRIDLSQLGGDGGGGGEAAAKGGSGGTLQLEEEYRLFEPESTQKQEMDIWLKNFPQAWAETGGMGTAHCQAPVLIQLKATATPISIRQYPMPHEAYQGIKPHIRRMLDQGILKPCQSPWNTPLLPVKKPGTEDYRPVQDLREVNKRVEDIHPTVPNPYNLLSTLPPSHPWYTVLDLKDAFFCLRLHSESQLLFAFEWRDPEIGLSGQLTWTRLPQGFKNSPTLFNEALHSDLADFRVRYPALVLLQYVDDLLLAAATRTECLEGTKALLETLGNKGYRASAKKAQICLQEVTYLGYSLKDGQRWLTKARKEAILSIPVPKNSRQVREFLGKAGYCRLFIPGFAELAAPLYPLTRPGTLFQWGTEQQLAFEDIKKALLSSPALGLPDITKPFELFIDENSGFAKGVLVQKLGPWKRPVAYLSKKLDTVASGWPPCLRMVAAIAILVKDAGKLTLGQPLTILTSHPVEALVRQPPNKWLSNARMTHYQAMLLDAERVHFGPTVSLNPATLLPLPSGGNHHDCLQILAETHGTRPDLTDQPLPDADLTWYTDGSSFIRNGEREAGAAVTTESEVIWAAPLPPGTSAQRAELIALTQALKMAEGKKLTVYTDSRYAFATTHVHGEIYRRRGWLTSEGKEIKNKNEILALLEALFLPKRLSIIHCPGHQKGDSPQAKGNRLADDTAKKAATETHSSLTVLPAGKRTADGSEFEKRTADGSEFESPKKKAKVE

SEQ ID NO: 1260 - protein, 2089 aa, synthetic construct
MPAAKRVKLDGGDKKYSIGLDIGTNSVGWAVITDEYKVPSKKFKVLGNTDRHSIKKNLIGALLFDSGETAEATRLKRTARRRYTRRKNRICYLQEIFSNEMAKVDDSFFHRLEESFLVEEDKKHERHPIFGNIVDEVAYHEKYPTIYHLRKKLVDSTDKADLRLIYLALAHMIKFRGHFLIEGDLNPDNSDVDKLFIQLVQTYNQLFEENPINASGVDAKAILSARLSKSRRLENLIAQLPGEKKNGLFGNLIALSLGLTPNFKSNFDLAEDAKLQLSKDTYDDDLDNLLAQIGDQYADLFLAAKNLSDAILLSDILRVNTEITKAPLSASMIKRYDEHHQDLTLLKALVRQQLPEKYKEIFFDQSKNGYAGYIDGGASQEEFYKFIKPILEKMDGTEELLVKLNREDLLRKQRTFDNGSIPHQIHLGELHAILRRQEDFYPFLKDNREKIEKILTFRIPYYVGPLARGNSRFAWMTRKSEETITPWNFEEVVDKGASAQSFIERMTNFDKNLPNEKVLPKHSLLYEYFTVYNELTKVKYVTEGMRKPAFLSGEQKKAIVDLLFKTNRKVTVKQLKEDYFKKIECFDSVEISGVEDRFNASLGTYHDLLKIIKDKDFLDNEENEDILEDIVLTLTLFEDREMIEERLKTYAHLFDDKVMKQLKRRRYTGWGRLSRKLINGIRDKQSGKTILDFLKSDGFANRNFMQLIHDDSLTFKEDIQKAQVSGQGDSLHEHIANLAGSPAIKKGILQTVKVVDELVKVMGRHKPENIVIEMARENQTTQKGQKNSRERMKRIEEGIKELGSQILKEHPVENTQLQNEKLYLYYLQNGRDMYVDQELDINRLSDYDVDHIVPQSFLKDDSIDNKVLTRSDKARGKSDNVPSEEVVKKMKNYWRQLLNAKLITQRKFDNLTKAERGGLSELDKAGFIKRQLVETRQITKHVAQILDSRMNTKYDENDKLIREVKVITLKSKLVSDFRKDFQFYKVREINNYHHAHDAYLNAVVGTALIKKYPKLESEFVYGDYKVYDVRKMIAKSEQEIGKATAKYFFYSNIMNFFKTEITLANGEIRKRPLIETNGETGEIVWDKGRDFATVRKVLSMPQVNIVKKTEVQTGGFSKESILPKRNSDKLIARKKDWDPKKYGGFDSPTVAYSVLVVAKVEKGKSKKLKSVKELLGITIMERSSFEKNPIDFLEAKGYKEVKKDLIIKLPKYSLFELENGRKRMLASAGELQKGNELALPSKYVNFLYLASHYEKLKGSPEDNEQKQLFVEQHKHYLDEIIEQISEFSKRVILADANLDKVLSAYNKHRDKPIREQAENIIHLFTLTNLGAPAAFKYFDTTIDRKRYTSTKEVLDATLIHQSITGLYETRIDLSQLGGDGGEAAAKGGTLQLEEEYRLFEPESTQKQEMDIWLKNFPQAWAETGGMGTAHCQAPVLIQLKATATPISIRQYPMPHEAYQGIKPHIRRMLDQGILKPCQSPWNTPLLPVKKPGTEDYRPVQDLREVNKRVEDIHPTVPNPYNLLSTLPPSHPWYTVLDLKDAFFCLRLHSESQLLFAFEWRDPEIGLSGQLTWTRLPQGFKNSPTLFNEALHSDLADFRVRYPALVLLQYVDDLLLAAATRTECLEGTKALLETLGNKGYRASAKKAQICLQEVTYLGYSLKDGQRWLTKARKEAILSIPVPKNSRQVREFLGKAGYCRLFIPGFAELAAPLYPLTRPGTLFQWGTEQQLAFEDIKKALLSSPALGLPDITKPFELFIDENSGFAKGVLVQKLGPWKRPVAYLSKKLDTVASGWPPCLRMVAAIAILVKDAGKLTLGQPLTILTSHPVEALVRQPPNKWLSNARMTHYQAMLLDAERVHFGPTVSLNPATLLPLPSGGNHHDCLQILAETHGTRPDLTDQPLPDADLTWYTDGSSFIRNGEREAGAAVTTESEVIWAAPLPPGTSAQRAELIALTQALKMAEGKKLTVYTDSRYAFATTHVHGEIYRRRGWLTSEGKEIKNKNEILALLEALFLPKRLSIIHCPGHQKGDSPQAKGNRLADDTAKKAATETHSSLTVLPAGKRTADGSEFEKRTADGSEFESPKKKAKVE

SEQ ID NO: 1261 - protein, 2095 aa, synthetic construct
MPAAKRVKLDGGDKKYSIGLDIGTNSVGWAVITDEYKVPSKKFKVLGNTDRHSIKKNLIGALLFDSGETAEATRLKRTARRRYTRRKNRICYLQEIFSNEMAKVDDSFFHRLEESFLVEEDKKHERHPIFGNIVDEVAYHEKYPTIYHLRKKLVDSTDKADLRLIYLALAHMIKFRGHFLIEGDLNPDNSDVDKLFIQLVQTYNQLFEENPINASGVDAKAILSARLSKSRRLENLIAQLPGEKKNGLFGNLIALSLGLTPNFKSNFDLAEDAKLQLSKDTYDDDLDNLLAQIGDQYADLFLAAKNLSDAILLSDILRVNTEITKAPLSASMIKRYDEHHQDLTLLKALVRQQLPEKYKEIFFDQSKNGYAGYIDGGASQEEFYKFIKPILEKMDGTEELLVKLNREDLLRKQRTFDNGSIPHQIHLGELHAILRRQEDFYPFLKDNREKIEKILTFRIPYYVGPLARGNSRFAWMTRKSEETITPWNFEEVVDKGASAQSFIERMTNFDKNLPNEKVLPKHSLLYEYFTVYNELTKVKYVTEGMRKPAFLSGEQKKAIVDLLFKTNRKVTVKQLKEDYFKKIECFDSVEISGVEDRFNASLGTYHDLLKIIKDKDFLDNEENEDILEDIVLTLTLFEDREMIEERLKTYAHLFDDKVMKQLKRRRYTGWGRLSRKLINGIRDKQSGKTILDFLKSDGFANRNFMQLIHDDSLTFKEDIQKAQVSGQGDSLHEHIANLAGSPAIKKGILQTVKVVDELVKVMGRHKPENIVIEMARENQTTQKGQKNSRERMKRIEEGIKELGSQILKEHPVENTQLQNEKLYLYYLQNGRDMYVDQELDINRLSDYDVDHIVPQSFLKDDSIDNKVLTRSDKARGKSDNVPSEEVVKKMKNYWRQLLNAKLITQRKFDNLTKAERGGLSELDKAGFIKRQLVETRQITKHVAQILDSRMNTKYDENDKLIREVKVITLKSKLVSDFRKDFQFYKVREINNYHHAHDAYLNAVVGTALIKKYPKLESEFVYGDYKVYDVRKMIAKSEQEIGKATAKYFFYSNIMNFFKTEITLANGEIRKRPLIETNGETGEIVWDKGRDFATVRKVLSMPQVNIVKKTEVQTGGFSKESILPKRNSDKLIARKKDWDPKKYGGFDSPTVAYSVLVVAKVEKGKSKKLKSVKELLGITIMERSSFEKNPIDFLEAKGYKEVKKDLIIKLPKYSLFELENGRKRMLASAGELQKGNELALPSKYVNFLYLASHYEKLKGSPEDNEQKQLFVEQHKHYLDEIIEQISEFSKRVILADANLDKVLSAYNKHRDKPIREQAENIIHLFTLTNLGAPAAFKYFDTTIDRKRYTSTKEVLDATLIHQSITGLYETRIDLSQLGGDGGGGGGSSEAAAKGGTLQLEEEYRLFEPESTQKQEMDIWLKNFPQAWAETGGMGTAHCQAPVLIQLKATATPISIRQYPMPHEAYQGIKPHIRRMLDQGILKPCQSPWNTPLLPVKKPGTEDYRPVQDLREVNKRVEDIHPTVPNPYNLLSTLPPSHPWYTVLDLKDAFFCLRLHSESQLLFAFEWRDPEIGLSGQLTWTRLPQGFKNSPTLFNEALHSDLADFRVRYPALVLLQYVDDLLLAAATRTECLEGTKALLETLGNKGYRASAKKAQICLQEVTYLGYSLKDGQRWLTKARKEAILSIPVPKNSRQVREFLGKAGYCRLFIPGFAELAAPLYPLTRPGTLFQWGTEQQLAFEDIKKALLSSPALGLPDITKPFELFIDENSGFAKGVLVQKLGPWKRPVAYLSKKLDTVASGWPPCLRMVAAIAILVKDAGKLTLGQPLTILTSHPVEALVRQPPNKWLSNARMTHYQAMLLDAERVHFGPTVSLNPATLLPLPSGGNHHDCLQILAETHGTRPDLTDQPLPDADLTWYTDGSSFIRNGEREAGAAVTTESEVIWAAPLPPGTSAQRAELIALTQALKMAEGKKLTVYTDSRYAFATTHVHGEIYRRRGWLTSEGKEIKNKNEILALLEALFLPKRLSIIHCPGHQKGDSPQAKGNRLADDTAKKAATETHSSLTVLPAGKRTADGSEFEKRTADGSEFESPKKKAKVE

SEQ ID NO: 1262 - protein, 2095 aa, synthetic construct
MPAAKRVKLDGGDKKYSIGLDIGTNSVGWAVITDEYKVPSKKFKVLGNTDRHSIKKNLIGALLFDSGETAEATRLKRTARRRYTRRKNRICYLQEIFSNEMAKVDDSFFHRLEESFLVEEDKKHERHPIFGNIVDEVAYHEKYPTIYHLRKKLVDSTDKADLRLIYLALAHMIKFRGHFLIEGDLNPDNSDVDKLFIQLVQTYNQLFEENPINASGVDAKAILSARLSKSRRLENLIAQLPGEKKNGLFGNLIALSLGLTPNFKSNFDLAEDAKLQLSKDTYDDDLDNLLAQIGDQYADLFLAAKNLSDAILLSDILRVNTEITKAPLSASMIKRYDEHHQDLTLLKALVRQQLPEKYKEIFFDQSKNGYAGYIDGGASQEEFYKFIKPILEKMDGTEELLVKLNREDLLRKQRTFDNGSIPHQIHLGELHAILRRQEDFYPFLKDNREKIEKILTFRIPYYVGPLARGNSRFAWMTRKSEETITPWNFEEVVDKGASAQSFIERMTNFDKNLPNEKVLPKHSLLYEYFTVYNELTKVKYVTEGMRKPAFLSGEQKKAIVDLLFKTNRKVTVKQLKEDYFKKIECFDSVEISGVEDRFNASLGTYHDLLKIIKDKDFLDNEENEDILEDIVLTLTLFEDREMIEERLKTYAHLFDDKVMKQLKRRRYTGWGRLSRKLINGIRDKQSGKTILDFLKSDGFANRNFMQLIHDDSLTFKEDIQKAQVSGQGDSLHEHIANLAGSPAIKKGILQTVKVVDELVKVMGRHKPENIVIEMARENQTTQKGQKNSRERMKRIEEGIKELGSQILKEHPVENTQLQNEKLYLYYLQNGRDMYVDQELDINRLSDYDVDHIVPQSFLKDDSIDNKVLTRSDKARGKSDNVPSEEVVKKMKNYWRQLLNAKLITQRKFDNLTKAERGGLSELDKAGFIKRQLVETRQITKHVAQILDSRMNTKYDENDKLIREVKVITLKSKLVSDFRKDFQFYKVREINNYHHAHDAYLNAVVGTALIKKYPKLESEFVYGDYKVYDVRKMIAKSEQEIGKATAKYFFYSNIMNFFKTEITLANGEIRKRPLIETNGETGEIVWDKGRDFATVRKVLSMPQVNIVKKTEVQTGGFSKESILPKRNSDKLIARKKDWDPKKYGGFDSPTVAYSVLVVAKVEKGKSKKLKSVKELLGITIMERSSFEKNPIDFLEAKGYKEVKKDLIIKLPKYSLFELENGRKRMLASAGELQKGNELALPSKYVNFLYLASHYEKLKGSPEDNEQKQLFVEQHKHYLDEIIEQISEFSKRVILADANLDKVLSAYNKHRDKPIREQAENIIHLFTLTNLGAPAAFKYFDTTIDRKRYTSTKEVLDATLIHQSITGLYETRIDLSQLGGDGGGGGEAAAKPAPGGTLQLEEEYRLFEPESTQKQEMDIWLKNFPQAWAETGGMGTAHCQAPVLIQLKATATPISIRQYPMPHEAYQGIKPHIRRMLDQGILKPCQSPWNTPLLPVKKPGTEDYRPVQDLREVNKRVEDIHPTVPNPYNLLSTLPPSHPWYTVLDLKDAFFCLRLHSESQLLFAFEWRDPEIGLSGQLTWTRLPQGFKNSPTLFNEALHSDLADFRVRYPALVLLQYVDDLLLAAATRTECLEGTKALLETLGNKGYRASAKKAQICLQEVTYLGYSLKDGQRWLTKARKEAILSIPVPKNSRQVREFLGKAGYCRLFIPGFAELAAPLYPLTRPGTLFQWGTEQQLAFEDIKKALLSSPALGLPDITKPFELFIDENSGFAKGVLVQKLGPWKRPVAYLSKKLDTVASGWPPCLRMVAAIAILVKDAGKLTLGQPLTILTSHPVEALVRQPPNKWLSNARMTHYQAMLLDAERVHFGPTVSLNPATLLPLPSGGNHHDCLQILAETHGTRPDLTDQPLPDADLTWYTDGSSFIRNGEREAGAAVTTESEVIWAAPLPPGTSAQRAELIALTQALKMAEGKKLTVYTDSRYAFATTHVHGEIYRRRGWLTSEGKEIKNKNEILALLEALFLPKRLSIIHCPGHQKGDSPQAKGNRLADDTAKKAATETHSSLTVLPAGKRTADGSEFEKRTADGSEFESPKKKAKVE

SEQ ID NO: 1263 - protein, 2093 aa, synthetic construct
MPAAKRVKLDGGDKKYSIGLDIGTNSVGWAVITDEYKVPSKKFKVLGNTDRHSIKKNLIGALLFDSGETAEATRLKRTARRRYTRRKNRICYLQEIFSNEMAKVDDSFFHRLEESFLVEEDKKHERHPIFGNIVDEVAYHEKYPTIYHLRKKLVDSTDKADLRLIYLALAHMIKFRGHFLIEGDLNPDNSDVDKLFIQLVQTYNQLFEENPINASGVDAKAILSARLSKSRRLENLIAQLPGEKKNGLFGNLIALSLGLTPNFKSNFDLAEDAKLQLSKDTYDDDLDNLLAQIGDQYADLFLAAKNLSDAILLSDILRVNTEITKAPLSASMIKRYDEHHQDLTLLKALVRQQLPEKYKEIFFDQSKNGYAGYIDGGASQEEFYKFIKPILEKMDGTEELLVKLNREDLLRKQRTFDNGSIPHQIHLGELHAILRRQEDFYPFLKDNREKIEKILTFRIPYYVGPLARGNSRFAWMTRKSEETITPWNFEEVVDKGASAQSFIERMTNFDKNLPNEKVLPKHSLLYEYFTVYNELTKVKYVTEGMRKPAFLSGEQKKAIVDLLFKTNRKVTVKQLKEDYFKKIECFDSVEISGVEDRFNASLGTYHDLLKIIKDKDFLDNEENEDILEDIVLTLTLFEDREMIEERLKTYAHLFDDKVMKQLKRRRYTGWGRLSRKLINGIRDKQSGKTILDFLKSDGFANRNFMQLIHDDSLTFKEDIQKAQVSGQGDSLHEHIANLAGSPAIKKGILQTVKVVDELVKVMGRHKPENIVIEMARENQTTQKGQKNSRERMKRIEEGIKELGSQILKEHPVENTQLQNEKLYLYYLQNGRDMYVDQELDINRLSDYDVDHIVPQSFLKDDSIDNKVLTRSDKARGKSDNVPSEEVVKKMKNYWRQLLNAKLITQRKFDNLTKAERGGLSELDKAGFIKRQLVETRQITKHVAQILDSRMNTKYDENDKLIREVKVITLKSKLVSDFRKDFQFYKVREINNYHHAHDAYLNAVVGTALIKKYPKLESEFVYGDYKVYDVRKMIAKSEQEIGKATAKYFFYSNIMNFFKTEITLANGEIRKRPLIETNGETGEIVWDKGRDFATVRKVLSMPQVNIVKKTEVQTGGFSKESILPKRNSDKLIARKKDWDPKKYGGFDSPTVAYSVLVVAKVEKGKSKKLKSVKELLGITIMERSSFEKNPIDFLEAKGYKEVKKDLIIKLPKYSLFELENGRKRMLASAGELQKGNELALPSKYVNFLYLASHYEKLKGSPEDNEQKQLFVEQHKHYLDEIIEQISEFSKRVILADANLDKVLSAYNKHRDKPIREQAENIIHLFTLTNLGAPAAFKYFDTTIDRKRYTSTKEVLDATLIHQSITGLYETRIDLSQLGGDGGGGSPAPGSSGGTLQLEEEYRLFEPESTQKQEMDIWLKNFPQAWAETGGMGTAHCQAPVLIQLKATATPISIRQYPMPHEAYQGIKPHIRRMLDQGILKPCQSPWNTPLLPVKKPGTEDYRPVQDLREVNKRVEDIHPTVPNPYNLLSTLPPSHPWYTVLDLKDAFFCLRLHSESQLLFAFEWRDPEIGLSGQLTWTRLPQGFKNSPTLFNEALHSDLADFRVRYPALVLLQYVDDLLLAAATRTECLEGTKALLETLGNKGYRASAKKAQICLQEVTYLGYSLKDGQRWLTKARKEAILSIPVPKNSRQVREFLGKAGYCRLFIPGFAELAAPLYPLTRPGTLFQWGTEQQLAFEDIKKALLSSPALGLPDITKPFELFIDENSGFAKGVLVQKLGPWKRPVAYLSKKLDTVASGWPPCLRMVAAIAILVKDAGKLTLGQPLTILTSHPVEALVRQPPNKWLSNARMTHYQAMLLDAERVHFGPTVSLNPATLLPLPSGGNHHDCLQILAETHGTRPDLTDQPLPDADLTWYTDGSSFIRNGEREAGAAVTTESEVIWAAPLPPGTSAQRAELIALTQALKMAEGKKLTVYTDSRYAFATTHVHGEIYRRRGWLTSEGKEIKNKNEILALLEALFLPKRLSIIHCPGHQKGDSPQAKGNRLADDTAKKAATETHSSLTVLPAGKRTADGSEFEKRTADGSEFESPKKKAKVE

SEQ ID NO: 1264 - protein, 2095 aa, synthetic construct
MPAAKRVKLDGGDKKYSIGLDIGTNSVGWAVITDEYKVPSKKFKVLGNTDRHSIKKNLIGALLFDSGETAEATRLKRTARRRYTRRKNRICYLQEIFSNEMAKVDDSFFHRLEESFLVEEDKKHERHPIFGNIVDEVAYHEKYPTIYHLRKKLVDSTDKADLRLIYLALAHMIKFRGHFLIEGDLNPDNSDVDKLFIQLVQTYNQLFEENPINASGVDAKAILSARLSKSRRLENLIAQLPGEKKNGLFGNLIALSLGLTPNFKSNFDLAEDAKLQLSKDTYDDDLDNLLAQIGDQYADLFLAAKNLSDAILLSDILRVNTEITKAPLSASMIKRYDEHHQDLTLLKALVRQQLPEKYKEIFFDQSKNGYAGYIDGGASQEEFYKFIKPILEKMDGTEELLVKLNREDLLRKQRTFDNGSIPHQIHLGELHAILRRQEDFYPFLKDNREKIEKILTFRIPYYVGPLARGNSRFAWMTRKSEETITPWNFEEVVDKGASAQSFIERMTNFDKNLPNEKVLPKHSLLYEYFTVYNELTKVKYVTEGMRKPAFLSGEQKKAIVDLLFKTNRKVTVKQLKEDYFKKIECFDSVEISGVEDRFNASLGTYHDLLKIIKDKDFLDNEENEDILEDIVLTLTLFEDREMIEERLKTYAHLFDDKVMKQLKRRRYTGWGRLSRKLINGIRDKQSGKTILDFLKSDGFANRNFMQLIHDDSLTFKEDIQKAQVSGQGDSLHEHIANLAGSPAIKKGILQTVKVVDELVKVMGRHKPENIVIEMARENQTTQKGQKNSRERMKRIEEGIKELGSQILKEHPVENTQLQNEKLYLYYLQNGRDMYVDQELDINRLSDYDVDHIVPQSFLKDDSIDNKVLTRSDKARGKSDNVPSEEVVKKMKNYWRQLLNAKLITQRKFDNLTKAERGGLSELDKAGFIKRQLVETRQITKHVAQILDSRMNTKYDENDKLIREVKVITLKSKLVSDFRKDFQFYKVREINNYHHAHDAYLNAVVGTALIKKYPKLESEFVYGDYKVYDVRKMIAKSEQEIGKATAKYFFYSNIMNFFKTEITLANGEIRKRPLIETNGETGEIVWDKGRDFATVRKVLSMPQVNIVKKTEVQTGGFSKESILPKRNSDKLIARKKDWDPKKYGGFDSPTVAYSVLVVAKVEKGKSKKLKSVKELLGITIMERSSFEKNPIDFLEAKGYKEVKKDLIIKLPKYSLFELENGRKRMLASAGELQKGNELALPSKYVNFLYLASHYEKLKGSPEDNEQKQLFVEQHKHYLDEIIEQISEFSKRVILADANLDKVLSAYNKHRDKPIREQAENIIHLFTLTNLGAPAAFKYFDTTIDRKRYTSTKEVLDATLIHQSITGLYETRIDLSQLGGDGGPAPEAAAKGGSGGTLQLEEEYRLFEPESTQKQEMDIWLKNFPQAWAETGGMGTAHCQAPVLIQLKATATPISIRQYPMPHEAYQGIKPHIRRMLDQGILKPCQSPWNTPLLPVKKPGTEDYRPVQDLREVNKRVEDIHPTVPNPYNLLSTLPPSHPWYTVLDLKDAFFCLRLHSESQLLFAFEWRDPEIGLSGQLTWTRLPQGFKNSPTLFNEALHSDLADFRVRYPALVLLQYVDDLLLAAATRTECLEGTKALLETLGNKGYRASAKKAQICLQEVTYLGYSLKDGQRWLTKARKEAILSIPVPKNSRQVREFLGKAGYCRLFIPGFAELAAPLYPLTRPGTLFQWGTEQQLAFEDIKKALLSSPALGLPDITKPFELFIDENSGFAKGVLVQKLGPWKRPVAYLSKKLDTVASGWPPCLRMVAAIAILVKDAGKLTLGQPLTILTSHPVEALVRQPPNKWLSNARMTHYQAMLLDAERVHFGPTVSLNPATLLPLPSGGNHHDCLQILAETHGTRPDLTDQPLPDADLTWYTDGSSFIRNGEREAGAAVTTESEVIWAAPLPPGTSAQRAELIALTQALKMAEGKKLTVYTDSRYAFATTHVHGEIYRRRGWLTSEGKEIKNKNEILALLEALFLPKRLSIIHCPGHQKGDSPQAKGNRLADDTAKKAATETHSSLTVLPAGKRTADGSEFEKRTADGSEFESPKKKAKVE

SEQ ID NO: 1265 - protein, 2095 aa, synthetic construct
MPAAKRVKLDGGDKKYSIGLDIGTNSVGWAVITDEYKVPSKKFKVLGNTDRHSIKKNLIGALLFDSGETAEATRLKRTARRRYTRRKNRICYLQEIFSNEMAKVDDSFFHRLEESFLVEEDKKHERHPIFGNIVDEVAYHEKYPTIYHLRKKLVDSTDKADLRLIYLALAHMIKFRGHFLIEGDLNPDNSDVDKLFIQLVQTYNQLFEENPINASGVDAKAILSARLSKSRRLENLIAQLPGEKKNGLFGNLIALSLGLTPNFKSNFDLAEDAKLQLSKDTYDDDLDNLLAQIGDQYADLFLAAKNLSDAILLSDILRVNTEITKAPLSASMIKRYDEHHQDLTLLKALVRQQLPEKYKEIFFDQSKNGYAGYIDGGASQEEFYKFIKPILEKMDGTEELLVKLNREDLLRKQRTFDNGSIPHQIHLGELHAILRRQEDFYPFLKDNREKIEKILTFRIPYYVGPLARGNSRFAWMTRKSEETITPWNFEEVVDKGASAQSFIERMTNFDKNLPNEKVLPKHSLLYEYFTVYNELTKVKYVTEGMRKPAFLSGEQKKAIVDLLFKTNRKVTVKQLKEDYFKKIECFDSVEISGVEDRFNASLGTYHDLLKIIKDKDFLDNEENEDILEDIVLTLTLFEDREMIEERLKTYAHLFDDKVMKQLKRRRYTGWGRLSRKLINGIRDKQSGKTILDFLKSDGFANRNFMQLIHDDSLTFKEDIQKAQVSGQGDSLHEHIANLAGSPAIKKGILQTVKVVDELVKVMGRHKPENIVIEMARENQTTQKGQKNSRERMKRIEEGIKELGSQILKEHPVENTQLQNEKLYLYYLQNGRDMYVDQELDINRLSDYDVDHIVPQSFLKDDSIDNKVLTRSDKARGKSDNVPSEEVVKKMKNYWRQLLNAKLITQRKFDNLTKAERGGLSELDKAGFIKRQLVETRQITKHVAQILDSRMNTKYDENDKLIREVKVITLKSKLVSDFRKDFQFYKVREINNYHHAHDAYLNAVVGTALIKKYPKLESEFVYGDYKVYDVRKMIAKSEQEIGKATAKYFFYSNIMNFFKTEITLANGEIRKRPLIETNGETGEIVWDKGRDFATVRKVLSMPQVNIVKKTEVQTGGFSKESILPKRNSDKLIARKKDWDPKKYGGFDSPTVAYSVLVVAKVEKGKSKKLKSVKELLGITIMERSSFEKNPIDFLEAKGYKEVKKDLIIKLPKYSLFELENGRKRMLASAGELQKGNELALPSKYVNFLYLASHYEKLKGSPEDNEQKQLFVEQHKHYLDEIIEQISEFSKRVILADANLDKVLSAYNKHRDKPIREQAENIIHLFTLTNLGAPAAFKYFDTTIDRKRYTSTKEVLDATLIHQSITGLYETRIDLSQLGGDGGGSSEAAAKGGSGGTLQLEEEYRLFEPESTQKQEMDIWLKNFPQAWAETGGMGTAHCQAPVLIQLKATATPISIRQYPMPHEAYQGIKPHIRRMLDQGILKPCQSPWNTPLLPVKKPGTEDYRPVQDLREVNKRVEDIHPTVPNPYNLLSTLPPSHPWYTVLDLKDAFFCLRLHSESQLLFAFEWRDPEIGLSGQLTWTRLPQGFKNSPTLFNEALHSDLADFRVRYPALVLLQYVDDLLLAAATRTECLEGTKALLETLGNKGYRASAKKAQICLQEVTYLGYSLKDGQRWLTKARKEAILSIPVPKNSRQVREFLGKAGYCRLFIPGFAELAAPLYPLTRPGTLFQWGTEQQLAFEDIKKALLSSPALGLPDITKPFELFIDENSGFAKGVLVQKLGPWKRPVAYLSKKLDTVASGWPPCLRMVAAIAILVKDAGKLTLGQPLTILTSHPVEALVRQPPNKWLSNARMTHYQAMLLDAERVHFGPTVSLNPATLLPLPSGGNHHDCLQILAETHGTRPDLTDQPLPDADLTWYTDGSSFIRNGEREAGAAVTTESEVIWAAPLPPGTSAQRAELIALTQALKMAEGKKLTVYTDSRYAFATTHVHGEIYRRRGWLTSEGKEIKNKNEILALLEALFLPKRLSIIHCPGHQKGDSPQAKGNRLADDTAKKAATETHSSLTVLPAGKRTADGSEFEKRTADGSEFESPKKKAKVE

SEQ ID NO: 1266 - protein, 2095 aa, synthetic construct
MPAAKRVKLDGGDKKYSIGLDIGTNSVGWAVITDEYKVPSKKFKVLGNTDRHSIKKNLIGALLFDSGETAEATRLKRTARRRYTRRKNRICYLQEIFSNEMAKVDDSFFHRLEESFLVEEDKKHERHPIFGNIVDEVAYHEKYPTIYHLRKKLVDSTDKADLRLIYLALAHMIKFRGHFLIEGDLNPDNSDVDKLFIQLVQTYNQLFEENPINASGVDAKAILSARLSKSRRLENLIAQLPGEKKNGLFGNLIALSLGLTPNFKSNFDLAEDAKLQLSKDTYDDDLDNLLAQIGDQYADLFLAAKNLSDAILLSDILRVNTEITKAPLSASMIKRYDEHHQDLTLLKALVRQQLPEKYKEIFFDQSKNGYAGYIDGGASQEEFYKFIKPILEKMDGTEELLVKLNREDLLRKQRTFDNGSIPHQIHLGELHAILRRQEDFYPFLKDNREKIEKILTFRIPYYVGPLARGNSRFAWMTRKSEETITPWNFEEVVDKGASAQSFIERMTNFDKNLPNEKVLPKHSLLYEYFTVYNELTKVKYVTEGMRKPAFLSGEQKKAIVDLLFKTNRKVTVKQLKEDYFKKIECFDSVEISGVEDRFNASLGTYHDLLKIIKDKDFLDNEENEDILEDIVLTLTLFEDREMIEERLKTYAHLFDDKVMKQLKRRRYTGWGRLSRKLINGIRDKQSGKTILDFLKSDGFANRNFMQLIHDDSLTFKEDIQKAQVSGQGDSLHEHIANLAGSPAIKKGILQTVKVVDELVKVMGRHKPENIVIEMARENQTTQKGQKNSRERMKRIEEGIKELGSQILKEHPVENTQLQNEKLYLYYLQNGRDMYVDQELDINRLSDYDVDHIVPQSFLKDDSIDNKVLTRSDKARGKSDNVPSEEVVKKMKNYWRQLLNAKLITQRKFDNLTKAERGGLSELDKAGFIKRQLVETRQITKHVAQILDSRMNTKYDENDKLIREVKVITLKSKLVSDFRKDFQFYKVREINNYHHAHDAYLNAVVGTALIKKYPKLESEFVYGDYKVYDVRKMIAKSEQEIGKATAKYFFYSNIMNFFKTEITLANGEIRKRPLIETNGETGEIVWDKGRDFATVRKVLSMPQVNIVKKTEVQTGGFSKESILPKRNSDKLIARKKDWDPKKYGGFDSPTVAYSVLVVAKVEKGKSKKLKSVKELLGITIMERSSFEKNPIDFLEAKGYKEVKKDLIIKLPKYSLFELENGRKRMLASAGELQKGNELALPSKYVNFLYLASHYEKLKGSPEDNEQKQLFVEQHKHYLDEIIEQISEFSKRVILADANLDKVLSAYNKHRDKPIREQAENIIHLFTLTNLGAPAAFKYFDTTIDRKRYTSTKEVLDATLIHQSITGLYETRIDLSQLGGDGGGGSPAPEAAAKGGTLQLEEEYRLFEPESTQKQEMDIWLKNFPQAWAETGGMGTAHCQAPVLIQLKATATPISIRQYPMPHEAYQGIKPHIRRMLDQGILKPCQSPWNTPLLPVKKPGTEDYRPVQDLREVNKRVEDIHPTVPNPYNLLSTLPPSHPWYTVLDLKDAFFCLRLHSESQLLFAFEWRDPEIGLSGQLTWTRLPQGFKNSPTLFNEALHSDLADFRVRYPALVLLQYVDDLLLAAATRTECLEGTKALLETLGNKGYRASAKKAQICLQEVTYLGYSLKDGQRWLTKARKEAILSIPVPKNSRQVREFLGKAGYCRLFIPGFAELAAPLYPLTRPGTLFQWGTEQQLAFEDIKKALLSSPALGLPDITKPFELFIDENSGFAKGVLVQKLGPWKRPVAYLSKKLDTVASGWPPCLRMVAAIAILVKDAGKLTLGQPLTILTSHPVEALVRQPPNKWLSNARMTHYQAMLLDAERVHFGPTVSLNPATLLPLPSGGNHHDCLQILAETHGTRPDLTDQPLPDADLTWYTDGSSFIRNGEREAGAAVTTESEVIWAAPLPPGTSAQRAELIALTQALKMAEGKKLTVYTDSRYAFATTHVHGEIYRRRGWLTSEGKEIKNKNEILALLEALFLPKRLSIIHCPGHQKGDSPQAKGNRLADDTAKKAATETHSSLTVLPAGKRTADGSEFEKRTADGSEFESPKKKAKVE

SEQ ID NO: 1267 - protein, 2092 aa, synthetic construct
MPAAKRVKLDGGDKKYSIGLDIGTNSVGWAVITDEYKVPSKKFKVLGNTDRHSIKKNLIGALLFDSGETAEATRLKRTARRRYTRRKNRICYLQEIFSNEMAKVDDSFFHRLEESFLVEEDKKHERHPIFGNIVDEVAYHEKYPTIYHLRKKLVDSTDKADLRLIYLALAHMIKFRGHFLIEGDLNPDNSDVDKLFIQLVQTYNQLFEENPINASGVDAKAILSARLSKSRRLENLIAQLPGEKKNGLFGNLIALSLGLTPNFKSNFDLAEDAKLQLSKDTYDDDLDNLLAQIGDQYADLFLAAKNLSDAILLSDILRVNTEITKAPLSASMIKRYDEHHQDLTLLKALVRQQLPEKYKEIFFDQSKNGYAGYIDGGASQEEFYKFIKPILEKMDGTEELLVKLNREDLLRKQRTFDNGSIPHQIHLGELHAILRRQEDFYPFLKDNREKIEKILTFRIPYYVGPLARGNSRFAWMTRKSEETITPWNFEEVVDKGASAQSFIERMTNFDKNLPNEKVLPKHSLLYEYFTVYNELTKVKYVTEGMRKPAFLSGEQKKAIVDLLFKTNRKVTVKQLKEDYFKKIECFDSVEISGVEDRFNASLGTYHDLLKIIKDKDFLDNEENEDILEDIVLTLTLFEDREMIEERLKTYAHLFDDKVMKQLKRRRYTGWGRLSRKLINGIRDKQSGKTILDFLKSDGFANRNFMQLIHDDSLTFKEDIQKAQVSGQGDSLHEHIANLAGSPAIKKGILQTVKVVDELVKVMGRHKPENIVIEMARENQTTQKGQKNSRERMKRIEEGIKELGSQILKEHPVENTQLQNEKLYLYYLQNGRDMYVDQELDINRLSDYDVDHIVPQSFLKDDSIDNKVLTRSDKARGKSDNVPSEEVVKKMKNYWRQLLNAKLITQRKFDNLTKAERGGLSELDKAGFIKRQLVETRQITKHVAQILDSRMNTKYDENDKLIREVKVITLKSKLVSDFRKDFQFYKVREINNYHHAHDAYLNAVVGTALIKKYPKLESEFVYGDYKVYDVRKMIAKSEQEIGKATAKYFFYSNIMNFFKTEITLANGEIRKRPLIETNGETGEIVWDKGRDFATVRKVLSMPQVNIVKKTEVQTGGFSKESILPKRNSDKLIARKKDWDPKKYGGFDSPTVAYSVLVVAKVEKGKSKKLKSVKELLGITIMERSSFEKNPIDFLEAKGYKEVKKDLIIKLPKYSLFELENGRKRMLASAGELQKGNELALPSKYVNFLYLASHYEKLKGSPEDNEQKQLFVEQHKHYLDEIIEQISEFSKRVILADANLDKVLSAYNKHRDKPIREQAENIIHLFTLTNLGAPAAFKYFDTTIDRKRYTSTKEVLDATLIHQSITGLYETRIDLSQLGGDGGEAAAKPAPGGTLQLEEEYRLFEPESTQKQEMDIWLKNFPQAWAETGGMGTAHCQAPVLIQLKATATPISIRQYPMPHEAYQGIKPHIRRMLDQGILKPCQSPWNTPLLPVKKPGTEDYRPVQDLREVNKRVEDIHPTVPNPYNLLSTLPPSHPWYTVLDLKDAFFCLRLHSESQLLFAFEWRDPEIGLSGQLTWTRLPQGFKNSPTLFNEALHSDLADFRVRYPALVLLQYVDDLLLAAATRTECLEGTKALLETLGNKGYRASAKKAQICLQEVTYLGYSLKDGQRWLTKARKEAILSIPVPKNSRQVREFLGKAGYCRLFIPGFAELAAPLYPLTRPGTLFQWGTEQQLAFEDIKKALLSSPALGLPDITKPFELFIDENSGFAKGVLVQKLGPWKRPVAYLSKKLDTVASGWPPCLRMVAAIAILVKDAGKLTLGQPLTILTSHPVEALVRQPPNKWLSNARMTHYQAMLLDAERVHFGPTVSLNPATLLPLPSGGNHHDCLQILAETHGTRPDLTDQPLPDADLTWYTDGSSFIRNGEREAGAAVTTESEVIWAAPLPPGTSAQRAELIALTQALKMAEGKKLTVYTDSRYAFATTHVHGEIYRRRGWLTSEGKEIKNKNEILALLEALFLPKRLSIIHCPGHQKGDSPQAKGNRLADDTAKKAATETHSSLTVLPAGKRTADGSEFEKRTADGSEFESPKKKAKVE

SEQ ID NO: 1268 - protein, 2093 aa, synthetic construct
MPAAKRVKLDGGDKKYSIGLDIGTNSVGWAVITDEYKVPSKKFKVLGNTDRHSIKKNLIGALLFDSGETAEATRLKRTARRRYTRRKNRICYLQEIFSNEMAKVDDSFFHRLEESFLVEEDKKHERHPIFGNIVDEVAYHEKYPTIYHLRKKLVDSTDKADLRLIYLALAHMIKFRGHFLIEGDLNPDNSDVDKLFIQLVQTYNQLFEENPINASGVDAKAILSARLSKSRRLENLIAQLPGEKKNGLFGNLIALSLGLTPNFKSNFDLAEDAKLQLSKDTYDDDLDNLLAQIGDQYADLFLAAKNLSDAILLSDILRVNTEITKAPLSASMIKRYDEHHQDLTLLKALVRQQLPEKYKEIFFDQSKNGYAGYIDGGASQEEFYKFIKPILEKMDGTEELLVKLNREDLLRKQRTFDNGSIPHQIHLGELHAILRRQEDFYPFLKDNREKIEKILTFRIPYYVGPLARGNSRFAWMTRKSEETITPWNFEEVVDKGASAQSFIERMTNFDKNLPNEKVLPKHSLLYEYFTVYNELTKVKYVTEGMRKPAFLSGEQKKAIVDLLFKTNRKVTVKQLKEDYFKKIECFDSVEISGVEDRFNASLGTYHDLLKIIKDKDFLDNEENEDILEDIVLTLTLFEDREMIEERLKTYAHLFDDKVMKQLKRRRYTGWGRLSRKLINGIRDKQSGKTILDFLKSDGFANRNFMQLIHDDSLTFKEDIQKAQVSGQGDSLHEHIANLAGSPAIKKGILQTVKVVDELVKVMGRHKPENIVIEMARENQTTQKGQKNSRERMKRIEEGIKELGSQILKEHPVENTQLQNEKLYLYYLQNGRDMYVDQELDINRLSDYDVDHIVPQSFLKDDSIDNKVLTRSDKARGKSDNVPSEEVVKKMKNYWRQLLNAKLITQRKFDNLTKAERGGLSELDKAGFIKRQLVETRQITKHVAQILDSRMNTKYDENDKLIREVKVITLKSKLVSDFRKDFQFYKVREINNYHHAHDAYLNAVVGTALIKKYPKLESEFVYGDYKVYDVRKMIAKSEQEIGKATAKYFFYSNIMNFFKTEITLANGEIRKRPLIETNGETGEIVWDKGRDFATVRKVLSMPQVNIVKKTEVQTGGFSKESILPKRNSDKLIARKKDWDPKKYGGFDSPTVAYSVLVVAKVEKGKSKKLKSVKELLGITIMERSSFEKNPIDFLEAKGYKEVKKDLIIKLPKYSLFELENGRKRMLASAGELQKGNELALPSKYVNFLYLASHYEKLKGSPEDNEQKQLFVEQHKHYLDEIIEQISEFSKRVILADANLDKVLSAYNKHRDKPIREQAENIIHLFTLTNLGAPAAFKYFDTTIDRKRYTSTKEVLDATLIHQSITGLYETRIDLSQLGGDGGGGGPAPGGSGGTLQLEEEYRLFEPESTQKQEMDIWLKNFPQAWAETGGMGTAHCQAPVLIQLKATATPISIRQYPMPHEAYQGIKPHIRRMLDQGILKPCQSPWNTPLLPVKKPGTEDYRPVQDLREVNKRVEDIHPTVPNPYNLLSTLPPSHPWYTVLDLKDAFFCLRLHSESQLLFAFEWRDPEIGLSGQLTWTRLPQGFKNSPTLFNEALHSDLADFRVRYPALVLLQYVDDLLLAAATRTECLEGTKALLETLGNKGYRASAKKAQICLQEVTYLGYSLKDGQRWLTKARKEAILSIPVPKNSRQVREFLGKAGYCRLFIPGFAELAAPLYPLTRPGTLFQWGTEQQLAFEDIKKALLSSPALGLPDITKPFELFIDENSGFAKGVLVQKLGPWKRPVAYLSKKLDTVASGWPPCLRMVAAIAILVKDAGKLTLGQPLTILTSHPVEALVRQPPNKWLSNARMTHYQAMLLDAERVHFGPTVSLNPATLLPLPSGGNHHDCLQILAETHGTRPDLTDQPLPDADLTWYTDGSSFIRNGEREAGAAVTTESEVIWAAPLPPGTSAQRAELIALTQALKMAEGKKLTVYTDSRYAFATTHVHGEIYRRRGWLTSEGKEIKNKNEILALLEALFLPKRLSIIHCPGHQKGDSPQAKGNRLADDTAKKAATETHSSLTVLPAGKRTADGSEFEKRTADGSEFESPKKKAKVE

SEQ ID NO: 1269 - protein, 2095 aa, synthetic construct
MPAAKRVKLDGGDKKYSIGLDIGTNSVGWAVITDEYKVPSKKFKVLGNTDRHSIKKNLIGALLFDSGETAEATRLKRTARRRYTRRKNRICYLQEIFSNEMAKVDDSFFHRLEESFLVEEDKKHERHPIFGNIVDEVAYHEKYPTIYHLRKKLVDSTDKADLRLIYLALAHMIKFRGHFLIEGDLNPDNSDVDKLFIQLVQTYNQLFEENPINASGVDAKAILSARLSKSRRLENLIAQLPGEKKNGLFGNLIALSLGLTPNFKSNFDLAEDAKLQLSKDTYDDDLDNLLAQIGDQYADLFLAAKNLSDAILLSDILRVNTEITKAPLSASMIKRYDEHHQDLTLLKALVRQQLPEKYKEIFFDQSKNGYAGYIDGGASQEEFYKFIKPILEKMDGTEELLVKLNREDLLRKQRTFDNGSIPHQIHLGELHAILRRQEDFYPFLKDNREKIEKILTFRIPYYVGPLARGNSRFAWMTRKSEETITPWNFEEVVDKGASAQSFIERMTNFDKNLPNEKVLPKHSLLYEYFTVYNELTKVKYVTEGMRKPAFLSGEQKKAIVDLLFKTNRKVTVKQLKEDYFKKIECFDSVEISGVEDRFNASLGTYHDLLKIIKDKDFLDNEENEDILEDIVLTLTLFEDREMIEERLKTYAHLFDDKVMKQLKRRRYTGWGRLSRKLINGIRDKQSGKTILDFLKSDGFANRNFMQLIHDDSLTFKEDIQKAQVSGQGDSLHEHIANLAGSPAIKKGILQTVKVVDELVKVMGRHKPENIVIEMARENQTTQKGQKNSRERMKRIEEGIKELGSQILKEHPVENTQLQNEKLYLYYLQNGRDMYVDQELDINRLSDYDVDHIVPQSFLKDDSIDNKVLTRSDKARGKSDNVPSEEVVKKMKNYWRQLLNAKLITQRKFDNLTKAERGGLSELDKAGFIKRQLVETRQITKHVAQILDSRMNTKYDENDKLIREVKVITLKSKLVSDFRKDFQFYKVREINNYHHAHDAYLNAVVGTALIKKYPKLESEFVYGDYKVYDVRKMIAKSEQEIGKATAKYFFYSNIMNFFKTEITLANGEIRKRPLIETNGETGEIVWDKGRDFATVRKVLSMPQVNIVKKTEVQTGGFSKESILPKRNSDKLIARKKDWDPKKYGGFDSPTVAYSVLVVAKVEKGKSKKLKSVKELLGITIMERSSFEKNPIDFLEAKGYKEVKKDLIIKLPKYSLFELENGRKRMLASAGELQKGNELALPSKYVNFLYLASHYEKLKGSPEDNEQKQLFVEQHKHYLDEIIEQISEFSKRVILADANLDKVLSAYNKHRDKPIREQAENIIHLFTLTNLGAPAAFKYFDTTIDRKRYTSTKEVLDATLIHQSITGLYETRIDLSQLGGDGGGGSGGGEAAAKGGTLQLEEEYRLFEPESTQKQEMDIWLKNFPQAWAETGGMGTAHCQAPVLIQLKATATPISIRQYPMPHEAYQGIKPHIRRMLDQGILKPCQSPWNTPLLPVKKPGTEDYRPVQDLREVNKRVEDIHPTVPNPYNLLSTLPPSHPWYTVLDLKDAFFCLRLHSESQLLFAFEWRDPEIGLSGQLTWTRLPQGFKNSPTLFNEALHSDLADFRVRYPALVLLQYVDDLLLAAATRTECLEGTKALLETLGNKGYRASAKKAQICLQEVTYLGYSLKDGQRWLTKARKEAILSIPVPKNSRQVREFLGKAGYCRLFIPGFAELAAPLYPLTRPGTLFQWGTEQQLAFEDIKKALLSSPALGLPDITKPFELFIDENSGFAKGVLVQKLGPWKRPVAYLSKKLDTVASGWPPCLRMVAAIAILVKDAGKLTLGQPLTILTSHPVEALVRQPPNKWLSNARMTHYQAMLLDAERVHFGPTVSLNPATLLPLPSGGNHHDCLQILAETHGTRPDLTDQPLPDADLTWYTDGSSFIRNGEREAGAAVTTESEVIWAAPLPPGTSAQRAELIALTQALKMAEGKKLTVYTDSRYAFATTHVHGEIYRRRGWLTSEGKEIKNKNEILALLEALFLPKRLSIIHCPGHQKGDSPQAKGNRLADDTAKKAATETHSSLTVLPAGKRTADGSEFEKRTADGSEFESPKKKAKVE

SEQ ID NO: 1270 - protein, 2093 aa, synthetic construct
MPAAKRVKLDGGDKKYSIGLDIGTNSVGWAVITDEYKVPSKKFKVLGNTDRHSIKKNLIGALLFDSGETAEATRLKRTARRRYTRRKNRICYLQEIFSNEMAKVDDSFFHRLEESFLVEEDKKHERHPIFGNIVDEVAYHEKYPTIYHLRKKLVDSTDKADLRLIYLALAHMIKFRGHFLIEGDLNPDNSDVDKLFIQLVQTYNQLFEENPINASGVDAKAILSARLSKSRRLENLIAQLPGEKKNGLFGNLIALSLGLTPNFKSNFDLAEDAKLQLSKDTYDDDLDNLLAQIGDQYADLFLAAKNLSDAILLSDILRVNTEITKAPLSASMIKRYDEHHQDLTLLKALVRQQLPEKYKEIFFDQSKNGYAGYIDGGASQEEFYKFIKPILEKMDGTEELLVKLNREDLLRKQRTFDNGSIPHQIHLGELHAILRRQEDFYPFLKDNREKIEKILTFRIPYYVGPLARGNSRFAWMTRKSEETITPWNFEEVVDKGASAQSFIERMTNFDKNLPNEKVLPKHSLLYEYFTVYNELTKVKYVTEGMRKPAFLSGEQKKAIVDLLFKTNRKVTVKQLKEDYFKKIECFDSVEISGVEDRFNASLGTYHDLLKIIKDKDFLDNEENEDILEDIVLTLTLFEDREMIEERLKTYAHLFDDKVMKQLKRRRYTGWGRLSRKLINGIRDKQSGKTILDFLKSDGFANRNFMQLIHDDSLTFKEDIQKAQVSGQGDSLHEHIANLAGSPAIKKGILQTVKVVDELVKVMGRHKPENIVIEMARENQTTQKGQKNSRERMKRIEEGIKELGSQILKEHPVENTQLQNEKLYLYYLQNGRDMYVDQELDINRLSDYDVDHIVPQSFLKDDSIDNKVLTRSDKARGKSDNVPSEEVVKKMKNYWRQLLNAKLITQRKFDNLTKAERGGLSELDKAGFIKRQLVETRQITKHVAQILDSRMNTKYDENDKLIREVKVITLKSKLVSDFRKDFQFYKVREINNYHHAHDAYLNAVVGTALIKKYPKLESEFVYGDYKVYDVRKMIAKSEQEIGKATAKYFFYSNIMNFFKTEITLANGEIRKRPLIETNGETGEIVWDKGRDFATVRKVLSMPQVNIVKKTEVQTGGFSKESILPKRNSDKLIARKKDWDPKKYGGFDSPTVAYSVLVVAKVEKGKSKKLKSVKELLGITIMERSSFEKNPIDFLEAKGYKEVKKDLIIKLPKYSLFELENGRKRMLASAGELQKGNELALPSKYVNFLYLASHYEKLKGSPEDNEQKQLFVEQHKHYLDEIIEQISEFSKRVILADANLDKVLSAYNKHRDKPIREQAENIIHLFTLTNLGAPAAFKYFDTTIDRKRYTSTKEVLDATLIHQSITGLYETRIDLSQLGGDGGGGSGSSGGGGGTLQLEEEYRLFEPESTQKQEMDIWLKNFPQAWAETGGMGTAHCQAPVLIQLKATATPISIRQYPMPHEAYQGIKPHIRRMLDQGILKPCQSPWNTPLLPVKKPGTEDYRPVQDLREVNKRVEDIHPTVPNPYNLLSTLPPSHPWYTVLDLKDAFFCLRLHSESQLLFAFEWRDPEIGLSGQLTWTRLPQGFKNSPTLFNEALHSDLADFRVRYPALVLLQYVDDLLLAAATRTECLEGTKALLETLGNKGYRASAKKAQICLQEVTYLGYSLKDGQRWLTKARKEAILSIPVPKNSRQVREFLGKAGYCRLFIPGFAELAAPLYPLTRPGTLFQWGTEQQLAFEDIKKALLSSPALGLPDITKPFELFIDENSGFAKGVLVQKLGPWKRPVAYLSKKLDTVASGWPPCLRMVAAIAILVKDAGKLTLGQPLTILTSHPVEALVRQPPNKWLSNARMTHYQAMLLDAERVHFGPTVSLNPATLLPLPSGGNHHDCLQILAETHGTRPDLTDQPLPDADLTWYTDGSSFIRNGEREAGAAVTTESEVIWAAPLPPGTSAQRAELIALTQALKMAEGKKLTVYTDSRYAFATTHVHGEIYRRRGWLTSEGKEIKNKNEILALLEALFLPKRLSIIHCPGHQKGDSPQAKGNRLADDTAKKAATETHSSLTVLPAGKRTADGSEFEKRTADGSEFESPKKKAKVE

SEQ ID NO: 1271 - protein, 2092 aa, synthetic construct
MPAAKRVKLDGGDKKYSIGLDIGTNSVGWAVITDEYKVPSKKFKVLGNTDRHSIKKNLIGALLFDSGETAEATRLKRTARRRYTRRKNRICYLQEIFSNEMAKVDDSFFHRLEESFLVEEDKKHERHPIFGNIVDEVAYHEKYPTIYHLRKKLVDSTDKADLRLIYLALAHMIKFRGHFLIEGDLNPDNSDVDKLFIQLVQTYNQLFEENPINASGVDAKAILSARLSKSRRLENLIAQLPGEKKNGLFGNLIALSLGLTPNFKSNFDLAEDAKLQLSKDTYDDDLDNLLAQIGDQYADLFLAAKNLSDAILLSDILRVNTEITKAPLSASMIKRYDEHHQDLTLLKALVRQQLPEKYKEIFFDQSKNGYAGYIDGGASQEEFYKFIKPILEKMDGTEELLVKLNREDLLRKQRTFDNGSIPHQIHLGELHAILRRQEDFYPFLKDNREKIEKILTFRIPYYVGPLARGNSRFAWMTRKSEETITPWNFEEVVDKGASAQSFIERMTNFDKNLPNEKVLPKHSLLYEYFTVYNELTKVKYVTEGMRKPAFLSGEQKKAIVDLLFKTNRKVTVKQLKEDYFKKIECFDSVEISGVEDRFNASLGTYHDLLKIIKDKDFLDNEENEDILEDIVLTLTLFEDREMIEERLKTYAHLFDDKVMKQLKRRRYTGWGRLSRKLINGIRDKQSGKTILDFLKSDGFANRNFMQLIHDDSLTFKEDIQKAQVSGQGDSLHEHIANLAGSPAIKKGILQTVKVVDELVKVMGRHKPENIVIEMARENQTTQKGQKNSRERMKRIEEGIKELGSQILKEHPVENTQLQNEKLYLYYLQNGRDMYVDQELDINRLSDYDVDHIVPQSFLKDDSIDNKVLTRSDKARGKSDNVPSEEVVKKMKNYWRQLLNAKLITQRKFDNLTKAERGGLSELDKAGFIKRQLVETRQITKHVAQILDSRMNTKYDENDKLIREVKVITLKSKLVSDFRKDFQFYKVREINNYHHAHDAYLNAVVGTALIKKYPKLESEFVYGDYKVYDVRKMIAKSEQEIGKATAKYFFYSNIMNFFKTEITLANGEIRKRPLIETNGETGEIVWDKGRDFATVRKVLSMPQVNIVKKTEVQTGGFSKESILPKRNSDKLIARKKDWDPKKYGGFDSPTVAYSVLVVAKVEKGKSKKLKSVKELLGITIMERSSFEKNPIDFLEAKGYKEVKKDLIIKLPKYSLFELENGRKRMLASAGELQKGNELALPSKYVNFLYLASHYEKLKGSPEDNEQKQLFVEQHKHYLDEIIEQISEFSKRVILADANLDKVLSAYNKHRDKPIREQAENIIHLFTLTNLGAPAAFKYFDTTIDRKRYTSTKEVLDATLIHQSITGLYETRIDLSQLGGDGGEAAAKGGGGGTLQLEEEYRLFEPESTQKQEMDIWLKNFPQAWAETGGMGTAHCQAPVLIQLKATATPISIRQYPMPHEAYQGIKPHIRRMLDQGILKPCQSPWNTPLLPVKKPGTEDYRPVQDLREVNKRVEDIHPTVPNPYNLLSTLPPSHPWYTVLDLKDAFFCLRLHSESQLLFAFEWRDPEIGLSGQLTWTRLPQGFKNSPTLFNEALHSDLADFRVRYPALVLLQYVDDLLLAAATRTECLEGTKALLETLGNKGYRASAKKAQICLQEVTYLGYSLKDGQRWLTKARKEAILSIPVPKNSRQVREFLGKAGYCRLFIPGFAELAAPLYPLTRPGTLFQWGTEQQLAFEDIKKALLSSPALGLPDITKPFELFIDENSGFAKGVLVQKLGPWKRPVAYLSKKLDTVASGWPPCLRMVAAIAILVKDAGKLTLGQPLTILTSHPVEALVRQPPNKWLSNARMTHYQAMLLDAERVHFGPTVSLNPATLLPLPSGGNHHDCLQILAETHGTRPDLTDQPLPDADLTWYTDGSSFIRNGEREAGAAVTTESEVIWAAPLPPGTSAQRAELIALTQALKMAEGKKLTVYTDSRYAFATTHVHGEIYRRRGWLTSEGKEIKNKNEILALLEALFLPKRLSIIHCPGHQKGDSPQAKGNRLADDTAKKAATETHSSLTVLPAGKRTADGSEFEKRTADGSEFESPKKKAKVE

SEQ ID NO: 1272 - protein, 2090 aa, synthetic construct
MPAAKRVKLDGGDKKYSIGLDIGTNSVGWAVITDEYKVPSKKFKVLGNTDRHSIKKNLIGALLFDSGETAEATRLKRTARRRYTRRKNRICYLQEIFSNEMAKVDDSFFHRLEESFLVEEDKKHERHPIFGNIVDEVAYHEKYPTIYHLRKKLVDSTDKADLRLIYLALAHMIKFRGHFLIEGDLNPDNSDVDKLFIQLVQTYNQLFEENPINASGVDAKAILSARLSKSRRLENLIAQLPGEKKNGLFGNLIALSLGLTPNFKSNFDLAEDAKLQLSKDTYDDDLDNLLAQIGDQYADLFLAAKNLSDAILLSDILRVNTEITKAPLSASMIKRYDEHHQDLTLLKALVRQQLPEKYKEIFFDQSKNGYAGYIDGGASQEEFYKFIKPILEKMDGTEELLVKLNREDLLRKQRTFDNGSIPHQIHLGELHAILRRQEDFYPFLKDNREKIEKILTFRIPYYVGPLARGNSRFAWMTRKSEETITPWNFEEVVDKGASAQSFIERMTNFDKNLPNEKVLPKHSLLYEYFTVYNELTKVKYVTEGMRKPAFLSGEQKKAIVDLLFKTNRKVTVKQLKEDYFKKIECFDSVEISGVEDRFNASLGTYHDLLKIIKDKDFLDNEENEDILEDIVLTLTLFEDREMIEERLKTYAHLFDDKVMKQLKRRRYTGWGRLSRKLINGIRDKQSGKTILDFLKSDGFANRNFMQLIHDDSLTFKEDIQKAQVSGQGDSLHEHIANLAGSPAIKKGILQTVKVVDELVKVMGRHKPENIVIEMARENQTTQKGQKNSRERMKRIEEGIKELGSQILKEHPVENTQLQNEKLYLYYLQNGRDMYVDQELDINRLSDYDVDHIVPQSFLKDDSIDNKVLTRSDKARGKSDNVPSEEVVKKMKNYWRQLLNAKLITQRKFDNLTKAERGGLSELDKAGFIKRQLVETRQITKHVAQILDSRMNTKYDENDKLIREVKVITLKSKLVSDFRKDFQFYKVREINNYHHAHDAYLNAVVGTALIKKYPKLESEFVYGDYKVYDVRKMIAKSEQEIGKATAKYFFYSNIMNFFKTEITLANGEIRKRPLIETNGETGEIVWDKGRDFATVRKVLSMPQVNIVKKTEVQTGGFSKESILPKRNSDKLIARKKDWDPKKYGGFDSPTVAYSVLVVAKVEKGKSKKLKSVKELLGITIMERSSFEKNPIDFLEAKGYKEVKKDLIIKLPKYSLFELENGRKRMLASAGELQKGNELALPSKYVNFLYLASHYEKLKGSPEDNEQKQLFVEQHKHYLDEIIEQISEFSKRVILADANLDKVLSAYNKHRDKPIREQAENIIHLFTLTNLGAPAAFKYFDTTIDRKRYTSTKEVLDATLIHQSITGLYETRIDLSQLGGDGGGGGGSSGGTLQLEEEYRLFEPESTQKQEMDIWLKNFPQAWAETGGMGTAHCQAPVLIQLKATATPISIRQYPMPHEAYQGIKPHIRRMLDQGILKPCQSPWNTPLLPVKKPGTEDYRPVQDLREVNKRVEDIHPTVPNPYNLLSTLPPSHPWYTVLDLKDAFFCLRLHSESQLLFAFEWRDPEIGLSGQLTWTRLPQGFKNSPTLFNEALHSDLADFRVRYPALVLLQYVDDLLLAAATRTECLEGTKALLETLGNKGYRASAKKAQICLQEVTYLGYSLKDGQRWLTKARKEAILSIPVPKNSRQVREFLGKAGYCRLFIPGFAELAAPLYPLTRPGTLFQWGTEQQLAFEDIKKALLSSPALGLPDITKPFELFIDENSGFAKGVLVQKLGPWKRPVAYLSKKLDTVASGWPPCLRMVAAIAILVKDAGKLTLGQPLTILTSHPVEALVRQPPNKWLSNARMTHYQAMLLDAERVHFGPTVSLNPATLLPLPSGGNHHDCLQILAETHGTRPDLTDQPLPDADLTWYTDGSSFIRNGEREAGAAVTTESEVIWAAPLPPGTSAQRAELIALTQALKMAEGKKLTVYTDSRYAFATTHVHGEIYRRRGWLTSEGKEIKNKNEILALLEALFLPKRLSIIHCPGHQKGDSPQAKGNRLADDTAKKAATETHSSLTVLPAGKRTADGSEFEKRTADGSEFESPKKKAKVE

SEQ ID NO: 1273 - protein, 2089 aa, synthetic construct
MPAAKRVKLDGGDKKYSIGLDIGTNSVGWAVITDEYKVPSKKFKVLGNTDRHSIKKNLIGALLFDSGETAEATRLKRTARRRYTRRKNRICYLQEIFSNEMAKVDDSFFHRLEESFLVEEDKKHERHPIFGNIVDEVAYHEKYPTIYHLRKKLVDSTDKADLRLIYLALAHMIKFRGHFLIEGDLNPDNSDVDKLFIQLVQTYNQLFEENPINASGVDAKAILSARLSKSRRLENLIAQLPGEKKNGLFGNLIALSLGLTPNFKSNFDLAEDAKLQLSKDTYDDDLDNLLAQIGDQYADLFLAAKNLSDAILLSDILRVNTEITKAPLSASMIKRYDEHHQDLTLLKALVRQQLPEKYKEIFFDQSKNGYAGYIDGGASQEEFYKFIKPILEKMDGTEELLVKLNREDLLRKQRTFDNGSIPHQIHLGELHAILRRQEDFYPFLKDNREKIEKILTFRIPYYVGPLARGNSRFAWMTRKSEETITPWNFEEVVDKGASAQSFIERMTNFDKNLPNEKVLPKHSLLYEYFTVYNELTKVKYVTEGMRKPAFLSGEQKKAIVDLLFKTNRKVTVKQLKEDYFKKIECFDSVEISGVEDRFNASLGTYHDLLKIIKDKDFLDNEENEDILEDIVLTLTLFEDREMIEERLKTYAHLFDDKVMKQLKRRRYTGWGRLSRKLINGIRDKQSGKTILDFLKSDGFANRNFMQLIHDDSLTFKEDIQKAQVSGQGDSLHEHIANLAGSPAIKKGILQTVKVVDELVKVMGRHKPENIVIEMARENQTTQKGQKNSRERMKRIEEGIKELGSQILKEHPVENTQLQNEKLYLYYLQNGRDMYVDQELDINRLSDYDVDHIVPQSFLKDDSIDNKVLTRSDKARGKSDNVPSEEVVKKMKNYWRQLLNAKLITQRKFDNLTKAERGGLSELDKAGFIKRQLVETRQITKHVAQILDSRMNTKYDENDKLIREVKVITLKSKLVSDFRKDFQFYKVREINNYHHAHDAYLNAVVGTALIKKYPKLESEFVYGDYKVYDVRKMIAKSEQEIGKATAKYFFYSNIMNFFKTEITLANGEIRKRPLIETNGETGEIVWDKGRDFATVRKVLSMPQVNIVKKTEVQTGGFSKESILPKRNSDKLIARKKDWDPKKYGGFDSPTVAYSVLVVAKVEKGKSKKLKSVKELLGITIMERSSFEKNPIDFLEAKGYKEVKKDLIIKLPKYSLFELENGRKRMLASAGELQKGNELALPSKYVNFLYLASHYEKLKGSPEDNEQKQLFVEQHKHYLDEIIEQISEFSKRVILADANLDKVLSAYNKHRDKPIREQAENIIHLFTLTNLGAPAAFKYFDTTIDRKRYTSTKEVLDATLIHQSITGLYETRIDLSQLGGDGGGGGGSGGTLQLEEEYRLFEPESTQKQEMDIWLKNFPQAWAETGGMGTAHCQAPVLIQLKATATPISIRQYPMPHEAYQGIKPHIRRMLDQGILKPCQSPWNTPLLPVKKPGTEDYRPVQDLREVNKRVEDIHPTVPNPYNLLSTLPPSHPWYTVLDLKDAFFCLRLHSESQLLFAFEWRDPEIGLSGQLTWTRLPQGFKNSPTLFNEALHSDLADFRVRYPALVLLQYVDDLLLAAATRTECLEGTKALLETLGNKGYRASAKKAQICLQEVTYLGYSLKDGQRWLTKARKEAILSIPVPKNSRQVREFLGKAGYCRLFIPGFAELAAPLYPLTRPGTLFQWGTEQQLAFEDIKKALLSSPALGLPDITKPFELFIDENSGFAKGVLVQKLGPWKRPVAYLSKKLDTVASGWPPCLRMVAAIAILVKDAGKLTLGQPLTILTSHPVEALVRQPPNKWLSNARMTHYQAMLLDAERVHFGPTVSLNPATLLPLPSGGNHHDCLQILAETHGTRPDLTDQPLPDADLTWYTDGSSFIRNGEREAGAAVTTESEVIWAAPLPPGTSAQRAELIALTQALKMAEGKKLTVYTDSRYAFATTHVHGEIYRRRGWLTSEGKEIKNKNEILALLEALFLPKRLSIIHCPGHQKGDSPQAKGNRLADDTAKKAATETHSSLTVLPAGKRTADGSEFEKRTADGSEFESPKKKAKVE

SEQ ID NO: 1274 - protein, 2099 aa, synthetic construct
MPAAKRVKLDGGDKKYSIGLDIGTNSVGWAVITDEYKVPSKKFKVLGNTDRHSIKKNLIGALLFDSGETAEATRLKRTARRRYTRRKNRICYLQEIFSNEMAKVDDSFFHRLEESFLVEEDKKHERHPIFGNIVDEVAYHEKYPTIYHLRKKLVDSTDKADLRLIYLALAHMIKFRGHFLIEGDLNPDNSDVDKLFIQLVQTYNQLFEENPINASGVDAKAILSARLSKSRRLENLIAQLPGEKKNGLFGNLIALSLGLTPNFKSNFDLAEDAKLQLSKDTYDDDLDNLLAQIGDQYADLFLAAKNLSDAILLSDILRVNTEITKAPLSASMIKRYDEHHQDLTLLKALVRQQLPEKYKEIFFDQSKNGYAGYIDGGASQEEFYKFIKPILEKMDGTEELLVKLNREDLLRKQRTFDNGSIPHQIHLGELHAILRRQEDFYPFLKDNREKIEKILTFRIPYYVGPLARGNSRFAWMTRKSEETITPWNFEEVVDKGASAQSFIERMTNFDKNLPNEKVLPKHSLLYEYFTVYNELTKVKYVTEGMRKPAFLSGEQKKAIVDLLFKTNRKVTVKQLKEDYFKKIECFDSVEISGVEDRFNASLGTYHDLLKIIKDKDFLDNEENEDILEDIVLTLTLFEDREMIEERLKTYAHLFDDKVMKQLKRRRYTGWGRLSRKLINGIRDKQSGKTILDFLKSDGFANRNFMQLIHDDSLTFKEDIQKAQVSGQGDSLHEHIANLAGSPAIKKGILQTVKVVDELVKVMGRHKPENIVIEMARENQTTQKGQKNSRERMKRIEEGIKELGSQILKEHPVENTQLQNEKLYLYYLQNGRDMYVDQELDINRLSDYDVDHIVPQSFLKDDSIDNKVLTRSDKARGKSDNVPSEEVVKKMKNYWRQLLNAKLITQRKFDNLTKAERGGLSELDKAGFIKRQLVETRQITKHVAQILDSRMNTKYDENDKLIREVKVITLKSKLVSDFRKDFQFYKVREINNYHHAHDAYLNAVVGTALIKKYPKLESEFVYGDYKVYDVRKMIAKSEQEIGKATAKYFFYSNIMNFFKTEITLANGEIRKRPLIETNGETGEIVWDKGRDFATVRKVLSMPQVNIVKKTEVQTGGFSKESILPKRNSDKLIARKKDWDPKKYGGFDSPTVAYSVLVVAKVEKGKSKKLKSVKELLGITIMERSSFEKNPIDFLEAKGYKEVKKDLIIKLPKYSLFELENGRKRMLASAGELQKGNELALPSKYVNFLYLASHYEKLKGSPEDNEQKQLFVEQHKHYLDEIIEQISEFSKRVILADANLDKVLSAYNKHRDKPIREQAENIIHLFTLTNLGAPAAFKYFDTTIDRKRYTSTKEVLDATLIHQSITGLYETRIDLSQLGGDGGGSSGSSGSSGSSGSSGGTLQLEEEYRLFEPESTQKQEMDIWLKNFPQAWAETGGMGTAHCQAPVLIQLKATATPISIRQYPMPHEAYQGIKPHIRRMLDQGILKPCQSPWNTPLLPVKKPGTEDYRPVQDLREVNKRVEDIHPTVPNPYNLLSTLPPSHPWYTVLDLKDAFFCLRLHSESQLLFAFEWRDPEIGLSGQLTWTRLPQGFKNSPTLFNEALHSDLADFRVRYPALVLLQYVDDLLLAAATRTECLEGTKALLETLGNKGYRASAKKAQICLQEVTYLGYSLKDGQRWLTKARKEAILSIPVPKNSRQVREFLGKAGYCRLFIPGFAELAAPLYPLTRPGTLFQWGTEQQLAFEDIKKALLSSPALGLPDITKPFELFIDENSGFAKGVLVQKLGPWKRPVAYLSKKLDTVASGWPPCLRMVAAIAILVKDAGKLTLGQPLTILTSHPVEALVRQPPNKWLSNARMTHYQAMLLDAERVHFGPTVSLNPATLLPLPSGGNHHDCLQILAETHGTRPDLTDQPLPDADLTWYTDGSSFIRNGEREAGAAVTTESEVIWAAPLPPGTSAQRAELIALTQALKMAEGKKLTVYTDSRYAFATTHVHGEIYRRRGWLTSEGKEIKNKNEILALLEALFLPKRLSIIHCPGHQKGDSPQAKGNRLADDTAKKAATETHSSLTVLPAGKRTADGSEFEKRTADGSEFESPKKKAKVE

SEQ ID NO: 1275 - protein, 2093 aa, synthetic construct
MPAAKRVKLDGGDKKYSIGLDIGTNSVGWAVITDEYKVPSKKFKVLGNTDRHSIKKNLIGALLFDSGETAEATRLKRTARRRYTRRKNRICYLQEIFSNEMAKVDDSFFHRLEESFLVEEDKKHERHPIFGNIVDEVAYHEKYPTIYHLRKKLVDSTDKADLRLIYLALAHMIKFRGHFLIEGDLNPDNSDVDKLFIQLVQTYNQLFEENPINASGVDAKAILSARLSKSRRLENLIAQLPGEKKNGLFGNLIALSLGLTPNFKSNFDLAEDAKLQLSKDTYDDDLDNLLAQIGDQYADLFLAAKNLSDAILLSDILRVNTEITKAPLSASMIKRYDEHHQDLTLLKALVRQQLPEKYKEIFFDQSKNGYAGYIDGGASQEEFYKFIKPILEKMDGTEELLVKLNREDLLRKQRTFDNGSIPHQIHLGELHAILRRQEDFYPFLKDNREKIEKILTFRIPYYVGPLARGNSRFAWMTRKSEETITPWNFEEVVDKGASAQSFIERMTNFDKNLPNEKVLPKHSLLYEYFTVYNELTKVKYVTEGMRKPAFLSGEQKKAIVDLLFKTNRKVTVKQLKEDYFKKIECFDSVEISGVEDRFNASLGTYHDLLKIIKDKDFLDNEENEDILEDIVLTLTLFEDREMIEERLKTYAHLFDDKVMKQLKRRRYTGWGRLSRKLINGIRDKQSGKTILDFLKSDGFANRNFMQLIHDDSLTFKEDIQKAQVSGQGDSLHEHIANLAGSPAIKKGILQTVKVVDELVKVMGRHKPENIVIEMARENQTTQKGQKNSRERMKRIEEGIKELGSQILKEHPVENTQLQNEKLYLYYLQNGRDMYVDQELDINRLSDYDVDHIVPQSFLKDDSIDNKVLTRSDKARGKSDNVPSEEVVKKMKNYWRQLLNAKLITQRKFDNLTKAERGGLSELDKAGFIKRQLVETRQITKHVAQILDSRMNTKYDENDKLIREVKVITLKSKLVSDFRKDFQFYKVREINNYHHAHDAYLNAVVGTALIKKYPKLESEFVYGDYKVYDVRKMIAKSEQEIGKATAKYFFYSNIMNFFKTEITLANGEIRKRPLIETNGETGEIVWDKGRDFATVRKVLSMPQVNIVKKTEVQTGGFSKESILPKRNSDKLIARKKDWDPKKYGGFDSPTVAYSVLVVAKVEKGKSKKLKSVKELLGITIMERSSFEKNPIDFLEAKGYKEVKKDLIIKLPKYSLFELENGRKRMLASAGELQKGNELALPSKYVNFLYLASHYEKLKGSPEDNEQKQLFVEQHKHYLDEIIEQISEFSKRVILADANLDKVLSAYNKHRDKPIREQAENIIHLFTLTNLGAPAAFKYFDTTIDRKRYTSTKEVLDATLIHQSITGLYETRIDLSQLGGDGGGGSGGGGSSGGTLQLEEEYRLFEPESTQKQEMDIWLKNFPQAWAETGGMGTAHCQAPVLIQLKATATPISIRQYPMPHEAYQGIKPHIRRMLDQGILKPCQSPWNTPLLPVKKPGTEDYRPVQDLREVNKRVEDIHPTVPNPYNLLSTLPPSHPWYTVLDLKDAFFCLRLHSESQLLFAFEWRDPEIGLSGQLTWTRLPQGFKNSPTLFNEALHSDLADFRVRYPALVLLQYVDDLLLAAATRTECLEGTKALLETLGNKGYRASAKKAQICLQEVTYLGYSLKDGQRWLTKARKEAILSIPVPKNSRQVREFLGKAGYCRLFIPGFAELAAPLYPLTRPGTLFQWGTEQQLAFEDIKKALLSSPALGLPDITKPFELFIDENSGFAKGVLVQKLGPWKRPVAYLSKKLDTVASGWPPCLRMVAAIAILVKDAGKLTLGQPLTILTSHPVEALVRQPPNKWLSNARMTHYQAMLLDAERVHFGPTVSLNPATLLPLPSGGNHHDCLQILAETHGTRPDLTDQPLPDADLTWYTDGSSFIRNGEREAGAAVTTESEVIWAAPLPPGTSAQRAELIALTQALKMAEGKKLTVYTDSRYAFATTHVHGEIYRRRGWLTSEGKEIKNKNEILALLEALFLPKRLSIIHCPGHQKGDSPQAKGNRLADDTAKKAATETHSSLTVLPAGKRTADGSEFEKRTADGSEFESPKKKAKVE

SEQ ID NO: 1276 - protein, 2093 aa, synthetic construct
MPAAKRVKLDGGDKKYSIGLDIGTNSVGWAVITDEYKVPSKKFKVLGNTDRHSIKKNLIGALLFDSGETAEATRLKRTARRRYTRRKNRICYLQEIFSNEMAKVDDSFFHRLEESFLVEEDKKHERHPIFGNIVDEVAYHEKYPTIYHLRKKLVDSTDKADLRLIYLALAHMIKFRGHFLIEGDLNPDNSDVDKLFIQLVQTYNQLFEENPINASGVDAKAILSARLSKSRRLENLIAQLPGEKKNGLFGNLIALSLGLTPNFKSNFDLAEDAKLQLSKDTYDDDLDNLLAQIGDQYADLFLAAKNLSDAILLSDILRVNTEITKAPLSASMIKRYDEHHQDLTLLKALVRQQLPEKYKEIFFDQSKNGYAGYIDGGASQEEFYKFIKPILEKMDGTEELLVKLNREDLLRKQRTFDNGSIPHQIHLGELHAILRRQEDFYPFLKDNREKIEKILTFRIPYYVGPLARGNSRFAWMTRKSEETITPWNFEEVVDKGASAQSFIERMTNFDKNLPNEKVLPKHSLLYEYFTVYNELTKVKYVTEGMRKPAFLSGEQKKAIVDLLFKTNRKVTVKQLKEDYFKKIECFDSVEISGVEDRFNASLGTYHDLLKIIKDKDFLDNEENEDILEDIVLTLTLFEDREMIEERLKTYAHLFDDKVMKQLKRRRYTGWGRLSRKLINGIRDKQSGKTILDFLKSDGFANRNFMQLIHDDSLTFKEDIQKAQVSGQGDSLHEHIANLAGSPAIKKGILQTVKVVDELVKVMGRHKPENIVIEMARENQTTQKGQKNSRERMKRIEEGIKELGSQILKEHPVENTQLQNEKLYLYYLQNGRDMYVDQELDINRLSDYDVDHIVPQSFLKDDSIDNKVLTRSDKARGKSDNVPSEEVVKKMKNYWRQLLNAKLITQRKFDNLTKAERGGLSELDKAGFIKRQLVETRQITKHVAQILDSRMNTKYDENDKLIREVKVITLKSKLVSDFRKDFQFYKVREINNYHHAHDAYLNAVVGTALIKKYPKLESEFVYGDYKVYDVRKMIAKSEQEIGKATAKYFFYSNIMNFFKTEITLANGEIRKRPLIETNGETGEIVWDKGRDFATVRKVLSMPQVNIVKKTEVQTGGFSKESILPKRNSDKLIARKKDWDPKKYGGFDSPTVAYSVLVVAKVEKGKSKKLKSVKELLGITIMERSSFEKNPIDFLEAKGYKEVKKDLIIKLPKYSLFELENGRKRMLASAGELQKGNELALPSKYVNFLYLASHYEKLKGSPEDNEQKQLFVEQHKHYLDEIIEQISEFSKRVILADANLDKVLSAYNKHRDKPIREQAENIIHLFTLTNLGAPAAFKYFDTTIDRKRYTSTKEVLDATLIHQSITGLYETRIDLSQLGGDGGPAPGSSGGSGGTLQLEEEYRLFEPESTQKQEMDIWLKNFPQAWAETGGMGTAHCQAPVLIQLKATATPISIRQYPMPHEAYQGIKPHIRRMLDQGILKPCQSPWNTPLLPVKKPGTEDYRPVQDLREVNKRVEDIHPTVPNPYNLLSTLPPSHPWYTVLDLKDAFFCLRLHSESQLLFAFEWRDPEIGLSGQLTWTRLPQGFKNSPTLFNEALHSDLADFRVRYPALVLLQYVDDLLLAAATRTECLEGTKALLETLGNKGYRASAKKAQICLQEVTYLGYSLKDGQRWLTKARKEAILSIPVPKNSRQVREFLGKAGYCRLFIPGFAELAAPLYPLTRPGTLFQWGTEQQLAFEDIKKALLSSPALGLPDITKPFELFIDENSGFAKGVLVQKLGPWKRPVAYLSKKLDTVASGWPPCLRMVAAIAILVKDAGKLTLGQPLTILTSHPVEALVRQPPNKWLSNARMTHYQAMLLDAERVHFGPTVSLNPATLLPLPSGGNHHDCLQILAETHGTRPDLTDQPLPDADLTWYTDGSSFIRNGEREAGAAVTTESEVIWAAPLPPGTSAQRAELIALTQALKMAEGKKLTVYTDSRYAFATTHVHGEIYRRRGWLTSEGKEIKNKNEILALLEALFLPKRLSIIHCPGHQKGDSPQAKGNRLADDTAKKAATETHSSLTVLPAGKRTADGSEFEKRTADGSEFESPKKKAKVE

SEQ ID NO: 1277 - protein, 2093 aa, synthetic construct
MPAAKRVKLDGGDKKYSIGLDIGTNSVGWAVITDEYKVPSKKFKVLGNTDRHSIKKNLIGALLFDSGETAEATRLKRTARRRYTRRKNRICYLQEIFSNEMAKVDDSFFHRLEESFLVEEDKKHERHPIFGNIVDEVAYHEKYPTIYHLRKKLVDSTDKADLRLIYLALAHMIKFRGHFLIEGDLNPDNSDVDKLFIQLVQTYNQLFEENPINASGVDAKAILSARLSKSRRLENLIAQLPGEKKNGLFGNLIALSLGLTPNFKSNFDLAEDAKLQLSKDTYDDDLDNLLAQIGDQYADLFLAAKNLSDAILLSDILRVNTEITKAPLSASMIKRYDEHHQDLTLLKALVRQQLPEKYKEIFFDQSKNGYAGYIDGGASQEEFYKFIKPILEKMDGTEELLVKLNREDLLRKQRTFDNGSIPHQIHLGELHAILRRQEDFYPFLKDNREKIEKILTFRIPYYVGPLARGNSRFAWMTRKSEETITPWNFEEVVDKGASAQSFIERMTNFDKNLPNEKVLPKHSLLYEYFTVYNELTKVKYVTEGMRKPAFLSGEQKKAIVDLLFKTNRKVTVKQLKEDYFKKIECFDSVEISGVEDRFNASLGTYHDLLKIIKDKDFLDNEENEDILEDIVLTLTLFEDREMIEERLKTYAHLFDDKVMKQLKRRRYTGWGRLSRKLINGIRDKQSGKTILDFLKSDGFANRNFMQLIHDDSLTFKEDIQKAQVSGQGDSLHEHIANLAGSPAIKKGILQTVKVVDELVKVMGRHKPENIVIEMARENQTTQKGQKNSRERMKRIEEGIKELGSQILKEHPVENTQLQNEKLYLYYLQNGRDMYVDQELDINRLSDYDVDHIVPQSFLKDDSIDNKVLTRSDKARGKSDNVPSEEVVKKMKNYWRQLLNAKLITQRKFDNLTKAERGGLSELDKAGFIKRQLVETRQITKHVAQILDSRMNTKYDENDKLIREVKVITLKSKLVSDFRKDFQFYKVREINNYHHAHDAYLNAVVGTALIKKYPKLESEFVYGDYKVYDVRKMIAKSEQEIGKATAKYFFYSNIMNFFKTEITLANGEIRKRPLIETNGETGEIVWDKGRDFATVRKVLSMPQVNIVKKTEVQTGGFSKESILPKRNSDKLIARKKDWDPKKYGGFDSPTVAYSVLVVAKVEKGKSKKLKSVKELLGITIMERSSFEKNPIDFLEAKGYKEVKKDLIIKLPKYSLFELENGRKRMLASAGELQKGNELALPSKYVNFLYLASHYEKLKGSPEDNEQKQLFVEQHKHYLDEIIEQISEFSKRVILADANLDKVLSAYNKHRDKPIREQAENIIHLFTLTNLGAPAAFKYFDTTIDRKRYTSTKEVLDATLIHQSITGLYETRIDLSQLGGDGGPAPGGGGSSGGTLQLEEEYRLFEPESTQKQEMDIWLKNFPQAWAETGGMGTAHCQAPVLIQLKATATPISIRQYPMPHEAYQGIKPHIRRMLDQGILKPCQSPWNTPLLPVKKPGTEDYRPVQDLREVNKRVEDIHPTVPNPYNLLSTLPPSHPWYTVLDLKDAFFCLRLHSESQLLFAFEWRDPEIGLSGQLTWTRLPQGFKNSPTLFNEALHSDLADFRVRYPALVLLQYVDDLLLAAATRTECLEGTKALLETLGNKGYRASAKKAQICLQEVTYLGYSLKDGQRWLTKARKEAILSIPVPKNSRQVREFLGKAGYCRLFIPGFAELAAPLYPLTRPGTLFQWGTEQQLAFEDIKKALLSSPALGLPDITKPFELFIDENSGFAKGVLVQKLGPWKRPVAYLSKKLDTVASGWPPCLRMVAAIAILVKDAGKLTLGQPLTILTSHPVEALVRQPPNKWLSNARMTHYQAMLLDAERVHFGPTVSLNPATLLPLPSGGNHHDCLQILAETHGTRPDLTDQPLPDADLTWYTDGSSFIRNGEREAGAAVTTESEVIWAAPLPPGTSAQRAELIALTQALKMAEGKKLTVYTDSRYAFATTHVHGEIYRRRGWLTSEGKEIKNKNEILALLEALFLPKRLSIIHCPGHQKGDSPQAKGNRLADDTAKKAATETHSSLTVLPAGKRTADGSEFEKRTADGSEFESPKKKAKVE

SEQ ID NO: 1278 - protein, 2095 aa, synthetic construct
MPAAKRVKLDGGDKKYSIGLDIGTNSVGWAVITDEYKVPSKKFKVLGNTDRHSIKKNLIGALLFDSGETAEATRLKRTARRRYTRRKNRICYLQEIFSNEMAKVDDSFFHRLEESFLVEEDKKHERHPIFGNIVDEVAYHEKYPTIYHLRKKLVDSTDKADLRLIYLALAHMIKFRGHFLIEGDLNPDNSDVDKLFIQLVQTYNQLFEENPINASGVDAKAILSARLSKSRRLENLIAQLPGEKKNGLFGNLIALSLGLTPNFKSNFDLAEDAKLQLSKDTYDDDLDNLLAQIGDQYADLFLAAKNLSDAILLSDILRVNTEITKAPLSASMIKRYDEHHQDLTLLKALVRQQLPEKYKEIFFDQSKNGYAGYIDGGASQEEFYKFIKPILEKMDGTEELLVKLNREDLLRKQRTFDNGSIPHQIHLGELHAILRRQEDFYPFLKDNREKIEKILTFRIPYYVGPLARGNSRFAWMTRKSEETITPWNFEEVVDKGASAQSFIERMTNFDKNLPNEKVLPKHSLLYEYFTVYNELTKVKYVTEGMRKPAFLSGEQKKAIVDLLFKTNRKVTVKQLKEDYFKKIECFDSVEISGVEDRFNASLGTYHDLLKIIKDKDFLDNEENEDILEDIVLTLTLFEDREMIEERLKTYAHLFDDKVMKQLKRRRYTGWGRLSRKLINGIRDKQSGKTILDFLKSDGFANRNFMQLIHDDSLTFKEDIQKAQVSGQGDSLHEHIANLAGSPAIKKGILQTVKVVDELVKVMGRHKPENIVIEMARENQTTQKGQKNSRERMKRIEEGIKELGSQILKEHPVENTQLQNEKLYLYYLQNGRDMYVDQELDINRLSDYDVDHIVPQSFLKDDSIDNKVLTRSDKARGKSDNVPSEEVVKKMKNYWRQLLNAKLITQRKFDNLTKAERGGLSELDKAGFIKRQLVETRQITKHVAQILDSRMNTKYDENDKLIREVKVITLKSKLVSDFRKDFQFYKVREINNYHHAHDAYLNAVVGTALIKKYPKLESEFVYGDYKVYDVRKMIAKSEQEIGKATAKYFFYSNIMNFFKTEITLANGEIRKRPLIETNGETGEIVWDKGRDFATVRKVLSMPQVNIVKKTEVQTGGFSKESILPKRNSDKLIARKKDWDPKKYGGFDSPTVAYSVLVVAKVEKGKSKKLKSVKELLGITIMERSSFEKNPIDFLEAKGYKEVKKDLIIKLPKYSLFELENGRKRMLASAGELQKGNELALPSKYVNFLYLASHYEKLKGSPEDNEQKQLFVEQHKHYLDEIIEQISEFSKRVILADANLDKVLSAYNKHRDKPIREQAENIIHLFTLTNLGAPAAFKYFDTTIDRKRYTSTKEVLDATLIHQSITGLYETRIDLSQLGGDGGGGSEAAAKGSSGGTLQLEEEYRLFEPESTQKQEMDIWLKNFPQAWAETGGMGTAHCQAPVLIQLKATATPISIRQYPMPHEAYQGIKPHIRRMLDQGILKPCQSPWNTPLLPVKKPGTEDYRPVQDLREVNKRVEDIHPTVPNPYNLLSTLPPSHPWYTVLDLKDAFFCLRLHSESQLLFAFEWRDPEIGLSGQLTWTRLPQGFKNSPTLFNEALHSDLADFRVRYPALVLLQYVDDLLLAAATRTECLEGTKALLETLGNKGYRASAKKAQICLQEVTYLGYSLKDGQRWLTKARKEAILSIPVPKNSRQVREFLGKAGYCRLFIPGFAELAAPLYPLTRPGTLFQWGTEQQLAFEDIKKALLSSPALGLPDITKPFELFIDENSGFAKGVLVQKLGPWKRPVAYLSKKLDTVASGWPPCLRMVAAIAILVKDAGKLTLGQPLTILTSHPVEALVRQPPNKWLSNARMTHYQAMLLDAERVHFGPTVSLNPATLLPLPSGGNHHDCLQILAETHGTRPDLTDQPLPDADLTWYTDGSSFIRNGEREAGAAVTTESEVIWAAPLPPGTSAQRAELIALTQALKMAEGKKLTVYTDSRYAFATTHVHGEIYRRRGWLTSEGKEIKNKNEILALLEALFLPKRLSIIHCPGHQKGDSPQAKGNRLADDTAKKAATETHSSLTVLPAGKRTADGSEFEKRTADGSEFESPKKKAKVE

SEQ ID NO: 1279 - protein, 2095 aa, synthetic construct
MPAAKRVKLDGGDKKYSIGLDIGTNSVGWAVITDEYKVPSKKFKVLGNTDRHSIKKNLIGALLFDSGETAEATRLKRTARRRYTRRKNRICYLQEIFSNEMAKVDDSFFHRLEESFLVEEDKKHERHPIFGNIVDEVAYHEKYPTIYHLRKKLVDSTDKADLRLIYLALAHMIKFRGHFLIEGDLNPDNSDVDKLFIQLVQTYNQLFEENPINASGVDAKAILSARLSKSRRLENLIAQLPGEKKNGLFGNLIALSLGLTPNFKSNFDLAEDAKLQLSKDTYDDDLDNLLAQIGDQYADLFLAAKNLSDAILLSDILRVNTEITKAPLSASMIKRYDEHHQDLTLLKALVRQQLPEKYKEIFFDQSKNGYAGYIDGGASQEEFYKFIKPILEKMDGTEELLVKLNREDLLRKQRTFDNGSIPHQIHLGELHAILRRQEDFYPFLKDNREKIEKILTFRIPYYVGPLARGNSRFAWMTRKSEETITPWNFEEVVDKGASAQSFIERMTNFDKNLPNEKVLPKHSLLYEYFTVYNELTKVKYVTEGMRKPAFLSGEQKKAIVDLLFKTNRKVTVKQLKEDYFKKIECFDSVEISGVEDRFNASLGTYHDLLKIIKDKDFLDNEENEDILEDIVLTLTLFEDREMIEERLKTYAHLFDDKVMKQLKRRRYTGWGRLSRKLINGIRDKQSGKTILDFLKSDGFANRNFMQLIHDDSLTFKEDIQKAQVSGQGDSLHEHIANLAGSPAIKKGILQTVKVVDELVKVMGRHKPENIVIEMARENQTTQKGQKNSRERMKRIEEGIKELGSQILKEHPVENTQLQNEKLYLYYLQNGRDMYVDQELDINRLSDYDVDHIVPQSFLKDDSIDNKVLTRSDKARGKSDNVPSEEVVKKMKNYWRQLLNAKLITQRKFDNLTKAERGGLSELDKAGFIKRQLVETRQITKHVAQILDSRMNTKYDENDKLIREVKVITLKSKLVSDFRKDFQFYKVREINNYHHAHDAYLNAVVGTALIKKYPKLESEFVYGDYKVYDVRKMIAKSEQEIGKATAKYFFYSNIMNFFKTEITLANGEIRKRPLIETNGETGEIVWDKGRDFATVRKVLSMPQVNIVKKTEVQTGGFSKESILPKRNSDKLIARKKDWDPKKYGGFDSPTVAYSVLVVAKVEKGKSKKLKSVKELLGITIMERSSFEKNPIDFLEAKGYKEVKKDLIIKLPKYSLFELENGRKRMLASAGELQKGNELALPSKYVNFLYLASHYEKLKGSPEDNEQKQLFVEQHKHYLDEIIEQISEFSKRVILADANLDKVLSAYNKHRDKPIREQAENIIHLFTLTNLGAPAAFKYFDTTIDRKRYTSTKEVLDATLIHQSITGLYETRIDLSQLGGDGGEAAAKGGSGGGGGTLQLEEEYRLFEPESTQKQEMDIWLKNFPQAWAETGGMGTAHCQAPVLIQLKATATPISIRQYPMPHEAYQGIKPHIRRMLDQGILKPCQSPWNTPLLPVKKPGTEDYRPVQDLREVNKRVEDIHPTVPNPYNLLSTLPPSHPWYTVLDLKDAFFCLRLHSESQLLFAFEWRDPEIGLSGQLTWTRLPQGFKNSPTLFNEALHSDLADFRVRYPALVLLQYVDDLLLAAATRTECLEGTKALLETLGNKGYRASAKKAQICLQEVTYLGYSLKDGQRWLTKARKEAILSIPVPKNSRQVREFLGKAGYCRLFIPGFAELAAPLYPLTRPGTLFQWGTEQQLAFEDIKKALLSSPALGLPDITKPFELFIDENSGFAKGVLVQKLGPWKRPVAYLSKKLDTVASGWPPCLRMVAAIAILVKDAGKLTLGQPLTILTSHPVEALVRQPPNKWLSNARMTHYQAMLLDAERVHFGPTVSLNPATLLPLPSGGNHHDCLQILAETHGTRPDLTDQPLPDADLTWYTDGSSFIRNGEREAGAAVTTESEVIWAAPLPPGTSAQRAELIALTQALKMAEGKKLTVYTDSRYAFATTHVHGEIYRRRGWLTSEGKEIKNKNEILALLEALFLPKRLSIIHCPGHQKGDSPQAKGNRLADDTAKKAATETHSSLTVLPAGKRTADGSEFEKRTADGSEFESPKKKAKVE

SEQ ID NO: 1280 - protein, 2092 aa, synthetic construct
MPAAKRVKLDGGDKKYSIGLDIGTNSVGWAVITDEYKVPSKKFKVLGNTDRHSIKKNLIGALLFDSGETAEATRLKRTARRRYTRRKNRICYLQEIFSNEMAKVDDSFFHRLEESFLVEEDKKHERHPIFGNIVDEVAYHEKYPTIYHLRKKLVDSTDKADLRLIYLALAHMIKFRGHFLIEGDLNPDNSDVDKLFIQLVQTYNQLFEENPINASGVDAKAILSARLSKSRRLENLIAQLPGEKKNGLFGNLIALSLGLTPNFKSNFDLAEDAKLQLSKDTYDDDLDNLLAQIGDQYADLFLAAKNLSDAILLSDILRVNTEITKAPLSASMIKRYDEHHQDLTLLKALVRQQLPEKYKEIFFDQSKNGYAGYIDGGASQEEFYKFIKPILEKMDGTEELLVKLNREDLLRKQRTFDNGSIPHQIHLGELHAILRRQEDFYPFLKDNREKIEKILTFRIPYYVGPLARGNSRFAWMTRKSEETITPWNFEEVVDKGASAQSFIERMTNFDKNLPNEKVLPKHSLLYEYFTVYNELTKVKYVTEGMRKPAFLSGEQKKAIVDLLFKTNRKVTVKQLKEDYFKKIECFDSVEISGVEDRFNASLGTYHDLLKIIKDKDFLDNEENEDILEDIVLTLTLFEDREMIEERLKTYAHLFDDKVMKQLKRRRYTGWGRLSRKLINGIRDKQSGKTILDFLKSDGFANRNFMQLIHDDSLTFKEDIQKAQVSGQGDSLHEHIANLAGSPAIKKGILQTVKVVDELVKVMGRHKPENIVIEMARENQTTQKGQKNSRERMKRIEEGIKELGSQILKEHPVENTQLQNEKLYLYYLQNGRDMYVDQELDINRLSDYDVDHIVPQSFLKDDSIDNKVLTRSDKARGKSDNVPSEEVVKKMKNYWRQLLNAKLITQRKFDNLTKAERGGLSELDKAGFIKRQLVETRQITKHVAQILDSRMNTKYDENDKLIREVKVITLKSKLVSDFRKDFQFYKVREINNYHHAHDAYLNAVVGTALIKKYPKLESEFVYGDYKVYDVRKMIAKSEQEIGKATAKYFFYSNIMNFFKTEITLANGEIRKRPLIETNGETGEIVWDKGRDFATVRKVLSMPQVNIVKKTEVQTGGFSKESILPKRNSDKLIARKKDWDPKKYGGFDSPTVAYSVLVVAKVEKGKSKKLKSVKELLGITIMERSSFEKNPIDFLEAKGYKEVKKDLIIKLPKYSLFELENGRKRMLASAGELQKGNELALPSKYVNFLYLASHYEKLKGSPEDNEQKQLFVEQHKHYLDEIIEQISEFSKRVILADANLDKVLSAYNKHRDKPIREQAENIIHLFTLTNLGAPAAFKYFDTTIDRKRYTSTKEVLDATLIHQSITGLYETRIDLSQLGGDGGGGGEAAAKGGTLQLEEEYRLFEPESTQKQEMDIWLKNFPQAWAETGGMGTAHCQAPVLIQLKATATPISIRQYPMPHEAYQGIKPHIRRMLDQGILKPCQSPWNTPLLPVKKPGTEDYRPVQDLREVNKRVEDIHPTVPNPYNLLSTLPPSHPWYTVLDLKDAFFCLRLHSESQLLFAFEWRDPEIGLSGQLTWTRLPQGFKNSPTLFNEALHSDLADFRVRYPALVLLQYVDDLLLAAATRTECLEGTKALLETLGNKGYRASAKKAQICLQEVTYLGYSLKDGQRWLTKARKEAILSIPVPKNSRQVREFLGKAGYCRLFIPGFAELAAPLYPLTRPGTLFQWGTEQQLAFEDIKKALLSSPALGLPDITKPFELFIDENSGFAKGVLVQKLGPWKRPVAYLSKKLDTVASGWPPCLRMVAAIAILVKDAGKLTLGQPLTILTSHPVEALVRQPPNKWLSNARMTHYQAMLLDAERVHFGPTVSLNPATLLPLPSGGNHHDCLQILAETHGTRPDLTDQPLPDADLTWYTDGSSFIRNGEREAGAAVTTESEVIWAAPLPPGTSAQRAELIALTQALKMAEGKKLTVYTDSRYAFATTHVHGEIYRRRGWLTSEGKEIKNKNEILALLEALFLPKRLSIIHCPGHQKGDSPQAKGNRLADDTAKKAATETHSSLTVLPAGKRTADGSEFEKRTADGSEFESPKKKAKVE

SEQ ID NO: 1281 - protein, 2090 aa, synthetic construct
MPAAKRVKLDGGDKKYSIGLDIGTNSVGWAVITDEYKVPSKKFKVLGNTDRHSIKKNLIGALLFDSGETAEATRLKRTARRRYTRRKNRICYLQEIFSNEMAKVDDSFFHRLEESFLVEEDKKHERHPIFGNIVDEVAYHEKYPTIYHLRKKLVDSTDKADLRLIYLALAHMIKFRGHFLIEGDLNPDNSDVDKLFIQLVQTYNQLFEENPINASGVDAKAILSARLSKSRRLENLIAQLPGEKKNGLFGNLIALSLGLTPNFKSNFDLAEDAKLQLSKDTYDDDLDNLLAQIGDQYADLFLAAKNLSDAILLSDILRVNTEITKAPLSASMIKRYDEHHQDLTLLKALVRQQLPEKYKEIFFDQSKNGYAGYIDGGASQEEFYKFIKPILEKMDGTEELLVKLNREDLLRKQRTFDNGSIPHQIHLGELHAILRRQEDFYPFLKDNREKIEKILTFRIPYYVGPLARGNSRFAWMTRKSEETITPWNFEEVVDKGASAQSFIERMTNFDKNLPNEKVLPKHSLLYEYFTVYNELTKVKYVTEGMRKPAFLSGEQKKAIVDLLFKTNRKVTVKQLKEDYFKKIECFDSVEISGVEDRFNASLGTYHDLLKIIKDKDFLDNEENEDILEDIVLTLTLFEDREMIEERLKTYAHLFDDKVMKQLKRRRYTGWGRLSRKLINGIRDKQSGKTILDFLKSDGFANRNFMQLIHDDSLTFKEDIQKAQVSGQGDSLHEHIANLAGSPAIKKGILQTVKVVDELVKVMGRHKPENIVIEMARENQTTQKGQKNSRERMKRIEEGIKELGSQILKEHPVENTQLQNEKLYLYYLQNGRDMYVDQELDINRLSDYDVDHIVPQSFLKDDSIDNKVLTRSDKARGKSDNVPSEEVVKKMKNYWRQLLNAKLITQRKFDNLTKAERGGLSELDKAGFIKRQLVETRQITKHVAQILDSRMNTKYDENDKLIREVKVITLKSKLVSDFRKDFQFYKVREINNYHHAHDAYLNAVVGTALIKKYPKLESEFVYGDYKVYDVRKMIAKSEQEIGKATAKYFFYSNIMNFFKTEITLANGEIRKRPLIETNGETGEIVWDKGRDFATVRKVLSMPQVNIVKKTEVQTGGFSKESILPKRNSDKLIARKKDWDPKKYGGFDSPTVAYSVLVVAKVEKGKSKKLKSVKELLGITIMERSSFEKNPIDFLEAKGYKEVKKDLIIKLPKYSLFELENGRKRMLASAGELQKGNELALPSKYVNFLYLASHYEKLKGSPEDNEQKQLFVEQHKHYLDEIIEQISEFSKRVILADANLDKVLSAYNKHRDKPIREQAENIIHLFTLTNLGAPAAFKYFDTTIDRKRYTSTKEVLDATLIHQSITGLYETRIDLSQLGGDGGGGGGGSGGTLQLEEEYRLFEPESTQKQEMDIWLKNFPQAWAETGGMGTAHCQAPVLIQLKATATPISIRQYPMPHEAYQGIKPHIRRMLDQGILKPCQSPWNTPLLPVKKPGTEDYRPVQDLREVNKRVEDIHPTVPNPYNLLSTLPPSHPWYTVLDLKDAFFCLRLHSESQLLFAFEWRDPEIGLSGQLTWTRLPQGFKNSPTLFNEALHSDLADFRVRYPALVLLQYVDDLLLAAATRTECLEGTKALLETLGNKGYRASAKKAQICLQEVTYLGYSLKDGQRWLTKARKEAILSIPVPKNSRQVREFLGKAGYCRLFIPGFAELAAPLYPLTRPGTLFQWGTEQQLAFEDIKKALLSSPALGLPDITKPFELFIDENSGFAKGVLVQKLGPWKRPVAYLSKKLDTVASGWPPCLRMVAAIAILVKDAGKLTLGQPLTILTSHPVEALVRQPPNKWLSNARMTHYQAMLLDAERVHFGPTVSLNPATLLPLPSGGNHHDCLQILAETHGTRPDLTDQPLPDADLTWYTDGSSFIRNGEREAGAAVTTESEVIWAAPLPPGTSAQRAELIALTQALKMAEGKKLTVYTDSRYAFATTHVHGEIYRRRGWLTSEGKEIKNKNEILALLEALFLPKRLSIIHCPGHQKGDSPQAKGNRLADDTAKKAATETHSSLTVLPAGKRTADGSEFEKRTADGSEFESPKKKAKVE

SEQ ID NO: 1282 - protein, 2211 aa, synthetic construct
MPAAKRVKLDGGDKKYSIGLDIGTNSVGWAVITDEYKVPSKKFKVLGNTDRHSIKKNLIGALLFDSGETAEATRLKRTARRRYTRRKNRICYLQEIFSNEMAKVDDSFFHRLEESFLVEEDKKHERHPIFGNIVDEVAYHEKYPTIYHLRKKLVDSTDKADLRLIYLALAHMIKFRGHFLIEGDLNPDNSDVDKLFIQLVQTYNQLFEENPINASGVDAKAILSARLSKSRRLENLIAQLPGEKKNGLFGNLIALSLGLTPNFKSNFDLAEDAKLQLSKDTYDDDLDNLLAQIGDQYADLFLAAKNLSDAILLSDILRVNTEITKAPLSASMIKRYDEHHQDLTLLKALVRQQLPEKYKEIFFDQSKNGYAGYIDGGASQEEFYKFIKPILEKMDGTEELLVKLNREDLLRKQRTFDNGSIPHQIHLGELHAILRRQEDFYPFLKDNREKIEKILTFRIPYYVGPLARGNSRFAWMTRKSEETITPWNFEEVVDKGASAQSFIERMTNFDKNLPNEKVLPKHSLLYEYFTVYNELTKVKYVTEGMRKPAFLSGEQKKAIVDLLFKTNRKVTVKQLKEDYFKKIECFDSVEISGVEDRFNASLGTYHDLLKIIKDKDFLDNEENEDILEDIVLTLTLFEDREMIEERLKTYAHLFDDKVMKQLKRRRYTGWGRLSRKLINGIRDKQSGKTILDFLKSDGFANRNFMQLIHDDSLTFKEDIQKAQVSGQGDSLHEHIANLAGSPAIKKGILQTVKVVDELVKVMGRHKPENIVIEMARENQTTQKGQKNSRERMKRIEEGIKELGSQILKEHPVENTQLQNEKLYLYYLQNGRDMYVDQELDINRLSDYDVDHIVPQSFLKDDSIDNKVLTRSDKARGKSDNVPSEEVVKKMKNYWRQLLNAKLITQRKFDNLTKAERGGLSELDKAGFIKRQLVETRQITKHVAQILDSRMNTKYDENDKLIREVKVITLKSKLVSDFRKDFQFYKVREINNYHHAHDAYLNAVVGTALIKKYPKLESEFVYGDYKVYDVRKMIAKSEQEIGKATAKYFFYSNIMNFFKTEITLANGEIRKRPLIETNGETGEIVWDKGRDFATVRKVLSMPQVNIVKKTEVQTGGFSKESILPKRNSDKLIARKKDWDPKKYGGFDSPTVAYSVLVVAKVEKGKSKKLKSVKELLGITIMERSSFEKNPIDFLEAKGYKEVKKDLIIKLPKYSLFELENGRKRMLASAGELQKGNELALPSKYVNFLYLASHYEKLKGSPEDNEQKQLFVEQHKHYLDEIIEQISEFSKRVILADANLDKVLSAYNKHRDKPIREQAENIIHLFTLTNLGAPAAFKYFDTTIDRKRYTSTKEVLDATLIHQSITGLYETRIDLSQLGGDGGAEAAAKEAAAKEAAAKEAAAKALEAEAAAKEAAAKEAAAKEAAAKAGGMNPLQLLQPLPAEIKGTKLLAHWNSGATITCIPESFLEDEQPIKKTLIKTIHGEKQQNVYYVTFKVKGRKVEAEVIASPYEYILLSPTDVPWLTQQPLQLTILVPLQEYQEKILSKTALPEDQKQQLKTLFVKYDNLWQHWENQVGHRKIRPHNIATGDYPPRPQKQYPINPKAKPSIQIVIDDLLKQGVLTPQNSTMNTPVYPVPKPDGRWRMVLDYREVNKTIPLTAAQNQHSAGILATIVRQKYKTTLDLANGFWAHPITPESYWLTAFTWQGKQYCWTRLPQGFLNSPALFTADVVDLLKEIPNVQVYVDDIYLSHDDPKEHVQQLEKVFQILLQAGYVVSLKKSEIGQKTVEFLGFNITKEGRGLTDTFKTKLLNITPPKDLKQLQSILGLLNFARNFIPNFAELVQPLYNLIASAKGKYIEWSEENTKQLNMVIEALNTASNLEERLPEQRLVIKVNTSPSAGYVRYYNETGKKPIMYLNYVFSKAELKFSMLEKLLTTMHKALIKAMDLAMGQEILVYSPIVSMTKIQKTPLPERKALPIRWITWMTYLEDPRIQFHYDKTLPELKHIPDVYTSSQSPVKHPSQYEGVFYTDGSAIKSPDPTKSNNAGMGIVHATYKPEYQVLNQWSIPLGNHTAQMAEIAAVEFACKKALKIPGPVLVITDSFYVAESANKELPYWKSNGFVNNKKKPLKHISKWKSIAECLSMKPDITIQHEKGISLQIPVFILKGNALADKLATQGSYVVNAGKRTADGSEFEKRTADGSEFESPKKKAKVE

SEQ ID NO: 1283 - protein, 2190 aa, synthetic construct
MPAAKRVKLDGGDKKYSIGLDIGTNSVGWAVITDEYKVPSKKFKVLGNTDRHSIKKNLIGALLFDSGETAEATRLKRTARRRYTRRKNRICYLQEIFSNEMAKVDDSFFHRLEESFLVEEDKKHERHPIFGNIVDEVAYHEKYPTIYHLRKKLVDSTDKADLRLIYLALAHMIKFRGHFLIEGDLNPDNSDVDKLFIQLVQTYNQLFEENPINASGVDAKAILSARLSKSRRLENLIAQLPGEKKNGLFGNLIALSLGLTPNFKSNFDLAEDAKLQLSKDTYDDDLDNLLAQIGDQYADLFLAAKNLSDAILLSDILRVNTEITKAPLSASMIKRYDEHHQDLTLLKALVRQQLPEKYKEIFFDQSKNGYAGYIDGGASQEEFYKFIKPILEKMDGTEELLVKLNREDLLRKQRTFDNGSIPHQIHLGELHAILRRQEDFYPFLKDNREKIEKILTFRIPYYVGPLARGNSRFAWMTRKSEETITPWNFEEVVDKGASAQSFIERMTNFDKNLPNEKVLPKHSLLYEYFTVYNELTKVKYVTEGMRKPAFLSGEQKKAIVDLLFKTNRKVTVKQLKEDYFKKIECFDSVEISGVEDRFNASLGTYHDLLKIIKDKDFLDNEENEDILEDIVLTLTLFEDREMIEERLKTYAHLFDDKVMKQLKRRRYTGWGRLSRKLINGIRDKQSGKTILDFLKSDGFANRNFMQLIHDDSLTFKEDIQKAQVSGQGDSLHEHIANLAGSPAIKKGILQTVKVVDELVKVMGRHKPENIVIEMARENQTTQKGQKNSRERMKRIEEGIKELGSQILKEHPVENTQLQNEKLYLYYLQNGRDMYVDQELDINRLSDYDVDHIVPQSFLKDDSIDNKVLTRSDKARGKSDNVPSEEVVKKMKNYWRQLLNAKLITQRKFDNLTKAERGGLSELDKAGFIKRQLVETRQITKHVAQILDSRMNTKYDENDKLIREVKVITLKSKLVSDFRKDFQFYKVREINNYHHAHDAYLNAVVGTALIKKYPKLESEFVYGDYKVYDVRKMIAKSEQEIGKATAKYFFYSNIMNFFKTEITLANGEIRKRPLIETNGETGEIVWDKGRDFATVRKVLSMPQVNIVKKTEVQTGGFSKESILPKRNSDKLIARKKDWDPKKYGGFDSPTVAYSVLVVAKVEKGKSKKLKSVKELLGITIMERSSFEKNPIDFLEAKGYKEVKKDLIIKLPKYSLFELENGRKRMLASAGELQKGNELALPSKYVNFLYLASHYEKLKGSPEDNEQKQLFVEQHKHYLDEIIEQISEFSKRVILADANLDKVLSAYNKHRDKPIREQAENIIHLFTLTNLGAPAAFKYFDTTIDRKRYTSTKEVLDATLIHQSITGLYETRIDLSQLGGDGGEAAAKEAAAKEAAAKEAAAKEAAAKGGMNPLQLLQPLPAEIKGTKLLAHWNSGATITCIPESFLEDEQPIKKTLIKTIHGEKQQNVYYVTFKVKGRKVEAEVIASPYEYILLSPTDVPWLTQQPLQLTILVPLQEYQEKILSKTALPEDQKQQLKTLFVKYDNLWQHWENQVGHRKIRPHNIATGDYPPRPQKQYPINPKAKPSIQIVIDDLLKQGVLTPQNSTMNTPVYPVPKPDGRWRMVLDYREVNKTIPLTAAQNQHSAGILATIVRQKYKTTLDLANGFWAHPITPESYWLTAFTWQGKQYCWTRLPQGFLNSPALFTADVVDLLKEIPNVQVYVDDIYLSHDDPKEHVQQLEKVFQILLQAGYVVSLKKSEIGQKTVEFLGFNITKEGRGLTDTFKTKLLNITPPKDLKQLQSILGLLNFARNFIPNFAELVQPLYNLIASAKGKYIEWSEENTKQLNMVIEALNTASNLEERLPEQRLVIKVNTSPSAGYVRYYNETGKKPIMYLNYVFSKAELKFSMLEKLLTTMHKALIKAMDLAMGQEILVYSPIVSMTKIQKTPLPERKALPIRWITWMTYLEDPRIQFHYDKTLPELKHIPDVYTSSQSPVKHPSQYEGVFYTDGSAIKSPDPTKSNNAGMGIVHATYKPEYQVLNQWSIPLGNHTAQMAEIAAVEFACKKALKIPGPVLVITDSFYVAESANKELPYWKSNGFVNNKKKPLKHISKWKSIAECLSMKPDITIQHEKGISLQIPVFILKGNALADKLATQGSYVVNAGKRTADGSEFEKRTADGSEFESPKKKAKVE

SEQ ID NO: 1284 - protein, 2183 aa, synthetic construct
MPAAKRVKLDGGDKKYSIGLDIGTNSVGWAVITDEYKVPSKKFKVLGNTDRHSIKKNLIGALLFDSGETAEATRLKRTARRRYTRRKNRICYLQEIFSNEMAKVDDSFFHRLEESFLVEEDKKHERHPIFGNIVDEVAYHEKYPTIYHLRKKLVDSTDKADLRLIYLALAHMIKFRGHFLIEGDLNPDNSDVDKLFIQLVQTYNQLFEENPINASGVDAKAILSARLSKSRRLENLIAQLPGEKKNGLFGNLIALSLGLTPNFKSNFDLAEDAKLQLSKDTYDDDLDNLLAQIGDQYADLFLAAKNLSDAILLSDILRVNTEITKAPLSASMIKRYDEHHQDLTLLKALVRQQLPEKYKEIFFDQSKNGYAGYIDGGASQEEFYKFIKPILEKMDGTEELLVKLNREDLLRKQRTFDNGSIPHQIHLGELHAILRRQEDFYPFLKDNREKIEKILTFRIPYYVGPLARGNSRFAWMTRKSEETITPWNFEEVVDKGASAQSFIERMTNFDKNLPNEKVLPKHSLLYEYFTVYNELTKVKYVTEGMRKPAFLSGEQKKAIVDLLFKTNRKVTVKQLKEDYFKKIECFDSVEISGVEDRFNASLGTYHDLLKIIKDKDFLDNEENEDILEDIVLTLTLFEDREMIEERLKTYAHLFDDKVMKQLKRRRYTGWGRLSRKLINGIRDKQSGKTILDFLKSDGFANRNFMQLIHDDSLTFKEDIQKAQVSGQGDSLHEHIANLAGSPAIKKGILQTVKVVDELVKVMGRHKPENIVIEMARENQTTQKGQKNSRERMKRIEEGIKELGSQILKEHPVENTQLQNEKLYLYYLQNGRDMYVDQELDINRLSDYDVDHIVPQSFLKDDSIDNKVLTRSDKARGKSDNVPSEEVVKKMKNYWRQLLNAKLITQRKFDNLTKAERGGLSELDKAGFIKRQLVETRQITKHVAQILDSRMNTKYDENDKLIREVKVITLKSKLVSDFRKDFQFYKVREINNYHHAHDAYLNAVVGTALIKKYPKLESEFVYGDYKVYDVRKMIAKSEQEIGKATAKYFFYSNIMNFFKTEITLANGEIRKRPLIETNGETGEIVWDKGRDFATVRKVLSMPQVNIVKKTEVQTGGFSKESILPKRNSDKLIARKKDWDPKKYGGFDSPTVAYSVLVVAKVEKGKSKKLKSVKELLGITIMERSSFEKNPIDFLEAKGYKEVKKDLIIKLPKYSLFELENGRKRMLASAGELQKGNELALPSKYVNFLYLASHYEKLKGSPEDNEQKQLFVEQHKHYLDEIIEQISEFSKRVILADANLDKVLSAYNKHRDKPIREQAENIIHLFTLTNLGAPAAFKYFDTTIDRKRYTSTKEVLDATLIHQSITGLYETRIDLSQLGGDGGGSSGSSGSSGSSGSSGSSGGMNPLQLLQPLPAEIKGTKLLAHWNSGATITCIPESFLEDEQPIKKTLIKTIHGEKQQNVYYVTFKVKGRKVEAEVIASPYEYILLSPTDVPWLTQQPLQLTILVPLQEYQEKILSKTALPEDQKQQLKTLFVKYDNLWQHWENQVGHRKIRPHNIATGDYPPRPQKQYPINPKAKPSIQIVIDDLLKQGVLTPQNSTMNTPVYPVPKPDGRWRMVLDYREVNKTIPLTAAQNQHSAGILATIVRQKYKTTLDLANGFWAHPITPESYWLTAFTWQGKQYCWTRLPQGFLNSPALFTADVVDLLKEIPNVQVYVDDIYLSHDDPKEHVQQLEKVFQILLQAGYVVSLKKSEIGQKTVEFLGFNITKEGRGLTDTFKTKLLNITPPKDLKQLQSILGLLNFARNFIPNFAELVQPLYNLIASAKGKYIEWSEENTKQLNMVIEALNTASNLEERLPEQRLVIKVNTSPSAGYVRYYNETGKKPIMYLNYVFSKAELKFSMLEKLLTTMHKALIKAMDLAMGQEILVYSPIVSMTKIQKTPLPERKALPIRWITWMTYLEDPRIQFHYDKTLPELKHIPDVYTSSQSPVKHPSQYEGVFYTDGSAIKSPDPTKSNNAGMGIVHATYKPEYQVLNQWSIPLGNHTAQMAEIAAVEFACKKALKIPGPVLVITDSFYVAESANKELPYWKSNGFVNNKKKPLKHISKWKSIAECLSMKPDITIQHEKGISLQIPVFILKGNALADKLATQGSYVVNAGKRTADGSEFEKRTADGSEFESPKKKAKVE

SEQ ID NO: 1285 - protein, 2176 aa, synthetic construct
MPAAKRVKLDGGDKKYSIGLDIGTNSVGWAVITDEYKVPSKKFKVLGNTDRHSIKKNLIGALLFDSGETAEATRLKRTARRRYTRRKNRICYLQEIFSNEMAKVDDSFFHRLEESFLVEEDKKHERHPIFGNIVDEVAYHEKYPTIYHLRKKLVDSTDKADLRLIYLALAHMIKFRGHFLIEGDLNPDNSDVDKLFIQLVQTYNQLFEENPINASGVDAKAILSARLSKSRRLENLIAQLPGEKKNGLFGNLIALSLGLTPNFKSNFDLAEDAKLQLSKDTYDDDLDNLLAQIGDQYADLFLAAKNLSDAILLSDILRVNTEITKAPLSASMIKRYDEHHQDLTLLKALVRQQLPEKYKEIFFDQSKNGYAGYIDGGASQEEFYKFIKPILEKMDGTEELLVKLNREDLLRKQRTFDNGSIPHQIHLGELHAILRRQEDFYPFLKDNREKIEKILTFRIPYYVGPLARGNSRFAWMTRKSEETITPWNFEEVVDKGASAQSFIERMTNFDKNLPNEKVLPKHSLLYEYFTVYNELTKVKYVTEGMRKPAFLSGEQKKAIVDLLFKTNRKVTVKQLKEDYFKKIECFDSVEISGVEDRFNASLGTYHDLLKIIKDKDFLDNEENEDILEDIVLTLTLFEDREMIEERLKTYAHLFDDKVMKQLKRRRYTGWGRLSRKLINGIRDKQSGKTILDFLKSDGFANRNFMQLIHDDSLTFKEDIQKAQVSGQGDSLHEHIANLAGSPAIKKGILQTVKVVDELVKVMGRHKPENIVIEMARENQTTQKGQKNSRERMKRIEEGIKELGSQILKEHPVENTQLQNEKLYLYYLQNGRDMYVDQELDINRLSDYDVDHIVPQSFLKDDSIDNKVLTRSDKARGKSDNVPSEEVVKKMKNYWRQLLNAKLITQRKFDNLTKAERGGLSELDKAGFIKRQLVETRQITKHVAQILDSRMNTKYDENDKLIREVKVITLKSKLVSDFRKDFQFYKVREINNYHHAHDAYLNAVVGTALIKKYPKLESEFVYGDYKVYDVRKMIAKSEQEIGKATAKYFFYSNIMNFFKTEITLANGEIRKRPLIETNGETGEIVWDKGRDFATVRKVLSMPQVNIVKKTEVQTGGFSKESILPKRNSDKLIARKKDWDPKKYGGFDSPTVAYSVLVVAKVEKGKSKKLKSVKELLGITIMERSSFEKNPIDFLEAKGYKEVKKDLIIKLPKYSLFELENGRKRMLASAGELQKGNELALPSKYVNFLYLASHYEKLKGSPEDNEQKQLFVEQHKHYLDEIIEQISEFSKRVILADANLDKVLSAYNKHRDKPIREQAENIIHLFTLTNLGAPAAFKYFDTTIDRKRYTSTKEVLDATLIHQSITGLYETRIDLSQLGGDGGPAPAPAPAPAPGGMNPLQLLQPLPAEIKGTKLLAHWNSGATITCIPESFLEDEQPIKKTLIKTIHGEKQQNVYYVTFKVKGRKVEAEVIASPYEYILLSPTDVPWLTQQPLQLTILVPLQEYQEKILSKTALPEDQKQQLKTLFVKYDNLWQHWENQVGHRKIRPHNIATGDYPPRPQKQYPINPKAKPSIQIVIDDLLKQGVLTPQNSTMNTPVYPVPKPDGRWRMVLDYREVNKTIPLTAAQNQHSAGILATIVRQKYKTTLDLANGFWAHPITPESYWLTAFTWQGKQYCWTRLPQGFLNSPALFTADVVDLLKEIPNVQVYVDDIYLSHDDPKEHVQQLEKVFQILLQAGYVVSLKKSEIGQKTVEFLGFNITKEGRGLTDTFKTKLLNITPPKDLKQLQSILGLLNFARNFIPNFAELVQPLYNLIASAKGKYIEWSEENTKQLNMVIEALNTASNLEERLPEQRLVIKVNTSPSAGYVRYYNETGKKPIMYLNYVFSKAELKFSMLEKLLTTMHKALIKAMDLAMGQEILVYSPIVSMTKIQKTPLPERKALPIRWITWMTYLEDPRIQFHYDKTLPELKHIPDVYTSSQSPVKHPSQYEGVFYTDGSAIKSPDPTKSNNAGMGIVHATYKPEYQVLNQWSIPLGNHTAQMAEIAAVEFACKKALKIPGPVLVITDSFYVAESANKELPYWKSNGFVNNKKKPLKHISKWKSIAECLSMKPDITIQHEKGISLQIPVFILKGNALADKLATQGSYVVNAGKRTADGSEFEKRTADGSEFESPKKKAKVE

SEQ ID NO: 1286 - protein, 2176 aa, synthetic construct
MPAAKRVKLDGGDKKYSIGLDIGTNSVGWAVITDEYKVPSKKFKVLGNTDRHSIKKNLIGALLFDSGETAEATRLKRTARRRYTRRKNRICYLQEIFSNEMAKVDDSFFHRLEESFLVEEDKKHERHPIFGNIVDEVAYHEKYPTIYHLRKKLVDSTDKADLRLIYLALAHMIKFRGHFLIEGDLNPDNSDVDKLFIQLVQTYNQLFEENPINASGVDAKAILSARLSKSRRLENLIAQLPGEKKNGLFGNLIALSLGLTPNFKSNFDLAEDAKLQLSKDTYDDDLDNLLAQIGDQYADLFLAAKNLSDAILLSDILRVNTEITKAPLSASMIKRYDEHHQDLTLLKALVRQQLPEKYKEIFFDQSKNGYAGYIDGGASQEEFYKFIKPILEKMDGTEELLVKLNREDLLRKQRTFDNGSIPHQIHLGELHAILRRQEDFYPFLKDNREKIEKILTFRIPYYVGPLARGNSRFAWMTRKSEETITPWNFEEVVDKGASAQSFIERMTNFDKNLPNEKVLPKHSLLYEYFTVYNELTKVKYVTEGMRKPAFLSGEQKKAIVDLLFKTNRKVTVKQLKEDYFKKIECFDSVEISGVEDRFNASLGTYHDLLKIIKDKDFLDNEENEDILEDIVLTLTLFEDREMIEERLKTYAHLFDDKVMKQLKRRRYTGWGRLSRKLINGIRDKQSGKTILDFLKSDGFANRNFMQLIHDDSLTFKEDIQKAQVSGQGDSLHEHIANLAGSPAIKKGILQTVKVVDELVKVMGRHKPENIVIEMARENQTTQKGQKNSRERMKRIEEGIKELGSQILKEHPVENTQLQNEKLYLYYLQNGRDMYVDQELDINRLSDYDVDHIVPQSFLKDDSIDNKVLTRSDKARGKSDNVPSEEVVKKMKNYWRQLLNAKLITQRKFDNLTKAERGGLSELDKAGFIKRQLVETRQITKHVAQILDSRMNTKYDENDKLIREVKVITLKSKLVSDFRKDFQFYKVREINNYHHAHDAYLNAVVGTALIKKYPKLESEFVYGDYKVYDVRKMIAKSEQEIGKATAKYFFYSNIMNFFKTEITLANGEIRKRPLIETNGETGEIVWDKGRDFATVRKVLSMPQVNIVKKTEVQTGGFSKESILPKRNSDKLIARKKDWDPKKYGGFDSPTVAYSVLVVAKVEKGKSKKLKSVKELLGITIMERSSFEKNPIDFLEAKGYKEVKKDLIIKLPKYSLFELENGRKRMLASAGELQKGNELALPSKYVNFLYLASHYEKLKGSPEDNEQKQLFVEQHKHYLDEIIEQISEFSKRVILADANLDKVLSAYNKHRDKPIREQAENIIHLFTLTNLGAPAAFKYFDTTIDRKRYTSTKEVLDATLIHQSITGLYETRIDLSQLGGDGGGGSPAPEAAAKGGMNPLQLLQPLPAEIKGTKLLAHWNSGATITCIPESFLEDEQPIKKTLIKTIHGEKQQNVYYVTFKVKGRKVEAEVIASPYEYILLSPTDVPWLTQQPLQLTILVPLQEYQEKILSKTALPEDQKQQLKTLFVKYDNLWQHWENQVGHRKIRPHNIATGDYPPRPQKQYPINPKAKPSIQIVIDDLLKQGVLTPQNSTMNTPVYPVPKPDGRWRMVLDYREVNKTIPLTAAQNQHSAGILATIVRQKYKTTLDLANGFWAHPITPESYWLTAFTWQGKQYCWTRLPQGFLNSPALFTADVVDLLKEIPNVQVYVDDIYLSHDDPKEHVQQLEKVFQILLQAGYVVSLKKSEIGQKTVEFLGFNITKEGRGLTDTFKTKLLNITPPKDLKQLQSILGLLNFARNFIPNFAELVQPLYNLIASAKGKYIEWSEENTKQLNMVIEALNTASNLEERLPEQRLVIKVNTSPSAGYVRYYNETGKKPIMYLNYVFSKAELKFSMLEKLLTTMHKALIKAMDLAMGQEILVYSPIVSMTKIQKTPLPERKALPIRWITWMTYLEDPRIQFHYDKTLPELKHIPDVYTSSQSPVKHPSQYEGVFYTDGSAIKSPDPTKSNNAGMGIVHATYKPEYQVLNQWSIPLGNHTAQMAEIAAVEFACKKALKIPGPVLVITDSFYVAESANKELPYWKSNGFVNNKKKPLKHISKWKSIAECLSMKPDITIQHEKGISLQIPVFILKGNALADKLATQGSYVVNAGKRTADGSEFEKRTADGSEFESPKKKAKVE

SEQ ID NO: 1287 - protein, 2176 aa, synthetic construct
MPAAKRVKLDGGDKKYSIGLDIGTNSVGWAVITDEYKVPSKKFKVLGNTDRHSIKKNLIGALLFDSGETAEATRLKRTARRRYTRRKNRICYLQEIFSNEMAKVDDSFFHRLEESFLVEEDKKHERHPIFGNIVDEVAYHEKYPTIYHLRKKLVDSTDKADLRLIYLALAHMIKFRGHFLIEGDLNPDNSDVDKLFIQLVQTYNQLFEENPINASGVDAKAILSARLSKSRRLENLIAQLPGEKKNGLFGNLIALSLGLTPNFKSNFDLAEDAKLQLSKDTYDDDLDNLLAQIGDQYADLFLAAKNLSDAILLSDILRVNTEITKAPLSASMIKRYDEHHQDLTLLKALVRQQLPEKYKEIFFDQSKNGYAGYIDGGASQEEFYKFIKPILEKMDGTEELLVKLNREDLLRKQRTFDNGSIPHQIHLGELHAILRRQEDFYPFLKDNREKIEKILTFRIPYYVGPLARGNSRFAWMTRKSEETITPWNFEEVVDKGASAQSFIERMTNFDKNLPNEKVLPKHSLLYEYFTVYNELTKVKYVTEGMRKPAFLSGEQKKAIVDLLFKTNRKVTVKQLKEDYFKKIECFDSVEISGVEDRFNASLGTYHDLLKIIKDKDFLDNEENEDILEDIVLTLTLFEDREMIEERLKTYAHLFDDKVMKQLKRRRYTGWGRLSRKLINGIRDKQSGKTILDFLKSDGFANRNFMQLIHDDSLTFKEDIQKAQVSGQGDSLHEHIANLAGSPAIKKGILQTVKVVDELVKVMGRHKPENIVIEMARENQTTQKGQKNSRERMKRIEEGIKELGSQILKEHPVENTQLQNEKLYLYYLQNGRDMYVDQELDINRLSDYDVDHIVPQSFLKDDSIDNKVLTRSDKARGKSDNVPSEEVVKKMKNYWRQLLNAKLITQRKFDNLTKAERGGLSELDKAGFIKRQLVETRQITKHVAQILDSRMNTKYDENDKLIREVKVITLKSKLVSDFRKDFQFYKVREINNYHHAHDAYLNAVVGTALIKKYPKLESEFVYGDYKVYDVRKMIAKSEQEIGKATAKYFFYSNIMNFFKTEITLANGEIRKRPLIETNGETGEIVWDKGRDFATVRKVLSMPQVNIVKKTEVQTGGFSKESILPKRNSDKLIARKKDWDPKKYGGFDSPTVAYSVLVVAKVEKGKSKKLKSVKELLGITIMERSSFEKNPIDFLEAKGYKEVKKDLIIKLPKYSLFELENGRKRMLASAGELQKGNELALPSKYVNFLYLASHYEKLKGSPEDNEQKQLFVEQHKHYLDEIIEQISEFSKRVILADANLDKVLSAYNKHRDKPIREQAENIIHLFTLTNLGAPAAFKYFDTTIDRKRYTSTKEVLDATLIHQSITGLYETRIDLSQLGGDGGEAAAKGGSPAPGGMNPLQLLQPLPAEIKGTKLLAHWNSGATITCIPESFLEDEQPIKKTLIKTIHGEKQQNVYYVTFKVKGRKVEAEVIASPYEYILLSPTDVPWLTQQPLQLTILVPLQEYQEKILSKTALPEDQKQQLKTLFVKYDNLWQHWENQVGHRKIRPHNIATGDYPPRPQKQYPINPKAKPSIQIVIDDLLKQGVLTPQNSTMNTPVYPVPKPDGRWRMVLDYREVNKTIPLTAAQNQHSAGILATIVRQKYKTTLDLANGFWAHPITPESYWLTAFTWQGKQYCWTRLPQGFLNSPALFTADVVDLLKEIPNVQVYVDDIYLSHDDPKEHVQQLEKVFQILLQAGYVVSLKKSEIGQKTVEFLGFNITKEGRGLTDTFKTKLLNITPPKDLKQLQSILGLLNFARNFIPNFAELVQPLYNLIASAKGKYIEWSEENTKQLNMVIEALNTASNLEERLPEQRLVIKVNTSPSAGYVRYYNETGKKPIMYLNYVFSKAELKFSMLEKLLTTMHKALIKAMDLAMGQEILVYSPIVSMTKIQKTPLPERKALPIRWITWMTYLEDPRIQFHYDKTLPELKHIPDVYTSSQSPVKHPSQYEGVFYTDGSAIKSPDPTKSNNAGMGIVHATYKPEYQVLNQWSIPLGNHTAQMAEIAAVEFACKKALKIPGPVLVITDSFYVAESANKELPYWKSNGFVNNKKKPLKHISKWKSIAECLSMKPDITIQHEKGISLQIPVFILKGNALADKLATQGSYVVNAGKRTADGSEFEKRTADGSEFESPKKKAKVE

SEQ ID NO: 1288 - protein, 2180 aa, synthetic construct
MPAAKRVKLDGGDKKYSIGLDIGTNSVGWAVITDEYKVPSKKFKVLGNTDRHSIKKNLIGALLFDSGETAEATRLKRTARRRYTRRKNRICYLQEIFSNEMAKVDDSFFHRLEESFLVEEDKKHERHPIFGNIVDEVAYHEKYPTIYHLRKKLVDSTDKADLRLIYLALAHMIKFRGHFLIEGDLNPDNSDVDKLFIQLVQTYNQLFEENPINASGVDAKAILSARLSKSRRLENLIAQLPGEKKNGLFGNLIALSLGLTPNFKSNFDLAEDAKLQLSKDTYDDDLDNLLAQIGDQYADLFLAAKNLSDAILLSDILRVNTEITKAPLSASMIKRYDEHHQDLTLLKALVRQQLPEKYKEIFFDQSKNGYAGYIDGGASQEEFYKFIKPILEKMDGTEELLVKLNREDLLRKQRTFDNGSIPHQIHLGELHAILRRQEDFYPFLKDNREKIEKILTFRIPYYVGPLARGNSRFAWMTRKSEETITPWNFEEVVDKGASAQSFIERMTNFDKNLPNEKVLPKHSLLYEYFTVYNELTKVKYVTEGMRKPAFLSGEQKKAIVDLLFKTNRKVTVKQLKEDYFKKIECFDSVEISGVEDRFNASLGTYHDLLKIIKDKDFLDNEENEDILEDIVLTLTLFEDREMIEERLKTYAHLFDDKVMKQLKRRRYTGWGRLSRKLINGIRDKQSGKTILDFLKSDGFANRNFMQLIHDDSLTFKEDIQKAQVSGQGDSLHEHIANLAGSPAIKKGILQTVKVVDELVKVMGRHKPENIVIEMARENQTTQKGQKNSRERMKRIEEGIKELGSQILKEHPVENTQLQNEKLYLYYLQNGRDMYVDQELDINRLSDYDVDHIVPQSFLKDDSIDNKVLTRSDKARGKSDNVPSEEVVKKMKNYWRQLLNAKLITQRKFDNLTKAERGGLSELDKAGFIKRQLVETRQITKHVAQILDSRMNTKYDENDKLIREVKVITLKSKLVSDFRKDFQFYKVREINNYHHAHDAYLNAVVGTALIKKYPKLESEFVYGDYKVYDVRKMIAKSEQEIGKATAKYFFYSNIMNFFKTEITLANGEIRKRPLIETNGETGEIVWDKGRDFATVRKVLSMPQVNIVKKTEVQTGGFSKESILPKRNSDKLIARKKDWDPKKYGGFDSPTVAYSVLVVAKVEKGKSKKLKSVKELLGITIMERSSFEKNPIDFLEAKGYKEVKKDLIIKLPKYSLFELENGRKRMLASAGELQKGNELALPSKYVNFLYLASHYEKLKGSPEDNEQKQLFVEQHKHYLDEIIEQISEFSKRVILADANLDKVLSAYNKHRDKPIREQAENIIHLFTLTNLGAPAAFKYFDTTIDRKRYTSTKEVLDATLIHQSITGLYETRIDLSQLGGDGGEAAAKEAAAKEAAAKGGMNPLQLLQPLPAEIKGTKLLAHWNSGATITCIPESFLEDEQPIKKTLIKTIHGEKQQNVYYVTFKVKGRKVEAEVIASPYEYILLSPTDVPWLTQQPLQLTILVPLQEYQEKILSKTALPEDQKQQLKTLFVKYDNLWQHWENQVGHRKIRPHNIATGDYPPRPQKQYPINPKAKPSIQIVIDDLLKQGVLTPQNSTMNTPVYPVPKPDGRWRMVLDYREVNKTIPLTAAQNQHSAGILATIVRQKYKTTLDLANGFWAHPITPESYWLTAFTWQGKQYCWTRLPQGFLNSPALFTADVVDLLKEIPNVQVYVDDIYLSHDDPKEHVQQLEKVFQILLQAGYVVSLKKSEIGQKTVEFLGFNITKEGRGLTDTFKTKLLNITPPKDLKQLQSILGLLNFARNFIPNFAELVQPLYNLIASAKGKYIEWSEENTKQLNMVIEALNTASNLEERLPEQRLVIKVNTSPSAGYVRYYNETGKKPIMYLNYVFSKAELKFSMLEKLLTTMHKALIKAMDLAMGQEILVYSPIVSMTKIQKTPLPERKALPIRWITWMTYLEDPRIQFHYDKTLPELKHIPDVYTSSQSPVKHPSQYEGVFYTDGSAIKSPDPTKSNNAGMGIVHATYKPEYQVLNQWSIPLGNHTAQMAEIAAVEFACKKALKIPGPVLVITDSFYVAESANKELPYWKSNGFVNNKKKPLKHISKWKSIAECLSMKPDITIQHEKGISLQIPVFILKGNALADKLATQGSYVVNAGKRTADGSEFEKRTADGSEFESPKKKAKVE

SEQ ID NO: 1289 - protein, 2177 aa, synthetic construct
MPAAKRVKLDGGDKKYSIGLDIGTNSVGWAVITDEYKVPSKKFKVLGNTDRHSIKKNLIGALLFDSGETAEATRLKRTARRRYTRRKNRICYLQEIFSNEMAKVDDSFFHRLEESFLVEEDKKHERHPIFGNIVDEVAYHEKYPTIYHLRKKLVDSTDKADLRLIYLALAHMIKFRGHFLIEGDLNPDNSDVDKLFIQLVQTYNQLFEENPINASGVDAKAILSARLSKSRRLENLIAQLPGEKKNGLFGNLIALSLGLTPNFKSNFDLAEDAKLQLSKDTYDDDLDNLLAQIGDQYADLFLAAKNLSDAILLSDILRVNTEITKAPLSASMIKRYDEHHQDLTLLKALVRQQLPEKYKEIFFDQSKNGYAGYIDGGASQEEFYKFIKPILEKMDGTEELLVKLNREDLLRKQRTFDNGSIPHQIHLGELHAILRRQEDFYPFLKDNREKIEKILTFRIPYYVGPLARGNSRFAWMTRKSEETITPWNFEEVVDKGASAQSFIERMTNFDKNLPNEKVLPKHSLLYEYFTVYNELTKVKYVTEGMRKPAFLSGEQKKAIVDLLFKTNRKVTVKQLKEDYFKKIECFDSVEISGVEDRFNASLGTYHDLLKIIKDKDFLDNEENEDILEDIVLTLTLFEDREMIEERLKTYAHLFDDKVMKQLKRRRYTGWGRLSRKLINGIRDKQSGKTILDFLKSDGFANRNFMQLIHDDSLTFKEDIQKAQVSGQGDSLHEHIANLAGSPAIKKGILQTVKVVDELVKVMGRHKPENIVIEMARENQTTQKGQKNSRERMKRIEEGIKELGSQILKEHPVENTQLQNEKLYLYYLQNGRDMYVDQELDINRLSDYDVDHIVPQSFLKDDSIDNKVLTRSDKARGKSDNVPSEEVVKKMKNYWRQLLNAKLITQRKFDNLTKAERGGLSELDKAGFIKRQLVETRQITKHVAQILDSRMNTKYDENDKLIREVKVITLKSKLVSDFRKDFQFYKVREINNYHHAHDAYLNAVVGTALIKKYPKLESEFVYGDYKVYDVRKMIAKSEQEIGKATAKYFFYSNIMNFFKTEITLANGEIRKRPLIETNGETGEIVWDKGRDFATVRKVLSMPQVNIVKKTEVQTGGFSKESILPKRNSDKLIARKKDWDPKKYGGFDSPTVAYSVLVVAKVEKGKSKKLKSVKELLGITIMERSSFEKNPIDFLEAKGYKEVKKDLIIKLPKYSLFELENGRKRMLASAGELQKGNELALPSKYVNFLYLASHYEKLKGSPEDNEQKQLFVEQHKHYLDEIIEQISEFSKRVILADANLDKVLSAYNKHRDKPIREQAENIIHLFTLTNLGAPAAFKYFDTTIDRKRYTSTKEVLDATLIHQSITGLYETRIDLSQLGGDGGGGSGGSGGSGGSGGMNPLQLLQPLPAEIKGTKLLAHWNSGATITCIPESFLEDEQPIKKTLIKTIHGEKQQNVYYVTFKVKGRKVEAEVIASPYEYILLSPTDVPWLTQQPLQLTILVPLQEYQEKILSKTALPEDQKQQLKTLFVKYDNLWQHWENQVGHRKIRPHNIATGDYPPRPQKQYPINPKAKPSIQIVIDDLLKQGVLTPQNSTMNTPVYPVPKPDGRWRMVLDYREVNKTIPLTAAQNQHSAGILATIVRQKYKTTLDLANGFWAHPITPESYWLTAFTWQGKQYCWTRLPQGFLNSPALFTADVVDLLKEIPNVQVYVDDIYLSHDDPKEHVQQLEKVFQILLQAGYVVSLKKSEIGQKTVEFLGFNITKEGRGLTDTFKTKLLNITPPKDLKQLQSILGLLNFARNFIPNFAELVQPLYNLIASAKGKYIEWSEENTKQLNMVIEALNTASNLEERLPEQRLVIKVNTSPSAGYVRYYNETGKKPIMYLNYVFSKAELKFSMLEKLLTTMHKALIKAMDLAMGQEILVYSPIVSMTKIQKTPLPERKALPIRWITWMTYLEDPRIQFHYDKTLPELKHIPDVYTSSQSPVKHPSQYEGVFYTDGSAIKSPDPTKSNNAGMGIVHATYKPEYQVLNQWSIPLGNHTAQMAEIAAVEFACKKALKIPGPVLVITDSFYVAESANKELPYWKSNGFVNNKKKPLKHISKWKSIAECLSMKPDITIQHEKGISLQIPVFILKGNALADKLATQGSYVVNAGKRTADGSEFEKRTADGSEFESPKKKAKVE

SEQ ID NO: 1290 - protein, 2174 aa, synthetic construct
MPAAKRVKLDGGDKKYSIGLDIGTNSVGWAVITDEYKVPSKKFKVLGNTDRHSIKKNLIGALLFDSGETAEATRLKRTARRRYTRRKNRICYLQEIFSNEMAKVDDSFFHRLEESFLVEEDKKHERHPIFGNIVDEVAYHEKYPTIYHLRKKLVDSTDKADLRLIYLALAHMIKFRGHFLIEGDLNPDNSDVDKLFIQLVQTYNQLFEENPINASGVDAKAILSARLSKSRRLENLIAQLPGEKKNGLFGNLIALSLGLTPNFKSNFDLAEDAKLQLSKDTYDDDLDNLLAQIGDQYADLFLAAKNLSDAILLSDILRVNTEITKAPLSASMIKRYDEHHQDLTLLKALVRQQLPEKYKEIFFDQSKNGYAGYIDGGASQEEFYKFIKPILEKMDGTEELLVKLNREDLLRKQRTFDNGSIPHQIHLGELHAILRRQEDFYPFLKDNREKIEKILTFRIPYYVGPLARGNSRFAWMTRKSEETITPWNFEEVVDKGASAQSFIERMTNFDKNLPNEKVLPKHSLLYEYFTVYNELTKVKYVTEGMRKPAFLSGEQKKAIVDLLFKTNRKVTVKQLKEDYFKKIECFDSVEISGVEDRFNASLGTYHDLLKIIKDKDFLDNEENEDILEDIVLTLTLFEDREMIEERLKTYAHLFDDKVMKQLKRRRYTGWGRLSRKLINGIRDKQSGKTILDFLKSDGFANRNFMQLIHDDSLTFKEDIQKAQVSGQGDSLHEHIANLAGSPAIKKGILQTVKVVDELVKVMGRHKPENIVIEMARENQTTQKGQKNSRERMKRIEEGIKELGSQILKEHPVENTQLQNEKLYLYYLQNGRDMYVDQELDINRLSDYDVDHIVPQSFLKDDSIDNKVLTRSDKARGKSDNVPSEEVVKKMKNYWRQLLNAKLITQRKFDNLTKAERGGLSELDKAGFIKRQLVETRQITKHVAQILDSRMNTKYDENDKLIREVKVITLKSKLVSDFRKDFQFYKVREINNYHHAHDAYLNAVVGTALIKKYPKLESEFVYGDYKVYDVRKMIAKSEQEIGKATAKYFFYSNIMNFFKTEITLANGEIRKRPLIETNGETGEIVWDKGRDFATVRKVLSMPQVNIVKKTEVQTGGFSKESILPKRNSDKLIARKKDWDPKKYGGFDSPTVAYSVLVVAKVEKGKSKKLKSVKELLGITIMERSSFEKNPIDFLEAKGYKEVKKDLIIKLPKYSLFELENGRKRMLASAGELQKGNELALPSKYVNFLYLASHYEKLKGSPEDNEQKQLFVEQHKHYLDEIIEQISEFSKRVILADANLDKVLSAYNKHRDKPIREQAENIIHLFTLTNLGAPAAFKYFDTTIDRKRYTSTKEVLDATLIHQSITGLYETRIDLSQLGGDGGGGSGGGPAPGGMNPLQLLQPLPAEIKGTKLLAHWNSGATITCIPESFLEDEQPIKKTLIKTIHGEKQQNVYYVTFKVKGRKVEAEVIASPYEYILLSPTDVPWLTQQPLQLTILVPLQEYQEKILSKTALPEDQKQQLKTLFVKYDNLWQHWENQVGHRKIRPHNIATGDYPPRPQKQYPINPKAKPSIQIVIDDLLKQGVLTPQNSTMNTPVYPVPKPDGRWRMVLDYREVNKTIPLTAAQNQHSAGILATIVRQKYKTTLDLANGFWAHPITPESYWLTAFTWQGKQYCWTRLPQGFLNSPALFTADVVDLLKEIPNVQVYVDDIYLSHDDPKEHVQQLEKVFQILLQAGYVVSLKKSEIGQKTVEFLGFNITKEGRGLTDTFKTKLLNITPPKDLKQLQSILGLLNFARNFIPNFAELVQPLYNLIASAKGKYIEWSEENTKQLNMVIEALNTASNLEERLPEQRLVIKVNTSPSAGYVRYYNETGKKPIMYLNYVFSKAELKFSMLEKLLTTMHKALIKAMDLAMGQEILVYSPIVSMTKIQKTPLPERKALPIRWITWMTYLEDPRIQFHYDKTLPELKHIPDVYTSSQSPVKHPSQYEGVFYTDGSAIKSPDPTKSNNAGMGIVHATYKPEYQVLNQWSIPLGNHTAQMAEIAAVEFACKKALKIPGPVLVITDSFYVAESANKELPYWKSNGFVNNKKKPLKHISKWKSIAECLSMKPDITIQHEKGISLQIPVFILKGNALADKLATQGSYVVNAGKRTADGSEFEKRTADGSEFESPKKKAKVE

SEQ ID NO: 1291 - protein, 2176 aa, synthetic construct
MPAAKRVKLDGGDKKYSIGLDIGTNSVGWAVITDEYKVPSKKFKVLGNTDRHSIKKNLIGALLFDSGETAEATRLKRTARRRYTRRKNRICYLQEIFSNEMAKVDDSFFHRLEESFLVEEDKKHERHPIFGNIVDEVAYHEKYPTIYHLRKKLVDSTDKADLRLIYLALAHMIKFRGHFLIEGDLNPDNSDVDKLFIQLVQTYNQLFEENPINASGVDAKAILSARLSKSRRLENLIAQLPGEKKNGLFGNLIALSLGLTPNFKSNFDLAEDAKLQLSKDTYDDDLDNLLAQIGDQYADLFLAAKNLSDAILLSDILRVNTEITKAPLSASMIKRYDEHHQDLTLLKALVRQQLPEKYKEIFFDQSKNGYAGYIDGGASQEEFYKFIKPILEKMDGTEELLVKLNREDLLRKQRTFDNGSIPHQIHLGELHAILRRQEDFYPFLKDNREKIEKILTFRIPYYVGPLARGNSRFAWMTRKSEETITPWNFEEVVDKGASAQSFIERMTNFDKNLPNEKVLPKHSLLYEYFTVYNELTKVKYVTEGMRKPAFLSGEQKKAIVDLLFKTNRKVTVKQLKEDYFKKIECFDSVEISGVEDRFNASLGTYHDLLKIIKDKDFLDNEENEDILEDIVLTLTLFEDREMIEERLKTYAHLFDDKVMKQLKRRRYTGWGRLSRKLINGIRDKQSGKTILDFLKSDGFANRNFMQLIHDDSLTFKEDIQKAQVSGQGDSLHEHIANLAGSPAIKKGILQTVKVVDELVKVMGRHKPENIVIEMARENQTTQKGQKNSRERMKRIEEGIKELGSQILKEHPVENTQLQNEKLYLYYLQNGRDMYVDQELDINRLSDYDVDHIVPQSFLKDDSIDNKVLTRSDKARGKSDNVPSEEVVKKMKNYWRQLLNAKLITQRKFDNLTKAERGGLSELDKAGFIKRQLVETRQITKHVAQILDSRMNTKYDENDKLIREVKVITLKSKLVSDFRKDFQFYKVREINNYHHAHDAYLNAVVGTALIKKYPKLESEFVYGDYKVYDVRKMIAKSEQEIGKATAKYFFYSNIMNFFKTEITLANGEIRKRPLIETNGETGEIVWDKGRDFATVRKVLSMPQVNIVKKTEVQTGGFSKESILPKRNSDKLIARKKDWDPKKYGGFDSPTVAYSVLVVAKVEKGKSKKLKSVKELLGITIMERSSFEKNPIDFLEAKGYKEVKKDLIIKLPKYSLFELENGRKRMLASAGELQKGNELALPSKYVNFLYLASHYEKLKGSPEDNEQKQLFVEQHKHYLDEIIEQISEFSKRVILADANLDKVLSAYNKHRDKPIREQAENIIHLFTLTNLGAPAAFKYFDTTIDRKRYTSTKEVLDATLIHQSITGLYETRIDLSQLGGDGGPAPGGSEAAAKGGMNPLQLLQPLPAEIKGTKLLAHWNSGATITCIPESFLEDEQPIKKTLIKTIHGEKQQNVYYVTFKVKGRKVEAEVIASPYEYILLSPTDVPWLTQQPLQLTILVPLQEYQEKILSKTALPEDQKQQLKTLFVKYDNLWQHWENQVGHRKIRPHNIATGDYPPRPQKQYPINPKAKPSIQIVIDDLLKQGVLTPQNSTMNTPVYPVPKPDGRWRMVLDYREVNKTIPLTAAQNQHSAGILATIVRQKYKTTLDLANGFWAHPITPESYWLTAFTWQGKQYCWTRLPQGFLNSPALFTADVVDLLKEIPNVQVYVDDIYLSHDDPKEHVQQLEKVFQILLQAGYVVSLKKSEIGQKTVEFLGFNITKEGRGLTDTFKTKLLNITPPKDLKQLQSILGLLNFARNFIPNFAELVQPLYNLIASAKGKYIEWSEENTKQLNMVIEALNTASNLEERLPEQRLVIKVNTSPSAGYVRYYNETGKKPIMYLNYVFSKAELKFSMLEKLLTTMHKALIKAMDLAMGQEILVYSPIVSMTKIQKTPLPERKALPIRWITWMTYLEDPRIQFHYDKTLPELKHIPDVYTSSQSPVKHPSQYEGVFYTDGSAIKSPDPTKSNNAGMGIVHATYKPEYQVLNQWSIPLGNHTAQMAEIAAVEFACKKALKIPGPVLVITDSFYVAESANKELPYWKSNGFVNNKKKPLKHISKWKSIAECLSMKPDITIQHEKGISLQIPVFILKGNALADKLATQGSYVVNAGKRTADGSEFEKRTADGSEFESPKKKAKVE

SEQ ID NO: 1292 - protein, 2173 aa, synthetic construct
MPAAKRVKLDGGDKKYSIGLDIGTNSVGWAVITDEYKVPSKKFKVLGNTDRHSIKKNLIGALLFDSGETAEATRLKRTARRRYTRRKNRICYLQEIFSNEMAKVDDSFFHRLEESFLVEEDKKHERHPIFGNIVDEVAYHEKYPTIYHLRKKLVDSTDKADLRLIYLALAHMIKFRGHFLIEGDLNPDNSDVDKLFIQLVQTYNQLFEENPINASGVDAKAILSARLSKSRRLENLIAQLPGEKKNGLFGNLIALSLGLTPNFKSNFDLAEDAKLQLSKDTYDDDLDNLLAQIGDQYADLFLAAKNLSDAILLSDILRVNTEITKAPLSASMIKRYDEHHQDLTLLKALVRQQLPEKYKEIFFDQSKNGYAGYIDGGASQEEFYKFIKPILEKMDGTEELLVKLNREDLLRKQRTFDNGSIPHQIHLGELHAILRRQEDFYPFLKDNREKIEKILTFRIPYYVGPLARGNSRFAWMTRKSEETITPWNFEEVVDKGASAQSFIERMTNFDKNLPNEKVLPKHSLLYEYFTVYNELTKVKYVTEGMRKPAFLSGEQKKAIVDLLFKTNRKVTVKQLKEDYFKKIECFDSVEISGVEDRFNASLGTYHDLLKIIKDKDFLDNEENEDILEDIVLTLTLFEDREMIEERLKTYAHLFDDKVMKQLKRRRYTGWGRLSRKLINGIRDKQSGKTILDFLKSDGFANRNFMQLIHDDSLTFKEDIQKAQVSGQGDSLHEHIANLAGSPAIKKGILQTVKVVDELVKVMGRHKPENIVIEMARENQTTQKGQKNSRERMKRIEEGIKELGSQILKEHPVENTQLQNEKLYLYYLQNGRDMYVDQELDINRLSDYDVDHIVPQSFLKDDSIDNKVLTRSDKARGKSDNVPSEEVVKKMKNYWRQLLNAKLITQRKFDNLTKAERGGLSELDKAGFIKRQLVETRQITKHVAQILDSRMNTKYDENDKLIREVKVITLKSKLVSDFRKDFQFYKVREINNYHHAHDAYLNAVVGTALIKKYPKLESEFVYGDYKVYDVRKMIAKSEQEIGKATAKYFFYSNIMNFFKTEITLANGEIRKRPLIETNGETGEIVWDKGRDFATVRKVLSMPQVNIVKKTEVQTGGFSKESILPKRNSDKLIARKKDWDPKKYGGFDSPTVAYSVLVVAKVEKGKSKKLKSVKELLGITIMERSSFEKNPIDFLEAKGYKEVKKDLIIKLPKYSLFELENGRKRMLASAGELQKGNELALPSKYVNFLYLASHYEKLKGSPEDNEQKQLFVEQHKHYLDEIIEQISEFSKRVILADANLDKVLSAYNKHRDKPIREQAENIIHLFTLTNLGAPAAFKYFDTTIDRKRYTSTKEVLDATLIHQSITGLYETRIDLSQLGGDGGGSSEAAAKGGMNPLQLLQPLPAEIKGTKLLAHWNSGATITCIPESFLEDEQPIKKTLIKTIHGEKQQNVYYVTFKVKGRKVEAEVIASPYEYILLSPTDVPWLTQQPLQLTILVPLQEYQEKILSKTALPEDQKQQLKTLFVKYDNLWQHWENQVGHRKIRPHNIATGDYPPRPQKQYPINPKAKPSIQIVIDDLLKQGVLTPQNSTMNTPVYPVPKPDGRWRMVLDYREVNKTIPLTAAQNQHSAGILATIVRQKYKTTLDLANGFWAHPITPESYWLTAFTWQGKQYCWTRLPQGFLNSPALFTADVVDLLKEIPNVQVYVDDIYLSHDDPKEHVQQLEKVFQILLQAGYVVSLKKSEIGQKTVEFLGFNITKEGRGLTDTFKTKLLNITPPKDLKQLQSILGLLNFARNFIPNFAELVQPLYNLIASAKGKYIEWSEENTKQLNMVIEALNTASNLEERLPEQRLVIKVNTSPSAGYVRYYNETGKKPIMYLNYVFSKAELKFSMLEKLLTTMHKALIKAMDLAMGQEILVYSPIVSMTKIQKTPLPERKALPIRWITWMTYLEDPRIQFHYDKTLPELKHIPDVYTSSQSPVKHPSQYEGVFYTDGSAIKSPDPTKSNNAGMGIVHATYKPEYQVLNQWSIPLGNHTAQMAEIAAVEFACKKALKIPGPVLVITDSFYVAESANKELPYWKSNGFVNNKKKPLKHISKWKSIAECLSMKPDITIQHEKGISLQIPVFILKGNALADKLATQGSYVVNAGKRTADGSEFEKRTADGSEFESPKKKAKVE

SEQ ID NO: 1293 - protein, 2176 aa, synthetic construct
MPAAKRVKLDGGDKKYSIGLDIGTNSVGWAVITDEYKVPSKKFKVLGNTDRHSIKKNLIGALLFDSGETAEATRLKRTARRRYTRRKNRICYLQEIFSNEMAKVDDSFFHRLEESFLVEEDKKHERHPIFGNIVDEVAYHEKYPTIYHLRKKLVDSTDKADLRLIYLALAHMIKFRGHFLIEGDLNPDNSDVDKLFIQLVQTYNQLFEENPINASGVDAKAILSARLSKSRRLENLIAQLPGEKKNGLFGNLIALSLGLTPNFKSNFDLAEDAKLQLSKDTYDDDLDNLLAQIGDQYADLFLAAKNLSDAILLSDILRVNTEITKAPLSASMIKRYDEHHQDLTLLKALVRQQLPEKYKEIFFDQSKNGYAGYIDGGASQEEFYKFIKPILEKMDGTEELLVKLNREDLLRKQRTFDNGSIPHQIHLGELHAILRRQEDFYPFLKDNREKIEKILTFRIPYYVGPLARGNSRFAWMTRKSEETITPWNFEEVVDKGASAQSFIERMTNFDKNLPNEKVLPKHSLLYEYFTVYNELTKVKYVTEGMRKPAFLSGEQKKAIVDLLFKTNRKVTVKQLKEDYFKKIECFDSVEISGVEDRFNASLGTYHDLLKIIKDKDFLDNEENEDILEDIVLTLTLFEDREMIEERLKTYAHLFDDKVMKQLKRRRYTGWGRLSRKLINGIRDKQSGKTILDFLKSDGFANRNFMQLIHDDSLTFKEDIQKAQVSGQGDSLHEHIANLAGSPAIKKGILQTVKVVDELVKVMGRHKPENIVIEMARENQTTQKGQKNSRERMKRIEEGIKELGSQILKEHPVENTQLQNEKLYLYYLQNGRDMYVDQELDINRLSDYDVDHIVPQSFLKDDSIDNKVLTRSDKARGKSDNVPSEEVVKKMKNYWRQLLNAKLITQRKFDNLTKAERGGLSELDKAGFIKRQLVETRQITKHVAQILDSRMNTKYDENDKLIREVKVITLKSKLVSDFRKDFQFYKVREINNYHHAHDAYLNAVVGTALIKKYPKLESEFVYGDYKVYDVRKMIAKSEQEIGKATAKYFFYSNIMNFFKTEITLANGEIRKRPLIETNGETGEIVWDKGRDFATVRKVLSMPQVNIVKKTEVQTGGFSKESILPKRNSDKLIARKKDWDPKKYGGFDSPTVAYSVLVVAKVEKGKSKKLKSVKELLGITIMERSSFEKNPIDFLEAKGYKEVKKDLIIKLPKYSLFELENGRKRMLASAGELQKGNELALPSKYVNFLYLASHYEKLKGSPEDNEQKQLFVEQHKHYLDEIIEQISEFSKRVILADANLDKVLSAYNKHRDKPIREQAENIIHLFTLTNLGAPAAFKYFDTTIDRKRYTSTKEVLDATLIHQSITGLYETRIDLSQLGGDGGGGSGSSEAAAKGGMNPLQLLQPLPAEIKGTKLLAHWNSGATITCIPESFLEDEQPIKKTLIKTIHGEKQQNVYYVTFKVKGRKVEAEVIASPYEYILLSPTDVPWLTQQPLQLTILVPLQEYQEKILSKTALPEDQKQQLKTLFVKYDNLWQHWENQVGHRKIRPHNIATGDYPPRPQKQYPINPKAKPSIQIVIDDLLKQGVLTPQNSTMNTPVYPVPKPDGRWRMVLDYREVNKTIPLTAAQNQHSAGILATIVRQKYKTTLDLANGFWAHPITPESYWLTAFTWQGKQYCWTRLPQGFLNSPALFTADVVDLLKEIPNVQVYVDDIYLSHDDPKEHVQQLEKVFQILLQAGYVVSLKKSEIGQKTVEFLGFNITKEGRGLTDTFKTKLLNITPPKDLKQLQSILGLLNFARNFIPNFAELVQPLYNLIASAKGKYIEWSEENTKQLNMVIEALNTASNLEERLPEQRLVIKVNTSPSAGYVRYYNETGKKPIMYLNYVFSKAELKFSMLEKLLTTMHKALIKAMDLAMGQEILVYSPIVSMTKIQKTPLPERKALPIRWITWMTYLEDPRIQFHYDKTLPELKHIPDVYTSSQSPVKHPSQYEGVFYTDGSAIKSPDPTKSNNAGMGIVHATYKPEYQVLNQWSIPLGNHTAQMAEIAAVEFACKKALKIPGPVLVITDSFYVAESANKELPYWKSNGFVNNKKKPLKHISKWKSIAECLSMKPDITIQHEKGISLQIPVFILKGNALADKLATQGSYVVNAGKRTADGSEFEKRTADGSEFESPKKKAKVE

SEQ ID NO: 1294 - protein, 2171 aa, synthetic construct
MPAAKRVKLDGGDKKYSIGLDIGTNSVGWAVITDEYKVPSKKFKVLGNTDRHSIKKNLIGALLFDSGETAEATRLKRTARRRYTRRKNRICYLQEIFSNEMAKVDDSFFHRLEESFLVEEDKKHERHPIFGNIVDEVAYHEKYPTIYHLRKKLVDSTDKADLRLIYLALAHMIKFRGHFLIEGDLNPDNSDVDKLFIQLVQTYNQLFEENPINASGVDAKAILSARLSKSRRLENLIAQLPGEKKNGLFGNLIALSLGLTPNFKSNFDLAEDAKLQLSKDTYDDDLDNLLAQIGDQYADLFLAAKNLSDAILLSDILRVNTEITKAPLSASMIKRYDEHHQDLTLLKALVRQQLPEKYKEIFFDQSKNGYAGYIDGGASQEEFYKFIKPILEKMDGTEELLVKLNREDLLRKQRTFDNGSIPHQIHLGELHAILRRQEDFYPFLKDNREKIEKILTFRIPYYVGPLARGNSRFAWMTRKSEETITPWNFEEVVDKGASAQSFIERMTNFDKNLPNEKVLPKHSLLYEYFTVYNELTKVKYVTEGMRKPAFLSGEQKKAIVDLLFKTNRKVTVKQLKEDYFKKIECFDSVEISGVEDRFNASLGTYHDLLKIIKDKDFLDNEENEDILEDIVLTLTLFEDREMIEERLKTYAHLFDDKVMKQLKRRRYTGWGRLSRKLINGIRDKQSGKTILDFLKSDGFANRNFMQLIHDDSLTFKEDIQKAQVSGQGDSLHEHIANLAGSPAIKKGILQTVKVVDELVKVMGRHKPENIVIEMARENQTTQKGQKNSRERMKRIEEGIKELGSQILKEHPVENTQLQNEKLYLYYLQNGRDMYVDQELDINRLSDYDVDHIVPQSFLKDDSIDNKVLTRSDKARGKSDNVPSEEVVKKMKNYWRQLLNAKLITQRKFDNLTKAERGGLSELDKAGFIKRQLVETRQITKHVAQILDSRMNTKYDENDKLIREVKVITLKSKLVSDFRKDFQFYKVREINNYHHAHDAYLNAVVGTALIKKYPKLESEFVYGDYKVYDVRKMIAKSEQEIGKATAKYFFYSNIMNFFKTEITLANGEIRKRPLIETNGETGEIVWDKGRDFATVRKVLSMPQVNIVKKTEVQTGGFSKESILPKRNSDKLIARKKDWDPKKYGGFDSPTVAYSVLVVAKVEKGKSKKLKSVKELLGITIMERSSFEKNPIDFLEAKGYKEVKKDLIIKLPKYSLFELENGRKRMLASAGELQKGNELALPSKYVNFLYLASHYEKLKGSPEDNEQKQLFVEQHKHYLDEIIEQISEFSKRVILADANLDKVLSAYNKHRDKPIREQAENIIHLFTLTNLGAPAAFKYFDTTIDRKRYTSTKEVLDATLIHQSITGLYETRIDLSQLGGDGGGGSGGSGGMNPLQLLQPLPAEIKGTKLLAHWNSGATITCIPESFLEDEQPIKKTLIKTIHGEKQQNVYYVTFKVKGRKVEAEVIASPYEYILLSPTDVPWLTQQPLQLTILVPLQEYQEKILSKTALPEDQKQQLKTLFVKYDNLWQHWENQVGHRKIRPHNIATGDYPPRPQKQYPINPKAKPSIQIVIDDLLKQGVLTPQNSTMNTPVYPVPKPDGRWRMVLDYREVNKTIPLTAAQNQHSAGILATIVRQKYKTTLDLANGFWAHPITPESYWLTAFTWQGKQYCWTRLPQGFLNSPALFTADVVDLLKEIPNVQVYVDDIYLSHDDPKEHVQQLEKVFQILLQAGYVVSLKKSEIGQKTVEFLGFNITKEGRGLTDTFKTKLLNITPPKDLKQLQSILGLLNFARNFIPNFAELVQPLYNLIASAKGKYIEWSEENTKQLNMVIEALNTASNLEERLPEQRLVIKVNTSPSAGYVRYYNETGKKPIMYLNYVFSKAELKFSMLEKLLTTMHKALIKAMDLAMGQEILVYSPIVSMTKIQKTPLPERKALPIRWITWMTYLEDPRIQFHYDKTLPELKHIPDVYTSSQSPVKHPSQYEGVFYTDGSAIKSPDPTKSNNAGMGIVHATYKPEYQVLNQWSIPLGNHTAQMAEIAAVEFACKKALKIPGPVLVITDSFYVAESANKELPYWKSNGFVNNKKKPLKHISKWKSIAECLSMKPDITIQHEKGISLQIPVFILKGNALADKLATQGSYVVNAGKRTADGSEFEKRTADGSEFESPKKKAKVE

SEQ ID NO: 1295 - protein, 2084 aa, synthetic construct
MPAAKRVKLDGGDKKYSIGLDIGTNSVGWAVITDEYKVPSKKFKVLGNTDRHSIKKNLIGALLFDSGETAEATRLKRTARRRYTRRKNRICYLQEIFSNEMAKVDDSFFHRLEESFLVEEDKKHERHPIFGNIVDEVAYHEKYPTIYHLRKKLVDSTDKADLRLIYLALAHMIKFRGHFLIEGDLNPDNSDVDKLFIQLVQTYNQLFEENPINASGVDAKAILSARLSKSRRLENLIAQLPGEKKNGLFGNLIALSLGLTPNFKSNFDLAEDAKLQLSKDTYDDDLDNLLAQIGDQYADLFLAAKNLSDAILLSDILRVNTEITKAPLSASMIKRYDEHHQDLTLLKALVRQQLPEKYKEIFFDQSKNGYAGYIDGGASQEEFYKFIKPILEKMDGTEELLVKLNREDLLRKQRTFDNGSIPHQIHLGELHAILRRQEDFYPFLKDNREKIEKILTFRIPYYVGPLARGNSRFAWMTRKSEETITPWNFEEVVDKGASAQSFIERMTNFDKNLPNEKVLPKHSLLYEYFTVYNELTKVKYVTEGMRKPAFLSGEQKKAIVDLLFKTNRKVTVKQLKEDYFKKIECFDSVEISGVEDRFNASLGTYHDLLKIIKDKDFLDNEENEDILEDIVLTLTLFEDREMIEERLKTYAHLFDDKVMKQLKRRRYTGWGRLSRKLINGIRDKQSGKTILDFLKSDGFANRNFMQLIHDDSLTFKEDIQKAQVSGQGDSLHEHIANLAGSPAIKKGILQTVKVVDELVKVMGRHKPENIVIEMARENQTTQKGQKNSRERMKRIEEGIKELGSQILKEHPVENTQLQNEKLYLYYLQNGRDMYVDQELDINRLSDYDVDHIVPQSFLKDDSIDNKVLTRSDKARGKSDNVPSEEVVKKMKNYWRQLLNAKLITQRKFDNLTKAERGGLSELDKAGFIKRQLVETRQITKHVAQILDSRMNTKYDENDKLIREVKVITLKSKLVSDFRKDFQFYKVREINNYHHAHDAYLNAVVGTALIKKYPKLESEFVYGDYKVYDVRKMIAKSEQEIGKATAKYFFYSNIMNFFKTEITLANGEIRKRPLIETNGETGEIVWDKGRDFATVRKVLSMPQVNIVKKTEVQTGGFSKESILPKRNSDKLIARKKDWDPKKYGGFDSPTVAYSVLVVAKVEKGKSKKLKSVKELLGITIMERSSFEKNPIDFLEAKGYKEVKKDLIIKLPKYSLFELENGRKRMLASAGELQKGNELALPSKYVNFLYLASHYEKLKGSPEDNEQKQLFVEQHKHYLDEIIEQISEFSKRVILADANLDKVLSAYNKHRDKPIREQAENIIHLFTLTNLGAPAAFKYFDTTIDRKRYTSTKEVLDATLIHQSITGLYETRIDLSQLGGDGGEAAAKPAPGGVPWLTQQPLQLTILVPLQEYQEKILSKTALPEDQKQQLKTLFVKYDNLWQHWENQVGHRKIRPHNIATGDYPPRPQKQYPINPKAKPSIQIVIDDLLKQGVLTPQNSTMNTPVYPVPKPDGRWRMVLDYREVNKTIPLTAAQNQHSAGILATIVRQKYKTTLDLANGFWAHPITPESYWLTAFTWQGKQYCWTRLPQGFLNSPALFTADVVDLLKEIPNVQVYVDDIYLSHDDPKEHVQQLEKVFQILLQAGYVVSLKKSEIGQKTVEFLGFNITKEGRGLTDTFKTKLLNITPPKDLKQLQSILGLLNFARNFIPNFAELVQPLYNLIASAKGKYIEWSEENTKQLNMVIEALNTASNLEERLPEQRLVIKVNTSPSAGYVRYYNETGKKPIMYLNYVFSKAELKFSMLEKLLTTMHKALIKAMDLAMGQEILVYSPIVSMTKIQKTPLPERKALPIRWITWMTYLEDPRIQFHYDKTLPELKHIPDVYTSSQSPVKHPSQYEGVFYTDGSAIKSPDPTKSNNAGMGIVHATYKPEYQVLNQWSIPLGNHTAQMAEIAAVEFACKKALKIPGPVLVITDSFYVAESANKELPYWKSNGFVNNKKKPLKHISKWKSIAECLSMKPDITIQHEKGISLQIPVFILKGNALADKLATQGSYVVNAGKRTADGSEFEKRTADGSEFESPKKKAKVE

SEQ ID NO: 1296 - protein, 2087 aa, synthetic construct
MPAAKRVKLDGGDKKYSIGLDIGTNSVGWAVITDEYKVPSKKFKVLGNTDRHSIKKNLIGALLFDSGETAEATRLKRTARRRYTRRKNRICYLQEIFSNEMAKVDDSFFHRLEESFLVEEDKKHERHPIFGNIVDEVAYHEKYPTIYHLRKKLVDSTDKADLRLIYLALAHMIKFRGHFLIEGDLNPDNSDVDKLFIQLVQTYNQLFEENPINASGVDAKAILSARLSKSRRLENLIAQLPGEKKNGLFGNLIALSLGLTPNFKSNFDLAEDAKLQLSKDTYDDDLDNLLAQIGDQYADLFLAAKNLSDAILLSDILRVNTEITKAPLSASMIKRYDEHHQDLTLLKALVRQQLPEKYKEIFFDQSKNGYAGYIDGGASQEEFYKFIKPILEKMDGTEELLVKLNREDLLRKQRTFDNGSIPHQIHLGELHAILRRQEDFYPFLKDNREKIEKILTFRIPYYVGPLARGNSRFAWMTRKSEETITPWNFEEVVDKGASAQSFIERMTNFDKNLPNEKVLPKHSLLYEYFTVYNELTKVKYVTEGMRKPAFLSGEQKKAIVDLLFKTNRKVTVKQLKEDYFKKIECFDSVEISGVEDRFNASLGTYHDLLKIIKDKDFLDNEENEDILEDIVLTLTLFEDREMIEERLKTYAHLFDDKVMKQLKRRRYTGWGRLSRKLINGIRDKQSGKTILDFLKSDGFANRNFMQLIHDDSLTFKEDIQKAQVSGQGDSLHEHIANLAGSPAIKKGILQTVKVVDELVKVMGRHKPENIVIEMARENQTTQKGQKNSRERMKRIEEGIKELGSQILKEHPVENTQLQNEKLYLYYLQNGRDMYVDQELDINRLSDYDVDHIVPQSFLKDDSIDNKVLTRSDKARGKSDNVPSEEVVKKMKNYWRQLLNAKLITQRKFDNLTKAERGGLSELDKAGFIKRQLVETRQITKHVAQILDSRMNTKYDENDKLIREVKVITLKSKLVSDFRKDFQFYKVREINNYHHAHDAYLNAVVGTALIKKYPKLESEFVYGDYKVYDVRKMIAKSEQEIGKATAKYFFYSNIMNFFKTEITLANGEIRKRPLIETNGETGEIVWDKGRDFATVRKVLSMPQVNIVKKTEVQTGGFSKESILPKRNSDKLIARKKDWDPKKYGGFDSPTVAYSVLVVAKVEKGKSKKLKSVKELLGITIMERSSFEKNPIDFLEAKGYKEVKKDLIIKLPKYSLFELENGRKRMLASAGELQKGNELALPSKYVNFLYLASHYEKLKGSPEDNEQKQLFVEQHKHYLDEIIEQISEFSKRVILADANLDKVLSAYNKHRDKPIREQAENIIHLFTLTNLGAPAAFKYFDTTIDRKRYTSTKEVLDATLIHQSITGLYETRIDLSQLGGDGGEAAAKGSSGGSGGVPWLTQQPLQLTILVPLQEYQEKILSKTALPEDQKQQLKTLFVKYDNLWQHWENQVGHRKIRPHNIATGDYPPRPQKQYPINPKAKPSIQIVIDDLLKQGVLTPQNSTMNTPVYPVPKPDGRWRMVLDYREVNKTIPLTAAQNQHSAGILATIVRQKYKTTLDLANGFWAHPITPESYWLTAFTWQGKQYCWTRLPQGFLNSPALFTADVVDLLKEIPNVQVYVDDIYLSHDDPKEHVQQLEKVFQILLQAGYVVSLKKSEIGQKTVEFLGFNITKEGRGLTDTFKTKLLNITPPKDLKQLQSILGLLNFARNFIPNFAELVQPLYNLIASAKGKYIEWSEENTKQLNMVIEALNTASNLEERLPEQRLVIKVNTSPSAGYVRYYNETGKKPIMYLNYVFSKAELKFSMLEKLLTTMHKALIKAMDLAMGQEILVYSPIVSMTKIQKTPLPERKALPIRWITWMTYLEDPRIQFHYDKTLPELKHIPDVYTSSQSPVKHPSQYEGVFYTDGSAIKSPDPTKSNNAGMGIVHATYKPEYQVLNQWSIPLGNHTAQMAEIAAVEFACKKALKIPGPVLVITDSFYVAESANKELPYWKSNGFVNNKKKPLKHISKWKSIAECLSMKPDITIQHEKGISLQIPVFILKGNALADKLATQGSYVVNAGKRTADGSEFEKRTADGSEFESPKKKAKVE

SEQ ID NO: 1297 - protein, 2094 aa, synthetic construct
MPAAKRVKLDGGDKKYSIGLDIGTNSVGWAVITDEYKVPSKKFKVLGNTDRHSIKKNLIGALLFDSGETAEATRLKRTARRRYTRRKNRICYLQEIFSNEMAKVDDSFFHRLEESFLVEEDKKHERHPIFGNIVDEVAYHEKYPTIYHLRKKLVDSTDKADLRLIYLALAHMIKFRGHFLIEGDLNPDNSDVDKLFIQLVQTYNQLFEENPINASGVDAKAILSARLSKSRRLENLIAQLPGEKKNGLFGNLIALSLGLTPNFKSNFDLAEDAKLQLSKDTYDDDLDNLLAQIGDQYADLFLAAKNLSDAILLSDILRVNTEITKAPLSASMIKRYDEHHQDLTLLKALVRQQLPEKYKEIFFDQSKNGYAGYIDGGASQEEFYKFIKPILEKMDGTEELLVKLNREDLLRKQRTFDNGSIPHQIHLGELHAILRRQEDFYPFLKDNREKIEKILTFRIPYYVGPLARGNSRFAWMTRKSEETITPWNFEEVVDKGASAQSFIERMTNFDKNLPNEKVLPKHSLLYEYFTVYNELTKVKYVTEGMRKPAFLSGEQKKAIVDLLFKTNRKVTVKQLKEDYFKKIECFDSVEISGVEDRFNASLGTYHDLLKIIKDKDFLDNEENEDILEDIVLTLTLFEDREMIEERLKTYAHLFDDKVMKQLKRRRYTGWGRLSRKLINGIRDKQSGKTILDFLKSDGFANRNFMQLIHDDSLTFKEDIQKAQVSGQGDSLHEHIANLAGSPAIKKGILQTVKVVDELVKVMGRHKPENIVIEMARENQTTQKGQKNSRERMKRIEEGIKELGSQILKEHPVENTQLQNEKLYLYYLQNGRDMYVDQELDINRLSDYDVDHIVPQSFLKDDSIDNKVLTRSDKARGKSDNVPSEEVVKKMKNYWRQLLNAKLITQRKFDNLTKAERGGLSELDKAGFIKRQLVETRQITKHVAQILDSRMNTKYDENDKLIREVKVITLKSKLVSDFRKDFQFYKVREINNYHHAHDAYLNAVVGTALIKKYPKLESEFVYGDYKVYDVRKMIAKSEQEIGKATAKYFFYSNIMNFFKTEITLANGEIRKRPLIETNGETGEIVWDKGRDFATVRKVLSMPQVNIVKKTEVQTGGFSKESILPKRNSDKLIARKKDWDPKKYGGFDSPTVAYSVLVVAKVEKGKSKKLKSVKELLGITIMERSSFEKNPIDFLEAKGYKEVKKDLIIKLPKYSLFELENGRKRMLASAGELQKGNELALPSKYVNFLYLASHYEKLKGSPEDNEQKQLFVEQHKHYLDEIIEQISEFSKRVILADANLDKVLSAYNKHRDKPIREQAENIIHLFTLTNLGAPAAFKYFDTTIDRKRYTSTKEVLDATLIHQSITGLYETRIDLSQLGGDGGGSSGSSGSSGSSGSSGSSGGVPWLTQQPLQLTILVPLQEYQEKILSKTALPEDQKQQLKTLFVKYDNLWQHWENQVGHRKIRPHNIATGDYPPRPQKQYPINPKAKPSIQIVIDDLLKQGVLTPQNSTMNTPVYPVPKPDGRWRMVLDYREVNKTIPLTAAQNQHSAGILATIVRQKYKTTLDLANGFWAHPITPESYWLTAFTWQGKQYCWTRLPQGFLNSPALFTADVVDLLKEIPNVQVYVDDIYLSHDDPKEHVQQLEKVFQILLQAGYVVSLKKSEIGQKTVEFLGFNITKEGRGLTDTFKTKLLNITPPKDLKQLQSILGLLNFARNFIPNFAELVQPLYNLIASAKGKYIEWSEENTKQLNMVIEALNTASNLEERLPEQRLVIKVNTSPSAGYVRYYNETGKKPIMYLNYVFSKAELKFSMLEKLLTTMHKALIKAMDLAMGQEILVYSPIVSMTKIQKTPLPERKALPIRWITWMTYLEDPRIQFHYDKTLPELKHIPDVYTSSQSPVKHPSQYEGVFYTDGSAIKSPDPTKSNNAGMGIVHATYKPEYQVLNQWSIPLGNHTAQMAEIAAVEFACKKALKIPGPVLVITDSFYVAESANKELPYWKSNGFVNNKKKPLKHISKWKSIAECLSMKPDITIQHEKGISLQIPVFILKGNALADKLATQGSYVVNAGKRTADGSEFEKRTADGSEFESPKKKAKVE

SEQ ID NO: 1298 - protein, 2122 aa, synthetic construct
MPAAKRVKLDGGDKKYSIGLDIGTNSVGWAVITDEYKVPSKKFKVLGNTDRHSIKKNLIGALLFDSGETAEATRLKRTARRRYTRRKNRICYLQEIFSNEMAKVDDSFFHRLEESFLVEEDKKHERHPIFGNIVDEVAYHEKYPTIYHLRKKLVDSTDKADLRLIYLALAHMIKFRGHFLIEGDLNPDNSDVDKLFIQLVQTYNQLFEENPINASGVDAKAILSARLSKSRRLENLIAQLPGEKKNGLFGNLIALSLGLTPNFKSNFDLAEDAKLQLSKDTYDDDLDNLLAQIGDQYADLFLAAKNLSDAILLSDILRVNTEITKAPLSASMIKRYDEHHQDLTLLKALVRQQLPEKYKEIFFDQSKNGYAGYIDGGASQEEFYKFIKPILEKMDGTEELLVKLNREDLLRKQRTFDNGSIPHQIHLGELHAILRRQEDFYPFLKDNREKIEKILTFRIPYYVGPLARGNSRFAWMTRKSEETITPWNFEEVVDKGASAQSFIERMTNFDKNLPNEKVLPKHSLLYEYFTVYNELTKVKYVTEGMRKPAFLSGEQKKAIVDLLFKTNRKVTVKQLKEDYFKKIECFDSVEISGVEDRFNASLGTYHDLLKIIKDKDFLDNEENEDILEDIVLTLTLFEDREMIEERLKTYAHLFDDKVMKQLKRRRYTGWGRLSRKLINGIRDKQSGKTILDFLKSDGFANRNFMQLIHDDSLTFKEDIQKAQVSGQGDSLHEHIANLAGSPAIKKGILQTVKVVDELVKVMGRHKPENIVIEMARENQTTQKGQKNSRERMKRIEEGIKELGSQILKEHPVENTQLQNEKLYLYYLQNGRDMYVDQELDINRLSDYDVDHIVPQSFLKDDSIDNKVLTRSDKARGKSDNVPSEEVVKKMKNYWRQLLNAKLITQRKFDNLTKAERGGLSELDKAGFIKRQLVETRQITKHVAQILDSRMNTKYDENDKLIREVKVITLKSKLVSDFRKDFQFYKVREINNYHHAHDAYLNAVVGTALIKKYPKLESEFVYGDYKVYDVRKMIAKSEQEIGKATAKYFFYSNIMNFFKTEITLANGEIRKRPLIETNGETGEIVWDKGRDFATVRKVLSMPQVNIVKKTEVQTGGFSKESILPKRNSDKLIARKKDWDPKKYGGFDSPTVAYSVLVVAKVEKGKSKKLKSVKELLGITIMERSSFEKNPIDFLEAKGYKEVKKDLIIKLPKYSLFELENGRKRMLASAGELQKGNELALPSKYVNFLYLASHYEKLKGSPEDNEQKQLFVEQHKHYLDEIIEQISEFSKRVILADANLDKVLSAYNKHRDKPIREQAENIIHLFTLTNLGAPAAFKYFDTTIDRKRYTSTKEVLDATLIHQSITGLYETRIDLSQLGGDGGAEAAAKEAAAKEAAAKEAAAKALEAEAAAKEAAAKEAAAKEAAAKAGGVPWLTQQPLQLTILVPLQEYQEKILSKTALPEDQKQQLKTLFVKYDNLWQHWENQVGHRKIRPHNIATGDYPPRPQKQYPINPKAKPSIQIVIDDLLKQGVLTPQNSTMNTPVYPVPKPDGRWRMVLDYREVNKTIPLTAAQNQHSAGILATIVRQKYKTTLDLANGFWAHPITPESYWLTAFTWQGKQYCWTRLPQGFLNSPALFNADVVDLLKEIPNVQVYVDDIYLSHDDPKEHVQQLEKVFQILLQAGYVVSLKKSEIGQKTVEFLGFNITKEGRGLTDTFKTKLLNITPPKDLKQLQSILGLLNFARNFIPNFAELVQPLYNLIAPAKGKYIEWSEENTKQLNMVIEALNTASNLEERLPEQRLVIKVNTSPSAGYVRYYNETGKKPIMYLNYVFSKAELKFSMLEKLLTTMHKALIKAMDLAMGQEILVYSPIVSMTKIQKTPLPERKALPIRWITWMTYLEDPRIQFHYDKTLPELKHIPDVYTSSQSPVKHPSQYEGVFYTDGSAIKSPDPTKSNNAGMGIVHATYKPEYQVLNQWSIPLGNHTAQMAEIAAVEFACKKALKIPGPVLVITDSFYVAESANKELPYWKSNGFVNNKKKPLKHISKWKSIAECLSMKPDITIQHEKGISLQIPVFILKGNALADKLATQGSYVVNAGKRTADGSEFEKRTADGSEFESPKKKAKVE

SEQ ID NO: 1299 - protein, 2096 aa, synthetic construct
MPAAKRVKLDGGDKKYSIGLDIGTNSVGWAVITDEYKVPSKKFKVLGNTDRHSIKKNLIGALLFDSGETAEATRLKRTARRRYTRRKNRICYLQEIFSNEMAKVDDSFFHRLEESFLVEEDKKHERHPIFGNIVDEVAYHEKYPTIYHLRKKLVDSTDKADLRLIYLALAHMIKFRGHFLIEGDLNPDNSDVDKLFIQLVQTYNQLFEENPINASGVDAKAILSARLSKSRRLENLIAQLPGEKKNGLFGNLIALSLGLTPNFKSNFDLAEDAKLQLSKDTYDDDLDNLLAQIGDQYADLFLAAKNLSDAILLSDILRVNTEITKAPLSASMIKRYDEHHQDLTLLKALVRQQLPEKYKEIFFDQSKNGYAGYIDGGASQEEFYKFIKPILEKMDGTEELLVKLNREDLLRKQRTFDNGSIPHQIHLGELHAILRRQEDFYPFLKDNREKIEKILTFRIPYYVGPLARGNSRFAWMTRKSEETITPWNFEEVVDKGASAQSFIERMTNFDKNLPNEKVLPKHSLLYEYFTVYNELTKVKYVTEGMRKPAFLSGEQKKAIVDLLFKTNRKVTVKQLKEDYFKKIECFDSVEISGVEDRFNASLGTYHDLLKIIKDKDFLDNEENEDILEDIVLTLTLFEDREMIEERLKTYAHLFDDKVMKQLKRRRYTGWGRLSRKLINGIRDKQSGKTILDFLKSDGFANRNFMQLIHDDSLTFKEDIQKAQVSGQGDSLHEHIANLAGSPAIKKGILQTVKVVDELVKVMGRHKPENIVIEMARENQTTQKGQKNSRERMKRIEEGIKELGSQILKEHPVENTQLQNEKLYLYYLQNGRDMYVDQELDINRLSDYDVDHIVPQSFLKDDSIDNKVLTRSDKARGKSDNVPSEEVVKKMKNYWRQLLNAKLITQRKFDNLTKAERGGLSELDKAGFIKRQLVETRQITKHVAQILDSRMNTKYDENDKLIREVKVITLKSKLVSDFRKDFQFYKVREINNYHHAHDAYLNAVVGTALIKKYPKLESEFVYGDYKVYDVRKMIAKSEQEIGKATAKYFFYSNIMNFFKTEITLANGEIRKRPLIETNGETGEIVWDKGRDFATVRKVLSMPQVNIVKKTEVQTGGFSKESILPKRNSDKLIARKKDWDPKKYGGFDSPTVAYSVLVVAKVEKGKSKKLKSVKELLGITIMERSSFEKNPIDFLEAKGYKEVKKDLIIKLPKYSLFELENGRKRMLASAGELQKGNELALPSKYVNFLYLASHYEKLKGSPEDNEQKQLFVEQHKHYLDEIIEQISEFSKRVILADANLDKVLSAYNKHRDKPIREQAENIIHLFTLTNLGAPAAFKYFDTTIDRKRYTSTKEVLDATLIHQSITGLYETRIDLSQLGGDGGGGGGSGGGGSGGGGSGGGGSGGVPWLTQQPLQLTILVPLQEYQEKILSKTALPEDQKQQLKTLFVKYDNLWQHWENQVGHRKIRPHNIATGDYPPRPQKQYPINPKAKPSIQIVIDDLLKQGVLTPQNSTMNTPVYPVPKPDGRWRMVLDYREVNKTIPLTAAQNQHSAGILATIVRQKYKTTLDLANGFWAHPITPESYWLTAFTWQGKQYCWTRLPQGFLNSPALFNADVVDLLKEIPNVQVYVDDIYLSHDDPKEHVQQLEKVFQILLQAGYVVSLKKSEIGQKTVEFLGFNITKEGRGLTDTFKTKLLNITPPKDLKQLQSILGLLNFARNFIPNFAELVQPLYNLIAPAKGKYIEWSEENTKQLNMVIEALNTASNLEERLPEQRLVIKVNTSPSAGYVRYYNETGKKPIMYLNYVFSKAELKFSMLEKLLTTMHKALIKAMDLAMGQEILVYSPIVSMTKIQKTPLPERKALPIRWITWMTYLEDPRIQFHYDKTLPELKHIPDVYTSSQSPVKHPSQYEGVFYTDGSAIKSPDPTKSNNAGMGIVHATYKPEYQVLNQWSIPLGNHTAQMAEIAAVEFACKKALKIPGPVLVITDSFYVAESANKELPYWKSNGFVNNKKKPLKHISKWKSIAECLSMKPDITIQHEKGISLQIPVFILKGNALADKLATQGSYVVNAGKRTADGSEFEKRTADGSEFESPKKKAKVE

SEQ ID NO: 1300 - protein, 2096 aa, synthetic construct
MPAAKRVKLDGGDKKYSIGLDIGTNSVGWAVITDEYKVPSKKFKVLGNTDRHSIKKNLIGALLFDSGETAEATRLKRTARRRYTRRKNRICYLQEIFSNEMAKVDDSFFHRLEESFLVEEDKKHERHPIFGNIVDEVAYHEKYPTIYHLRKKLVDSTDKADLRLIYLALAHMIKFRGHFLIEGDLNPDNSDVDKLFIQLVQTYNQLFEENPINASGVDAKAILSARLSKSRRLENLIAQLPGEKKNGLFGNLIALSLGLTPNFKSNFDLAEDAKLQLSKDTYDDDLDNLLAQIGDQYADLFLAAKNLSDAILLSDILRVNTEITKAPLSASMIKRYDEHHQDLTLLKALVRQQLPEKYKEIFFDQSKNGYAGYIDGGASQEEFYKFIKPILEKMDGTEELLVKLNREDLLRKQRTFDNGSIPHQIHLGELHAILRRQEDFYPFLKDNREKIEKILTFRIPYYVGPLARGNSRFAWMTRKSEETITPWNFEEVVDKGASAQSFIERMTNFDKNLPNEKVLPKHSLLYEYFTVYNELTKVKYVTEGMRKPAFLSGEQKKAIVDLLFKTNRKVTVKQLKEDYFKKIECFDSVEISGVEDRFNASLGTYHDLLKIIKDKDFLDNEENEDILEDIVLTLTLFEDREMIEERLKTYAHLFDDKVMKQLKRRRYTGWGRLSRKLINGIRDKQSGKTILDFLKSDGFANRNFMQLIHDDSLTFKEDIQKAQVSGQGDSLHEHIANLAGSPAIKKGILQTVKVVDELVKVMGRHKPENIVIEMARENQTTQKGQKNSRERMKRIEEGIKELGSQILKEHPVENTQLQNEKLYLYYLQNGRDMYVDQELDINRLSDYDVDHIVPQSFLKDDSIDNKVLTRSDKARGKSDNVPSEEVVKKMKNYWRQLLNAKLITQRKFDNLTKAERGGLSELDKAGFIKRQLVETRQITKHVAQILDSRMNTKYDENDKLIREVKVITLKSKLVSDFRKDFQFYKVREINNYHHAHDAYLNAVVGTALIKKYPKLESEFVYGDYKVYDVRKMIAKSEQEIGKATAKYFFYSNIMNFFKTEITLANGEIRKRPLIETNGETGEIVWDKGRDFATVRKVLSMPQVNIVKKTEVQTGGFSKESILPKRNSDKLIARKKDWDPKKYGGFDSPTVAYSVLVVAKVEKGKSKKLKSVKELLGITIMERSSFEKNPIDFLEAKGYKEVKKDLIIKLPKYSLFELENGRKRMLASAGELQKGNELALPSKYVNFLYLASHYEKLKGSPEDNEQKQLFVEQHKHYLDEIIEQISEFSKRVILADANLDKVLSAYNKHRDKPIREQAENIIHLFTLTNLGAPAAFKYFDTTIDRKRYTSTKEVLDATLIHQSITGLYETRIDLSQLGGDGGEAAAKEAAAKEAAAKEAAAKGGVPWLTQQPLQLTILVPLQEYQEKILSKTALPEDQKQQLKTLFVKYDNLWQHWENQVGHRKIRPHNIATGDYPPRPQKQYPINPKAKPSIQIVIDDLLKQGVLTPQNSTMNTPVYPVPKPDGRWRMVLDYREVNKTIPLTAAQNQHSAGILATIVRQKYKTTLDLANGFWAHPITPESYWLTAFTWQGKQYCWTRLPQGFLNSPALFNADVVDLLKEIPNVQVYVDDIYLSHDDPKEHVQQLEKVFQILLQAGYVVSLKKSEIGQKTVEFLGFNITKEGRGLTDTFKTKLLNITPPKDLKQLQSILGLLNFARNFIPNFAELVQPLYNLIAPAKGKYIEWSEENTKQLNMVIEALNTASNLEERLPEQRLVIKVNTSPSAGYVRYYNETGKKPIMYLNYVFSKAELKFSMLEKLLTTMHKALIKAMDLAMGQEILVYSPIVSMTKIQKTPLPERKALPIRWITWMTYLEDPRIQFHYDKTLPELKHIPDVYTSSQSPVKHPSQYEGVFYTDGSAIKSPDPTKSNNAGMGIVHATYKPEYQVLNQWSIPLGNHTAQMAEIAAVEFACKKALKIPGPVLVITDSFYVAESANKELPYWKSNGFVNNKKKPLKHISKWKSIAECLSMKPDITIQHEKGISLQIPVFILKGNALADKLATQGSYVVNAGKRTADGSEFEKRTADGSEFESPKKKAKVE

SEQ ID NO: 1301 - protein, 2084 aa, synthetic construct
MPAAKRVKLDGGDKKYSIGLDIGTNSVGWAVITDEYKVPSKKFKVLGNTDRHSIKKNLIGALLFDSGETAEATRLKRTARRRYTRRKNRICYLQEIFSNEMAKVDDSFFHRLEESFLVEEDKKHERHPIFGNIVDEVAYHEKYPTIYHLRKKLVDSTDKADLRLIYLALAHMIKFRGHFLIEGDLNPDNSDVDKLFIQLVQTYNQLFEENPINASGVDAKAILSARLSKSRRLENLIAQLPGEKKNGLFGNLIALSLGLTPNFKSNFDLAEDAKLQLSKDTYDDDLDNLLAQIGDQYADLFLAAKNLSDAILLSDILRVNTEITKAPLSASMIKRYDEHHQDLTLLKALVRQQLPEKYKEIFFDQSKNGYAGYIDGGASQEEFYKFIKPILEKMDGTEELLVKLNREDLLRKQRTFDNGSIPHQIHLGELHAILRRQEDFYPFLKDNREKIEKILTFRIPYYVGPLARGNSRFAWMTRKSEETITPWNFEEVVDKGASAQSFIERMTNFDKNLPNEKVLPKHSLLYEYFTVYNELTKVKYVTEGMRKPAFLSGEQKKAIVDLLFKTNRKVTVKQLKEDYFKKIECFDSVEISGVEDRFNASLGTYHDLLKIIKDKDFLDNEENEDILEDIVLTLTLFEDREMIEERLKTYAHLFDDKVMKQLKRRRYTGWGRLSRKLINGIRDKQSGKTILDFLKSDGFANRNFMQLIHDDSLTFKEDIQKAQVSGQGDSLHEHIANLAGSPAIKKGILQTVKVVDELVKVMGRHKPENIVIEMARENQTTQKGQKNSRERMKRIEEGIKELGSQILKEHPVENTQLQNEKLYLYYLQNGRDMYVDQELDINRLSDYDVDHIVPQSFLKDDSIDNKVLTRSDKARGKSDNVPSEEVVKKMKNYWRQLLNAKLITQRKFDNLTKAERGGLSELDKAGFIKRQLVETRQITKHVAQILDSRMNTKYDENDKLIREVKVITLKSKLVSDFRKDFQFYKVREINNYHHAHDAYLNAVVGTALIKKYPKLESEFVYGDYKVYDVRKMIAKSEQEIGKATAKYFFYSNIMNFFKTEITLANGEIRKRPLIETNGETGEIVWDKGRDFATVRKVLSMPQVNIVKKTEVQTGGFSKESILPKRNSDKLIARKKDWDPKKYGGFDSPTVAYSVLVVAKVEKGKSKKLKSVKELLGITIMERSSFEKNPIDFLEAKGYKEVKKDLIIKLPKYSLFELENGRKRMLASAGELQKGNELALPSKYVNFLYLASHYEKLKGSPEDNEQKQLFVEQHKHYLDEIIEQISEFSKRVILADANLDKVLSAYNKHRDKPIREQAENIIHLFTLTNLGAPAAFKYFDTTIDRKRYTSTKEVLDATLIHQSITGLYETRIDLSQLGGDGGEAAAKPAPGGVPWLTQQPLQLTILVPLQEYQEKILSKTALPEDQKQQLKTLFVKYDNLWQHWENQVGHRKIRPHNIATGDYPPRPQKQYPINPKAKPSIQIVIDDLLKQGVLTPQNSTMNTPVYPVPKPDGRWRMVLDYREVNKTIPLTAAQNQHSAGILATIVRQKYKTTLDLANGFWAHPITPESYWLTAFTWQGKQYCWTRLPQGFLNSPALFNADVVDLLKEIPNVQVYVDDIYLSHDDPKEHVQQLEKVFQILLQAGYVVSLKKSEIGQKTVEFLGFNITKEGRGLTDTFKTKLLNITPPKDLKQLQSILGLLNFARNFIPNFAELVQPLYNLIAPAKGKYIEWSEENTKQLNMVIEALNTASNLEERLPEQRLVIKVNTSPSAGYVRYYNETGKKPIMYLNYVFSKAELKFSMLEKLLTTMHKALIKAMDLAMGQEILVYSPIVSMTKIQKTPLPERKALPIRWITWMTYLEDPRIQFHYDKTLPELKHIPDVYTSSQSPVKHPSQYEGVFYTDGSAIKSPDPTKSNNAGMGIVHATYKPEYQVLNQWSIPLGNHTAQMAEIAAVEFACKKALKIPGPVLVITDSFYVAESANKELPYWKSNGFVNNKKKPLKHISKWKSIAECLSMKPDITIQHEKGISLQIPVFILKGNALADKLATQGSYVVNAGKRTADGSEFEKRTADGSEFESPKKKAKVE

SEQ ID NO: 1302 - protein, 2087 aa, synthetic construct
MPAAKRVKLDGGDKKYSIGLDIGTNSVGWAVITDEYKVPSKKFKVLGNTDRHSIKKNLIGALLFDSGETAEATRLKRTARRRYTRRKNRICYLQEIFSNEMAKVDDSFFHRLEESFLVEEDKKHERHPIFGNIVDEVAYHEKYPTIYHLRKKLVDSTDKADLRLIYLALAHMIKFRGHFLIEGDLNPDNSDVDKLFIQLVQTYNQLFEENPINASGVDAKAILSARLSKSRRLENLIAQLPGEKKNGLFGNLIALSLGLTPNFKSNFDLAEDAKLQLSKDTYDDDLDNLLAQIGDQYADLFLAAKNLSDAILLSDILRVNTEITKAPLSASMIKRYDEHHQDLTLLKALVRQQLPEKYKEIFFDQSKNGYAGYIDGGASQEEFYKFIKPILEKMDGTEELLVKLNREDLLRKQRTFDNGSIPHQIHLGELHAILRRQEDFYPFLKDNREKIEKILTFRIPYYVGPLARGNSRFAWMTRKSEETITPWNFEEVVDKGASAQSFIERMTNFDKNLPNEKVLPKHSLLYEYFTVYNELTKVKYVTEGMRKPAFLSGEQKKAIVDLLFKTNRKVTVKQLKEDYFKKIECFDSVEISGVEDRFNASLGTYHDLLKIIKDKDFLDNEENEDILEDIVLTLTLFEDREMIEERLKTYAHLFDDKVMKQLKRRRYTGWGRLSRKLINGIRDKQSGKTILDFLKSDGFANRNFMQLIHDDSLTFKEDIQKAQVSGQGDSLHEHIANLAGSPAIKKGILQTVKVVDELVKVMGRHKPENIVIEMARENQTTQKGQKNSRERMKRIEEGIKELGSQILKEHPVENTQLQNEKLYLYYLQNGRDMYVDQELDINRLSDYDVDHIVPQSFLKDDSIDNKVLTRSDKARGKSDNVPSEEVVKKMKNYWRQLLNAKLITQRKFDNLTKAERGGLSELDKAGFIKRQLVETRQITKHVAQILDSRMNTKYDENDKLIREVKVITLKSKLVSDFRKDFQFYKVREINNYHHAHDAYLNAVVGTALIKKYPKLESEFVYGDYKVYDVRKMIAKSEQEIGKATAKYFFYSNIMNFFKTEITLANGEIRKRPLIETNGETGEIVWDKGRDFATVRKVLSMPQVNIVKKTEVQTGGFSKESILPKRNSDKLIARKKDWDPKKYGGFDSPTVAYSVLVVAKVEKGKSKKLKSVKELLGITIMERSSFEKNPIDFLEAKGYKEVKKDLIIKLPKYSLFELENGRKRMLASAGELQKGNELALPSKYVNFLYLASHYEKLKGSPEDNEQKQLFVEQHKHYLDEIIEQISEFSKRVILADANLDKVLSAYNKHRDKPIREQAENIIHLFTLTNLGAPAAFKYFDTTIDRKRYTSTKEVLDATLIHQSITGLYETRIDLSQLGGDGGPAPGSSEAAAKGGVPWLTQQPLQLTILVPLQEYQEKILSKTALPEDQKQQLKTLFVKYDNLWQHWENQVGHRKIRPHNIATGDYPPRPQKQYPINPKAKPSIQIVIDDLLKQGVLTPQNSTMNTPVYPVPKPDGRWRMVLDYREVNKTIPLTAAQNQHSAGILATIVRQKYKTTLDLANGFWAHPITPESYWLTAFTWQGKQYCWTRLPQGFLNSPALFNADVVDLLKEIPNVQVYVDDIYLSHDDPKEHVQQLEKVFQILLQAGYVVSLKKSEIGQKTVEFLGFNITKEGRGLTDTFKTKLLNITPPKDLKQLQSILGLLNFARNFIPNFAELVQPLYNLIAPAKGKYIEWSEENTKQLNMVIEALNTASNLEERLPEQRLVIKVNTSPSAGYVRYYNETGKKPIMYLNYVFSKAELKFSMLEKLLTTMHKALIKAMDLAMGQEILVYSPIVSMTKIQKTPLPERKALPIRWITWMTYLEDPRIQFHYDKTLPELKHIPDVYTSSQSPVKHPSQYEGVFYTDGSAIKSPDPTKSNNAGMGIVHATYKPEYQVLNQWSIPLGNHTAQMAEIAAVEFACKKALKIPGPVLVITDSFYVAESANKELPYWKSNGFVNNKKKPLKHISKWKSIAECLSMKPDITIQHEKGISLQIPVFILKGNALADKLATQGSYVVNAGKRTADGSEFEKRTADGSEFESPKKKAKVE

SEQ ID NO: 1303 - protein, 2091 aa, synthetic construct
MPAAKRVKLDGGDKKYSIGLDIGTNSVGWAVITDEYKVPSKKFKVLGNTDRHSIKKNLIGALLFDSGETAEATRLKRTARRRYTRRKNRICYLQEIFSNEMAKVDDSFFHRLEESFLVEEDKKHERHPIFGNIVDEVAYHEKYPTIYHLRKKLVDSTDKADLRLIYLALAHMIKFRGHFLIEGDLNPDNSDVDKLFIQLVQTYNQLFEENPINASGVDAKAILSARLSKSRRLENLIAQLPGEKKNGLFGNLIALSLGLTPNFKSNFDLAEDAKLQLSKDTYDDDLDNLLAQIGDQYADLFLAAKNLSDAILLSDILRVNTEITKAPLSASMIKRYDEHHQDLTLLKALVRQQLPEKYKEIFFDQSKNGYAGYIDGGASQEEFYKFIKPILEKMDGTEELLVKLNREDLLRKQRTFDNGSIPHQIHLGELHAILRRQEDFYPFLKDNREKIEKILTFRIPYYVGPLARGNSRFAWMTRKSEETITPWNFEEVVDKGASAQSFIERMTNFDKNLPNEKVLPKHSLLYEYFTVYNELTKVKYVTEGMRKPAFLSGEQKKAIVDLLFKTNRKVTVKQLKEDYFKKIECFDSVEISGVEDRFNASLGTYHDLLKIIKDKDFLDNEENEDILEDIVLTLTLFEDREMIEERLKTYAHLFDDKVMKQLKRRRYTGWGRLSRKLINGIRDKQSGKTILDFLKSDGFANRNFMQLIHDDSLTFKEDIQKAQVSGQGDSLHEHIANLAGSPAIKKGILQTVKVVDELVKVMGRHKPENIVIEMARENQTTQKGQKNSRERMKRIEEGIKELGSQILKEHPVENTQLQNEKLYLYYLQNGRDMYVDQELDINRLSDYDVDHIVPQSFLKDDSIDNKVLTRSDKARGKSDNVPSEEVVKKMKNYWRQLLNAKLITQRKFDNLTKAERGGLSELDKAGFIKRQLVETRQITKHVAQILDSRMNTKYDENDKLIREVKVITLKSKLVSDFRKDFQFYKVREINNYHHAHDAYLNAVVGTALIKKYPKLESEFVYGDYKVYDVRKMIAKSEQEIGKATAKYFFYSNIMNFFKTEITLANGEIRKRPLIETNGETGEIVWDKGRDFATVRKVLSMPQVNIVKKTEVQTGGFSKESILPKRNSDKLIARKKDWDPKKYGGFDSPTVAYSVLVVAKVEKGKSKKLKSVKELLGITIMERSSFEKNPIDFLEAKGYKEVKKDLIIKLPKYSLFELENGRKRMLASAGELQKGNELALPSKYVNFLYLASHYEKLKGSPEDNEQKQLFVEQHKHYLDEIIEQISEFSKRVILADANLDKVLSAYNKHRDKPIREQAENIIHLFTLTNLGAPAAFKYFDTTIDRKRYTSTKEVLDATLIHQSITGLYETRIDLSQLGGDGGGSSGSSGSSGSSGSSGGVPWLTQQPLQLTILVPLQEYQEKILSKTALPEDQKQQLKTLFVKYDNLWQHWENQVGHRKIRPHNIATGDYPPRPQKQYPINPKAKPSIQIVIDDLLKQGVLTPQNSTMNTPVYPVPKPDGRWRMVLDYREVNKTIPLTAAQNQHSAGILATIVRQKYKTTLDLANGFWAHPITPESYWLTAFTWQGKQYCWTRLPQGFLNSPALFNADVVDLLKEIPNVQVYVDDIYLSHDDPKEHVQQLEKVFQILLQAGYVVSLKKSEIGQKTVEFLGFNITKEGRGLTDTFKTKLLNITPPKDLKQLQSILGLLNFARNFIPNFAELVQPLYNLIAPAKGKYIEWSEENTKQLNMVIEALNTASNLEERLPEQRLVIKVNTSPSAGYVRYYNETGKKPIMYLNYVFSKAELKFSMLEKLLTTMHKALIKAMDLAMGQEILVYSPIVSMTKIQKTPLPERKALPIRWITWMTYLEDPRIQFHYDKTLPELKHIPDVYTSSQSPVKHPSQYEGVFYTDGSAIKSPDPTKSNNAGMGIVHATYKPEYQVLNQWSIPLGNHTAQMAEIAAVEFACKKALKIPGPVLVITDSFYVAESANKELPYWKSNGFVNNKKKPLKHISKWKSIAECLSMKPDITIQHEKGISLQIPVFILKGNALADKLATQGSYVVNAGKRTADGSEFEKRTADGSEFESPKKKAKVE

SEQ ID NO: 1304 - protein, 2085 aa, synthetic construct
MPAAKRVKLDGGDKKYSIGLDIGTNSVGWAVITDEYKVPSKKFKVLGNTDRHSIKKNLIGALLFDSGETAEATRLKRTARRRYTRRKNRICYLQEIFSNEMAKVDDSFFHRLEESFLVEEDKKHERHPIFGNIVDEVAYHEKYPTIYHLRKKLVDSTDKADLRLIYLALAHMIKFRGHFLIEGDLNPDNSDVDKLFIQLVQTYNQLFEENPINASGVDAKAILSARLSKSRRLENLIAQLPGEKKNGLFGNLIALSLGLTPNFKSNFDLAEDAKLQLSKDTYDDDLDNLLAQIGDQYADLFLAAKNLSDAILLSDILRVNTEITKAPLSASMIKRYDEHHQDLTLLKALVRQQLPEKYKEIFFDQSKNGYAGYIDGGASQEEFYKFIKPILEKMDGTEELLVKLNREDLLRKQRTFDNGSIPHQIHLGELHAILRRQEDFYPFLKDNREKIEKILTFRIPYYVGPLARGNSRFAWMTRKSEETITPWNFEEVVDKGASAQSFIERMTNFDKNLPNEKVLPKHSLLYEYFTVYNELTKVKYVTEGMRKPAFLSGEQKKAIVDLLFKTNRKVTVKQLKEDYFKKIECFDSVEISGVEDRFNASLGTYHDLLKIIKDKDFLDNEENEDILEDIVLTLTLFEDREMIEERLKTYAHLFDDKVMKQLKRRRYTGWGRLSRKLINGIRDKQSGKTILDFLKSDGFANRNFMQLIHDDSLTFKEDIQKAQVSGQGDSLHEHIANLAGSPAIKKGILQTVKVVDELVKVMGRHKPENIVIEMARENQTTQKGQKNSRERMKRIEEGIKELGSQILKEHPVENTQLQNEKLYLYYLQNGRDMYVDQELDINRLSDYDVDHIVPQSFLKDDSIDNKVLTRSDKARGKSDNVPSEEVVKKMKNYWRQLLNAKLITQRKFDNLTKAERGGLSELDKAGFIKRQLVETRQITKHVAQILDSRMNTKYDENDKLIREVKVITLKSKLVSDFRKDFQFYKVREINNYHHAHDAYLNAVVGTALIKKYPKLESEFVYGDYKVYDVRKMIAKSEQEIGKATAKYFFYSNIMNFFKTEITLANGEIRKRPLIETNGETGEIVWDKGRDFATVRKVLSMPQVNIVKKTEVQTGGFSKESILPKRNSDKLIARKKDWDPKKYGGFDSPTVAYSVLVVAKVEKGKSKKLKSVKELLGITIMERSSFEKNPIDFLEAKGYKEVKKDLIIKLPKYSLFELENGRKRMLASAGELQKGNELALPSKYVNFLYLASHYEKLKGSPEDNEQKQLFVEQHKHYLDEIIEQISEFSKRVILADANLDKVLSAYNKHRDKPIREQAENIIHLFTLTNLGAPAAFKYFDTTIDRKRYTSTKEVLDATLIHQSITGLYETRIDLSQLGGDGGGGSGGSGGSGGVPWLTQQPLQLTILVPLQEYQEKILSKTALPEDQKQQLKTLFVKYDNLWQHWENQVGHRKIRPHNIATGDYPPRPQKQYPINPKAKPSIQIVIDDLLKQGVLTPQNSTMNTPVYPVPKPDGRWRMVLDYREVNKTIPLTAAQNQHSAGILATIVRQKYKTTLDLANGFWAHPITPESYWLTAFTWQGKQYCWTRLPQGFLNSPALFNADVVDLLKEIPNVQVYVDDIYLSHDDPKEHVQQLEKVFQILLQAGYVVSLKKSEIGQKTVEFLGFNITKEGRGLTDTFKTKLLNITPPKDLKQLQSILGLLNFARNFIPNFAELVQPLYNLIAPAKGKYIEWSEENTKQLNMVIEALNTASNLEERLPEQRLVIKVNTSPSAGYVRYYNETGKKPIMYLNYVFSKAELKFSMLEKLLTTMHKALIKAMDLAMGQEILVYSPIVSMTKIQKTPLPERKALPIRWITWMTYLEDPRIQFHYDKTLPELKHIPDVYTSSQSPVKHPSQYEGVFYTDGSAIKSPDPTKSNNAGMGIVHATYKPEYQVLNQWSIPLGNHTAQMAEIAAVEFACKKALKIPGPVLVITDSFYVAESANKELPYWKSNGFVNNKKKPLKHISKWKSIAECLSMKPDITIQHEKGISLQIPVFILKGNALADKLATQGSYVVNAGKRTADGSEFEKRTADGSEFESPKKKAKVE

SEQ ID NO: 1305 - protein, 2085 aa, synthetic construct
MPAAKRVKLDGGDKKYSIGLDIGTNSVGWAVITDEYKVPSKKFKVLGNTDRHSIKKNLIGALLFDSGETAEATRLKRTARRRYTRRKNRICYLQEIFSNEMAKVDDSFFHRLEESFLVEEDKKHERHPIFGNIVDEVAYHEKYPTIYHLRKKLVDSTDKADLRLIYLALAHMIKFRGHFLIEGDLNPDNSDVDKLFIQLVQTYNQLFEENPINASGVDAKAILSARLSKSRRLENLIAQLPGEKKNGLFGNLIALSLGLTPNFKSNFDLAEDAKLQLSKDTYDDDLDNLLAQIGDQYADLFLAAKNLSDAILLSDILRVNTEITKAPLSASMIKRYDEHHQDLTLLKALVRQQLPEKYKEIFFDQSKNGYAGYIDGGASQEEFYKFIKPILEKMDGTEELLVKLNREDLLRKQRTFDNGSIPHQIHLGELHAILRRQEDFYPFLKDNREKIEKILTFRIPYYVGPLARGNSRFAWMTRKSEETITPWNFEEVVDKGASAQSFIERMTNFDKNLPNEKVLPKHSLLYEYFTVYNELTKVKYVTEGMRKPAFLSGEQKKAIVDLLFKTNRKVTVKQLKEDYFKKIECFDSVEISGVEDRFNASLGTYHDLLKIIKDKDFLDNEENEDILEDIVLTLTLFEDREMIEERLKTYAHLFDDKVMKQLKRRRYTGWGRLSRKLINGIRDKQSGKTILDFLKSDGFANRNFMQLIHDDSLTFKEDIQKAQVSGQGDSLHEHIANLAGSPAIKKGILQTVKVVDELVKVMGRHKPENIVIEMARENQTTQKGQKNSRERMKRIEEGIKELGSQILKEHPVENTQLQNEKLYLYYLQNGRDMYVDQELDINRLSDYDVDHIVPQSFLKDDSIDNKVLTRSDKARGKSDNVPSEEVVKKMKNYWRQLLNAKLITQRKFDNLTKAERGGLSELDKAGFIKRQLVETRQITKHVAQILDSRMNTKYDENDKLIREVKVITLKSKLVSDFRKDFQFYKVREINNYHHAHDAYLNAVVGTALIKKYPKLESEFVYGDYKVYDVRKMIAKSEQEIGKATAKYFFYSNIMNFFKTEITLANGEIRKRPLIETNGETGEIVWDKGRDFATVRKVLSMPQVNIVKKTEVQTGGFSKESILPKRNSDKLIARKKDWDPKKYGGFDSPTVAYSVLVVAKVEKGKSKKLKSVKELLGITIMERSSFEKNPIDFLEAKGYKEVKKDLIIKLPKYSLFELENGRKRMLASAGELQKGNELALPSKYVNFLYLASHYEKLKGSPEDNEQKQLFVEQHKHYLDEIIEQISEFSKRVILADANLDKVLSAYNKHRDKPIREQAENIIHLFTLTNLGAPAAFKYFDTTIDRKRYTSTKEVLDATLIHQSITGLYETRIDLSQLGGDGGGGGGSSPAPGGVPWLTQQPLQLTILVPLQEYQEKILSKTALPEDQKQQLKTLFVKYDNLWQHWENQVGHRKIRPHNIATGDYPPRPQKQYPINPKAKPSIQIVIDDLLKQGVLTPQNSTMNTPVYPVPKPDGRWRMVLDYREVNKTIPLTAAQNQHSAGILATIVRQKYKTTLDLANGFWAHPITPESYWLTAFTWQGKQYCWTRLPQGFLNSPALFNADVVDLLKEIPNVQVYVDDIYLSHDDPKEHVQQLEKVFQILLQAGYVVSLKKSEIGQKTVEFLGFNITKEGRGLTDTFKTKLLNITPPKDLKQLQSILGLLNFARNFIPNFAELVQPLYNLIAPAKGKYIEWSEENTKQLNMVIEALNTASNLEERLPEQRLVIKVNTSPSAGYVRYYNETGKKPIMYLNYVFSKAELKFSMLEKLLTTMHKALIKAMDLAMGQEILVYSPIVSMTKIQKTPLPERKALPIRWITWMTYLEDPRIQFHYDKTLPELKHIPDVYTSSQSPVKHPSQYEGVFYTDGSAIKSPDPTKSNNAGMGIVHATYKPEYQVLNQWSIPLGNHTAQMAEIAAVEFACKKALKIPGPVLVITDSFYVAESANKELPYWKSNGFVNNKKKPLKHISKWKSIAECLSMKPDITIQHEKGISLQIPVFILKGNALADKLATQGSYVVNAGKRTADGSEFEKRTADGSEFESPKKKAKVE

SEQ ID NO: 1306 - protein, 2087 aa, synthetic construct
MPAAKRVKLDGGDKKYSIGLDIGTNSVGWAVITDEYKVPSKKFKVLGNTDRHSIKKNLIGALLFDSGETAEATRLKRTARRRYTRRKNRICYLQEIFSNEMAKVDDSFFHRLEESFLVEEDKKHERHPIFGNIVDEVAYHEKYPTIYHLRKKLVDSTDKADLRLIYLALAHMIKFRGHFLIEGDLNPDNSDVDKLFIQLVQTYNQLFEENPINASGVDAKAILSARLSKSRRLENLIAQLPGEKKNGLFGNLIALSLGLTPNFKSNFDLAEDAKLQLSKDTYDDDLDNLLAQIGDQYADLFLAAKNLSDAILLSDILRVNTEITKAPLSASMIKRYDEHHQDLTLLKALVRQQLPEKYKEIFFDQSKNGYAGYIDGGASQEEFYKFIKPILEKMDGTEELLVKLNREDLLRKQRTFDNGSIPHQIHLGELHAILRRQEDFYPFLKDNREKIEKILTFRIPYYVGPLARGNSRFAWMTRKSEETITPWNFEEVVDKGASAQSFIERMTNFDKNLPNEKVLPKHSLLYEYFTVYNELTKVKYVTEGMRKPAFLSGEQKKAIVDLLFKTNRKVTVKQLKEDYFKKIECFDSVEISGVEDRFNASLGTYHDLLKIIKDKDFLDNEENEDILEDIVLTLTLFEDREMIEERLKTYAHLFDDKVMKQLKRRRYTGWGRLSRKLINGIRDKQSGKTILDFLKSDGFANRNFMQLIHDDSLTFKEDIQKAQVSGQGDSLHEHIANLAGSPAIKKGILQTVKVVDELVKVMGRHKPENIVIEMARENQTTQKGQKNSRERMKRIEEGIKELGSQILKEHPVENTQLQNEKLYLYYLQNGRDMYVDQELDINRLSDYDVDHIVPQSFLKDDSIDNKVLTRSDKARGKSDNVPSEEVVKKMKNYWRQLLNAKLITQRKFDNLTKAERGGLSELDKAGFIKRQLVETRQITKHVAQILDSRMNTKYDENDKLIREVKVITLKSKLVSDFRKDFQFYKVREINNYHHAHDAYLNAVVGTALIKKYPKLESEFVYGDYKVYDVRKMIAKSEQEIGKATAKYFFYSNIMNFFKTEITLANGEIRKRPLIETNGETGEIVWDKGRDFATVRKVLSMPQVNIVKKTEVQTGGFSKESILPKRNSDKLIARKKDWDPKKYGGFDSPTVAYSVLVVAKVEKGKSKKLKSVKELLGITIMERSSFEKNPIDFLEAKGYKEVKKDLIIKLPKYSLFELENGRKRMLASAGELQKGNELALPSKYVNFLYLASHYEKLKGSPEDNEQKQLFVEQHKHYLDEIIEQISEFSKRVILADANLDKVLSAYNKHRDKPIREQAENIIHLFTLTNLGAPAAFKYFDTTIDRKRYTSTKEVLDATLIHQSITGLYETRIDLSQLGGDGGGSSGGSEAAAKGGVPWLTQQPLQLTILVPLQEYQEKILSKTALPEDQKQQLKTLFVKYDNLWQHWENQVGHRKIRPHNIATGDYPPRPQKQYPINPKAKPSIQIVIDDLLKQGVLTPQNSTMNTPVYPVPKPDGRWRMVLDYREVNKTIPLTAAQNQHSAGILATIVRQKYKTTLDLANGFWAHPITPESYWLTAFTWQGKQYCWTRLPQGFLNSPALFNADVVDLLKEIPNVQVYVDDIYLSHDDPKEHVQQLEKVFQILLQAGYVVSLKKSEIGQKTVEFLGFNITKEGRGLTDTFKTKLLNITPPKDLKQLQSILGLLNFARNFIPNFAELVQPLYNLIAPAKGKYIEWSEENTKQLNMVIEALNTASNLEERLPEQRLVIKVNTSPSAGYVRYYNETGKKPIMYLNYVFSKAELKFSMLEKLLTTMHKALIKAMDLAMGQEILVYSPIVSMTKIQKTPLPERKALPIRWITWMTYLEDPRIQFHYDKTLPELKHIPDVYTSSQSPVKHPSQYEGVFYTDGSAIKSPDPTKSNNAGMGIVHATYKPEYQVLNQWSIPLGNHTAQMAEIAAVEFACKKALKIPGPVLVITDSFYVAESANKELPYWKSNGFVNNKKKPLKHISKWKSIAECLSMKPDITIQHEKGISLQIPVFILKGNALADKLATQGSYVVNAGKRTADGSEFEKRTADGSEFESPKKKAKVE

SEQ ID NO: 1307 - protein, 2085 aa, synthetic construct
MPAAKRVKLDGGDKKYSIGLDIGTNSVGWAVITDEYKVPSKKFKVLGNTDRHSIKKNLIGALLFDSGETAEATRLKRTARRRYTRRKNRICYLQEIFSNEMAKVDDSFFHRLEESFLVEEDKKHERHPIFGNIVDEVAYHEKYPTIYHLRKKLVDSTDKADLRLIYLALAHMIKFRGHFLIEGDLNPDNSDVDKLFIQLVQTYNQLFEENPINASGVDAKAILSARLSKSRRLENLIAQLPGEKKNGLFGNLIALSLGLTPNFKSNFDLAEDAKLQLSKDTYDDDLDNLLAQIGDQYADLFLAAKNLSDAILLSDILRVNTEITKAPLSASMIKRYDEHHQDLTLLKALVRQQLPEKYKEIFFDQSKNGYAGYIDGGASQEEFYKFIKPILEKMDGTEELLVKLNREDLLRKQRTFDNGSIPHQIHLGELHAILRRQEDFYPFLKDNREKIEKILTFRIPYYVGPLARGNSRFAWMTRKSEETITPWNFEEVVDKGASAQSFIERMTNFDKNLPNEKVLPKHSLLYEYFTVYNELTKVKYVTEGMRKPAFLSGEQKKAIVDLLFKTNRKVTVKQLKEDYFKKIECFDSVEISGVEDRFNASLGTYHDLLKIIKDKDFLDNEENEDILEDIVLTLTLFEDREMIEERLKTYAHLFDDKVMKQLKRRRYTGWGRLSRKLINGIRDKQSGKTILDFLKSDGFANRNFMQLIHDDSLTFKEDIQKAQVSGQGDSLHEHIANLAGSPAIKKGILQTVKVVDELVKVMGRHKPENIVIEMARENQTTQKGQKNSRERMKRIEEGIKELGSQILKEHPVENTQLQNEKLYLYYLQNGRDMYVDQELDINRLSDYDVDHIVPQSFLKDDSIDNKVLTRSDKARGKSDNVPSEEVVKKMKNYWRQLLNAKLITQRKFDNLTKAERGGLSELDKAGFIKRQLVETRQITKHVAQILDSRMNTKYDENDKLIREVKVITLKSKLVSDFRKDFQFYKVREINNYHHAHDAYLNAVVGTALIKKYPKLESEFVYGDYKVYDVRKMIAKSEQEIGKATAKYFFYSNIMNFFKTEITLANGEIRKRPLIETNGETGEIVWDKGRDFATVRKVLSMPQVNIVKKTEVQTGGFSKESILPKRNSDKLIARKKDWDPKKYGGFDSPTVAYSVLVVAKVEKGKSKKLKSVKELLGITIMERSSFEKNPIDFLEAKGYKEVKKDLIIKLPKYSLFELENGRKRMLASAGELQKGNELALPSKYVNFLYLASHYEKLKGSPEDNEQKQLFVEQHKHYLDEIIEQISEFSKRVILADANLDKVLSAYNKHRDKPIREQAENIIHLFTLTNLGAPAAFKYFDTTIDRKRYTSTKEVLDATLIHQSITGLYETRIDLSQLGGDGGGSSPAPGGSGGVPWLTQQPLQLTILVPLQEYQEKILSKTALPEDQKQQLKTLFVKYDNLWQHWENQVGHRKIRPHNIATGDYPPRPQKQYPINPKAKPSIQIVIDDLLKQGVLTPQNSTMNTPVYPVPKPDGRWRMVLDYREVNKTIPLTAAQNQHSAGILATIVRQKYKTTLDLANGFWAHPITPESYWLTAFTWQGKQYCWTRLPQGFLNSPALFNADVVDLLKEIPNVQVYVDDIYLSHDDPKEHVQQLEKVFQILLQAGYVVSLKKSEIGQKTVEFLGFNITKEGRGLTDTFKTKLLNITPPKDLKQLQSILGLLNFARNFIPNFAELVQPLYNLIAPAKGKYIEWSEENTKQLNMVIEALNTASNLEERLPEQRLVIKVNTSPSAGYVRYYNETGKKPIMYLNYVFSKAELKFSMLEKLLTTMHKALIKAMDLAMGQEILVYSPIVSMTKIQKTPLPERKALPIRWITWMTYLEDPRIQFHYDKTLPELKHIPDVYTSSQSPVKHPSQYEGVFYTDGSAIKSPDPTKSNNAGMGIVHATYKPEYQVLNQWSIPLGNHTAQMAEIAAVEFACKKALKIPGPVLVITDSFYVAESANKELPYWKSNGFVNNKKKPLKHISKWKSIAECLSMKPDITIQHEKGISLQIPVFILKGNALADKLATQGSYVVNAGKRTADGSEFEKRTADGSEFESPKKKAKVE

SEQ ID NO: 1308 - protein, 2086 aa, synthetic construct
MPAAKRVKLDGGDKKYSIGLDIGTNSVGWAVITDEYKVPSKKFKVLGNTDRHSIKKNLIGALLFDSGETAEATRLKRTARRRYTRRKNRICYLQEIFSNEMAKVDDSFFHRLEESFLVEEDKKHERHPIFGNIVDEVAYHEKYPTIYHLRKKLVDSTDKADLRLIYLALAHMIKFRGHFLIEGDLNPDNSDVDKLFIQLVQTYNQLFEENPINASGVDAKAILSARLSKSRRLENLIAQLPGEKKNGLFGNLIALSLGLTPNFKSNFDLAEDAKLQLSKDTYDDDLDNLLAQIGDQYADLFLAAKNLSDAILLSDILRVNTEITKAPLSASMIKRYDEHHQDLTLLKALVRQQLPEKYKEIFFDQSKNGYAGYIDGGASQEEFYKFIKPILEKMDGTEELLVKLNREDLLRKQRTFDNGSIPHQIHLGELHAILRRQEDFYPFLKDNREKIEKILTFRIPYYVGPLARGNSRFAWMTRKSEETITPWNFEEVVDKGASAQSFIERMTNFDKNLPNEKVLPKHSLLYEYFTVYNELTKVKYVTEGMRKPAFLSGEQKKAIVDLLFKTNRKVTVKQLKEDYFKKIECFDSVEISGVEDRFNASLGTYHDLLKIIKDKDFLDNEENEDILEDIVLTLTLFEDREMIEERLKTYAHLFDDKVMKQLKRRRYTGWGRLSRKLINGIRDKQSGKTILDFLKSDGFANRNFMQLIHDDSLTFKEDIQKAQVSGQGDSLHEHIANLAGSPAIKKGILQTVKVVDELVKVMGRHKPENIVIEMARENQTTQKGQKNSRERMKRIEEGIKELGSQILKEHPVENTQLQNEKLYLYYLQNGRDMYVDQELDINRLSDYDVDHIVPQSFLKDDSIDNKVLTRSDKARGKSDNVPSEEVVKKMKNYWRQLLNAKLITQRKFDNLTKAERGGLSELDKAGFIKRQLVETRQITKHVAQILDSRMNTKYDENDKLIREVKVITLKSKLVSDFRKDFQFYKVREINNYHHAHDAYLNAVVGTALIKKYPKLESEFVYGDYKVYDVRKMIAKSEQEIGKATAKYFFYSNIMNFFKTEITLANGEIRKRPLIETNGETGEIVWDKGRDFATVRKVLSMPQVNIVKKTEVQTGGFSKESILPKRNSDKLIARKKDWDPKKYGGFDSPTVAYSVLVVAKVEKGKSKKLKSVKELLGITIMERSSFEKNPIDFLEAKGYKEVKKDLIIKLPKYSLFELENGRKRMLASAGELQKGNELALPSKYVNFLYLASHYEKLKGSPEDNEQKQLFVEQHKHYLDEIIEQISEFSKRVILADANLDKVLSAYNKHRDKPIREQAENIIHLFTLTNLGAPAAFKYFDTTIDRKRYTSTKEVLDATLIHQSITGLYETRIDLSQLGGDGGEAAAKEAAAKGGVPWLTQQPLQLTILVPLQEYQEKILSKTALPEDQKQQLKTLFVKYDNLWQHWENQVGHRKIRPHNIATGDYPPRPQKQYPINPKAKPSIQIVIDDLLKQGVLTPQNSTMNTPVYPVPKPDGRWRMVLDYREVNKTIPLTAAQNQHSAGILATIVRQKYKTTLDLANGFWAHPITPESYWLTAFTWQGKQYCWTRLPQGFLNSPALFNADVVDLLKEIPNVQVYVDDIYLSHDDPKEHVQQLEKVFQILLQAGYVVSLKKSEIGQKTVEFLGFNITKEGRGLTDTFKTKLLNITPPKDLKQLQSILGLLNFARNFIPNFAELVQPLYNLIAPAKGKYIEWSEENTKQLNMVIEALNTASNLEERLPEQRLVIKVNTSPSAGYVRYYNETGKKPIMYLNYVFSKAELKFSMLEKLLTTMHKALIKAMDLAMGQEILVYSPIVSMTKIQKTPLPERKALPIRWITWMTYLEDPRIQFHYDKTLPELKHIPDVYTSSQSPVKHPSQYEGVFYTDGSAIKSPDPTKSNNAGMGIVHATYKPEYQVLNQWSIPLGNHTAQMAEIAAVEFACKKALKIPGPVLVITDSFYVAESANKELPYWKSNGFVNNKKKPLKHISKWKSIAECLSMKPDITIQHEKGISLQIPVFILKGNALADKLATQGSYVVNAGKRTADGSEFEKRTADGSEFESPKKKAKVE

SEQ ID NO: 1309 - protein, 2087 aa, synthetic construct
MPAAKRVKLDGGDKKYSIGLDIGTNSVGWAVITDEYKVPSKKFKVLGNTDRHSIKKNLIGALLFDSGETAEATRLKRTARRRYTRRKNRICYLQEIFSNEMAKVDDSFFHRLEESFLVEEDKKHERHPIFGNIVDEVAYHEKYPTIYHLRKKLVDSTDKADLRLIYLALAHMIKFRGHFLIEGDLNPDNSDVDKLFIQLVQTYNQLFEENPINASGVDAKAILSARLSKSRRLENLIAQLPGEKKNGLFGNLIALSLGLTPNFKSNFDLAEDAKLQLSKDTYDDDLDNLLAQIGDQYADLFLAAKNLSDAILLSDILRVNTEITKAPLSASMIKRYDEHHQDLTLLKALVRQQLPEKYKEIFFDQSKNGYAGYIDGGASQEEFYKFIKPILEKMDGTEELLVKLNREDLLRKQRTFDNGSIPHQIHLGELHAILRRQEDFYPFLKDNREKIEKILTFRIPYYVGPLARGNSRFAWMTRKSEETITPWNFEEVVDKGASAQSFIERMTNFDKNLPNEKVLPKHSLLYEYFTVYNELTKVKYVTEGMRKPAFLSGEQKKAIVDLLFKTNRKVTVKQLKEDYFKKIECFDSVEISGVEDRFNASLGTYHDLLKIIKDKDFLDNEENEDILEDIVLTLTLFEDREMIEERLKTYAHLFDDKVMKQLKRRRYTGWGRLSRKLINGIRDKQSGKTILDFLKSDGFANRNFMQLIHDDSLTFKEDIQKAQVSGQGDSLHEHIANLAGSPAIKKGILQTVKVVDELVKVMGRHKPENIVIEMARENQTTQKGQKNSRERMKRIEEGIKELGSQILKEHPVENTQLQNEKLYLYYLQNGRDMYVDQELDINRLSDYDVDHIVPQSFLKDDSIDNKVLTRSDKARGKSDNVPSEEVVKKMKNYWRQLLNAKLITQRKFDNLTKAERGGLSELDKAGFIKRQLVETRQITKHVAQILDSRMNTKYDENDKLIREVKVITLKSKLVSDFRKDFQFYKVREINNYHHAHDAYLNAVVGTALIKKYPKLESEFVYGDYKVYDVRKMIAKSEQEIGKATAKYFFYSNIMNFFKTEITLANGEIRKRPLIETNGETGEIVWDKGRDFATVRKVLSMPQVNIVKKTEVQTGGFSKESILPKRNSDKLIARKKDWDPKKYGGFDSPTVAYSVLVVAKVEKGKSKKLKSVKELLGITIMERSSFEKNPIDFLEAKGYKEVKKDLIIKLPKYSLFELENGRKRMLASAGELQKGNELALPSKYVNFLYLASHYEKLKGSPEDNEQKQLFVEQHKHYLDEIIEQISEFSKRVILADANLDKVLSAYNKHRDKPIREQAENIIHLFTLTNLGAPAAFKYFDTTIDRKRYTSTKEVLDATLIHQSITGLYETRIDLSQLGGDGGGGGEAAAKPAPGGVPWLTQQPLQLTILVPLQEYQEKILSKTALPEDQKQQLKTLFVKYDNLWQHWENQVGHRKIRPHNIATGDYPPRPQKQYPINPKAKPSIQIVIDDLLKQGVLTPQNSTMNTPVYPVPKPDGRWRMVLDYREVNKTIPLTAAQNQHSAGILATIVRQKYKTTLDLANGFWAHPITPESYWLTAFTWQGKQYCWTRLPQGFLNSPALFNADVVDLLKEIPNVQVYVDDIYLSHDDPKEHVQQLEKVFQILLQAGYVVSLKKSEIGQKTVEFLGFNITKEGRGLTDTFKTKLLNITPPKDLKQLQSILGLLNFARNFIPNFAELVQPLYNLIAPAKGKYIEWSEENTKQLNMVIEALNTASNLEERLPEQRLVIKVNTSPSAGYVRYYNETGKKPIMYLNYVFSKAELKFSMLEKLLTTMHKALIKAMDLAMGQEILVYSPIVSMTKIQKTPLPERKALPIRWITWMTYLEDPRIQFHYDKTLPELKHIPDVYTSSQSPVKHPSQYEGVFYTDGSAIKSPDPTKSNNAGMGIVHATYKPEYQVLNQWSIPLGNHTAQMAEIAAVEFACKKALKIPGPVLVITDSFYVAESANKELPYWKSNGFVNNKKKPLKHISKWKSIAECLSMKPDITIQHEKGISLQIPVFILKGNALADKLATQGSYVVNAGKRTADGSEFEKRTADGSEFESPKKKAKVE

SEQ ID NO: 1310 - protein, 2085 aa, synthetic construct
MPAAKRVKLDGGDKKYSIGLDIGTNSVGWAVITDEYKVPSKKFKVLGNTDRHSIKKNLIGALLFDSGETAEATRLKRTARRRYTRRKNRICYLQEIFSNEMAKVDDSFFHRLEESFLVEEDKKHERHPIFGNIVDEVAYHEKYPTIYHLRKKLVDSTDKADLRLIYLALAHMIKFRGHFLIEGDLNPDNSDVDKLFIQLVQTYNQLFEENPINASGVDAKAILSARLSKSRRLENLIAQLPGEKKNGLFGNLIALSLGLTPNFKSNFDLAEDAKLQLSKDTYDDDLDNLLAQIGDQYADLFLAAKNLSDAILLSDILRVNTEITKAPLSASMIKRYDEHHQDLTLLKALVRQQLPEKYKEIFFDQSKNGYAGYIDGGASQEEFYKFIKPILEKMDGTEELLVKLNREDLLRKQRTFDNGSIPHQIHLGELHAILRRQEDFYPFLKDNREKIEKILTFRIPYYVGPLARGNSRFAWMTRKSEETITPWNFEEVVDKGASAQSFIERMTNFDKNLPNEKVLPKHSLLYEYFTVYNELTKVKYVTEGMRKPAFLSGEQKKAIVDLLFKTNRKVTVKQLKEDYFKKIECFDSVEISGVEDRFNASLGTYHDLLKIIKDKDFLDNEENEDILEDIVLTLTLFEDREMIEERLKTYAHLFDDKVMKQLKRRRYTGWGRLSRKLINGIRDKQSGKTILDFLKSDGFANRNFMQLIHDDSLTFKEDIQKAQVSGQGDSLHEHIANLAGSPAIKKGILQTVKVVDELVKVMGRHKPENIVIEMARENQTTQKGQKNSRERMKRIEEGIKELGSQILKEHPVENTQLQNEKLYLYYLQNGRDMYVDQELDINRLSDYDVDHIVPQSFLKDDSIDNKVLTRSDKARGKSDNVPSEEVVKKMKNYWRQLLNAKLITQRKFDNLTKAERGGLSELDKAGFIKRQLVETRQITKHVAQILDSRMNTKYDENDKLIREVKVITLKSKLVSDFRKDFQFYKVREINNYHHAHDAYLNAVVGTALIKKYPKLESEFVYGDYKVYDVRKMIAKSEQEIGKATAKYFFYSNIMNFFKTEITLANGEIRKRPLIETNGETGEIVWDKGRDFATVRKVLSMPQVNIVKKTEVQTGGFSKESILPKRNSDKLIARKKDWDPKKYGGFDSPTVAYSVLVVAKVEKGKSKKLKSVKELLGITIMERSSFEKNPIDFLEAKGYKEVKKDLIIKLPKYSLFELENGRKRMLASAGELQKGNELALPSKYVNFLYLASHYEKLKGSPEDNEQKQLFVEQHKHYLDEIIEQISEFSKRVILADANLDKVLSAYNKHRDKPIREQAENIIHLFTLTNLGAPAAFKYFDTTIDRKRYTSTKEVLDATLIHQSITGLYETRIDLSQLGGDGGGGSGGGPAPGGVPWLTQQPLQLTILVPLQEYQEKILSKTALPEDQKQQLKTLFVKYDNLWQHWENQVGHRKIRPHNIATGDYPPRPQKQYPINPKAKPSIQIVIDDLLKQGVLTPQNSTMNTPVYPVPKPDGRWRMVLDYREVNKTIPLTAAQNQHSAGILATIVRQKYKTTLDLANGFWAHPITPESYWLTAFTWQGKQYCWTRLPQGFLNSPALFNADVVDLLKEIPNVQVYVDDIYLSHDDPKEHVQQLEKVFQILLQAGYVVSLKKSEIGQKTVEFLGFNITKEGRGLTDTFKTKLLNITPPKDLKQLQSILGLLNFARNFIPNFAELVQPLYNLIAPAKGKYIEWSEENTKQLNMVIEALNTASNLEERLPEQRLVIKVNTSPSAGYVRYYNETGKKPIMYLNYVFSKAELKFSMLEKLLTTMHKALIKAMDLAMGQEILVYSPIVSMTKIQKTPLPERKALPIRWITWMTYLEDPRIQFHYDKTLPELKHIPDVYTSSQSPVKHPSQYEGVFYTDGSAIKSPDPTKSNNAGMGIVHATYKPEYQVLNQWSIPLGNHTAQMAEIAAVEFACKKALKIPGPVLVITDSFYVAESANKELPYWKSNGFVNNKKKPLKHISKWKSIAECLSMKPDITIQHEKGISLQIPVFILKGNALADKLATQGSYVVNAGKRTADGSEFEKRTADGSEFESPKKKAKVE

SEQ ID NO: 1311 - protein, 2122 aa, synthetic construct
MPAAKRVKLDGGDKKYSIGLDIGTNSVGWAVITDEYKVPSKKFKVLGNTDRHSIKKNLIGALLFDSGETAEATRLKRTARRRYTRRKNRICYLQEIFSNEMAKVDDSFFHRLEESFLVEEDKKHERHPIFGNIVDEVAYHEKYPTIYHLRKKLVDSTDKADLRLIYLALAHMIKFRGHFLIEGDLNPDNSDVDKLFIQLVQTYNQLFEENPINASGVDAKAILSARLSKSRRLENLIAQLPGEKKNGLFGNLIALSLGLTPNFKSNFDLAEDAKLQLSKDTYDDDLDNLLAQIGDQYADLFLAAKNLSDAILLSDILRVNTEITKAPLSASMIKRYDEHHQDLTLLKALVRQQLPEKYKEIFFDQSKNGYAGYIDGGASQEEFYKFIKPILEKMDGTEELLVKLNREDLLRKQRTFDNGSIPHQIHLGELHAILRRQEDFYPFLKDNREKIEKILTFRIPYYVGPLARGNSRFAWMTRKSEETITPWNFEEVVDKGASAQSFIERMTNFDKNLPNEKVLPKHSLLYEYFTVYNELTKVKYVTEGMRKPAFLSGEQKKAIVDLLFKTNRKVTVKQLKEDYFKKIECFDSVEISGVEDRFNASLGTYHDLLKIIKDKDFLDNEENEDILEDIVLTLTLFEDREMIEERLKTYAHLFDDKVMKQLKRRRYTGWGRLSRKLINGIRDKQSGKTILDFLKSDGFANRNFMQLIHDDSLTFKEDIQKAQVSGQGDSLHEHIANLAGSPAIKKGILQTVKVVDELVKVMGRHKPENIVIEMARENQTTQKGQKNSRERMKRIEEGIKELGSQILKEHPVENTQLQNEKLYLYYLQNGRDMYVDQELDINRLSDYDVDHIVPQSFLKDDSIDNKVLTRSDKARGKSDNVPSEEVVKKMKNYWRQLLNAKLITQRKFDNLTKAERGGLSELDKAGFIKRQLVETRQITKHVAQILDSRMNTKYDENDKLIREVKVITLKSKLVSDFRKDFQFYKVREINNYHHAHDAYLNAVVGTALIKKYPKLESEFVYGDYKVYDVRKMIAKSEQEIGKATAKYFFYSNIMNFFKTEITLANGEIRKRPLIETNGETGEIVWDKGRDFATVRKVLSMPQVNIVKKTEVQTGGFSKESILPKRNSDKLIARKKDWDPKKYGGFDSPTVAYSVLVVAKVEKGKSKKLKSVKELLGITIMERSSFEKNPIDFLEAKGYKEVKKDLIIKLPKYSLFELENGRKRMLASAGELQKGNELALPSKYVNFLYLASHYEKLKGSPEDNEQKQLFVEQHKHYLDEIIEQISEFSKRVILADANLDKVLSAYNKHRDKPIREQAENIIHLFTLTNLGAPAAFKYFDTTIDRKRYTSTKEVLDATLIHQSITGLYETRIDLSQLGGDGGAEAAAKEAAAKEAAAKEAAAKALEAEAAAKEAAAKEAAAKEAAAKAGGVPWLTQQPLQLTILVPLQEYQEKILSKTALPEDQKQQLKTLFVKYDNLWQHWENQVGHRKIRPHNIATGDYPPRPQKQYPINPKAKPSIQIVIDDLLKQGVLTPQNSTMNTPVYPVPKPDGRWRMVLDYREVNKTIPLTAAQNQHSAGILATIVRQKYKTTLDLANGFWAHPITPESYWLTAFTWQGKQYCWTRLPQGFLNSPALFNADVVDLLKEIPNVQVYVDDIYLSHDDPKEHVQQLEKVFQILLQAGYVVSLKKSEIGQKTVEFLGFNITKEGRGLTDTFKTKLLNITPPKDLKQLQSILGKLNFARNFIPNFAELVQPLYNLIAPAKGKYIEWSEENTKQLNMVIEALNTASNLEERLPEQRLVIKVNTSPSAGYVRYYNETGKKPIMYLNYVFSKAELKFSMLEKLLTTMHKALIKAMDLAMGQEILVYSPIVSMTKIQKTPLPERKALPIRWITWMTYLEDPRIQFHYDKTLPELKHIPDVYTSSQSPVKHPSQYEGVFYTDGSAIKSPDPTKSNNAGMGIVHATYKPEYQVLNQWSIPLGNHTAQMAEIAAVEFACKKALKIPGPVLVITDSFYVAESANKELPYWKSNGFVNNKKKPLKHISKWKSIAECLSMKPDITIQHEKGISLQIPVFILKGNALADKLATQGSYVVNAGKRTADGSEFEKRTADGSEFESPKKKAKVE

SEQ ID NO: 1312 - protein, 2092 aa, synthetic construct
MPAAKRVKLDGGDKKYSIGLDIGTNSVGWAVITDEYKVPSKKFKVLGNTDRHSIKKNLIGALLFDSGETAEATRLKRTARRRYTRRKNRICYLQEIFSNEMAKVDDSFFHRLEESFLVEEDKKHERHPIFGNIVDEVAYHEKYPTIYHLRKKLVDSTDKADLRLIYLALAHMIKFRGHFLIEGDLNPDNSDVDKLFIQLVQTYNQLFEENPINASGVDAKAILSARLSKSRRLENLIAQLPGEKKNGLFGNLIALSLGLTPNFKSNFDLAEDAKLQLSKDTYDDDLDNLLAQIGDQYADLFLAAKNLSDAILLSDILRVNTEITKAPLSASMIKRYDEHHQDLTLLKALVRQQLPEKYKEIFFDQSKNGYAGYIDGGASQEEFYKFIKPILEKMDGTEELLVKLNREDLLRKQRTFDNGSIPHQIHLGELHAILRRQEDFYPFLKDNREKIEKILTFRIPYYVGPLARGNSRFAWMTRKSEETITPWNFEEVVDKGASAQSFIERMTNFDKNLPNEKVLPKHSLLYEYFTVYNELTKVKYVTEGMRKPAFLSGEQKKAIVDLLFKTNRKVTVKQLKEDYFKKIECFDSVEISGVEDRFNASLGTYHDLLKIIKDKDFLDNEENEDILEDIVLTLTLFEDREMIEERLKTYAHLFDDKVMKQLKRRRYTGWGRLSRKLINGIRDKQSGKTILDFLKSDGFANRNFMQLIHDDSLTFKEDIQKAQVSGQGDSLHEHIANLAGSPAIKKGILQTVKVVDELVKVMGRHKPENIVIEMARENQTTQKGQKNSRERMKRIEEGIKELGSQILKEHPVENTQLQNEKLYLYYLQNGRDMYVDQELDINRLSDYDVDHIVPQSFLKDDSIDNKVLTRSDKARGKSDNVPSEEVVKKMKNYWRQLLNAKLITQRKFDNLTKAERGGLSELDKAGFIKRQLVETRQITKHVAQILDSRMNTKYDENDKLIREVKVITLKSKLVSDFRKDFQFYKVREINNYHHAHDAYLNAVVGTALIKKYPKLESEFVYGDYKVYDVRKMIAKSEQEIGKATAKYFFYSNIMNFFKTEITLANGEIRKRPLIETNGETGEIVWDKGRDFATVRKVLSMPQVNIVKKTEVQTGGFSKESILPKRNSDKLIARKKDWDPKKYGGFDSPTVAYSVLVVAKVEKGKSKKLKSVKELLGITIMERSSFEKNPIDFLEAKGYKEVKKDLIIKLPKYSLFELENGRKRMLASAGELQKGNELALPSKYVNFLYLASHYEKLKGSPEDNEQKQLFVEQHKHYLDEIIEQISEFSKRVILADANLDKVLSAYNKHRDKPIREQAENIIHLFTLTNLGAPAAFKYFDTTIDRKRYTSTKEVLDATLIHQSITGLYETRIDLSQLGGDGGSGSETPGTSESATPESGGVPWLTQQPLQLTILVPLQEYQEKILSKTALPEDQKQQLKTLFVKYDNLWQHWENQVGHRKIRPHNIATGDYPPRPQKQYPINPKAKPSIQIVIDDLLKQGVLTPQNSTMNTPVYPVPKPDGRWRMVLDYREVNKTIPLTAAQNQHSAGILATIVRQKYKTTLDLANGFWAHPITPESYWLTAFTWQGKQYCWTRLPQGFLNSPALFNADVVDLLKEIPNVQVYVDDIYLSHDDPKEHVQQLEKVFQILLQAGYVVSLKKSEIGQKTVEFLGFNITKEGRGLTDTFKTKLLNITPPKDLKQLQSILGKLNFARNFIPNFAELVQPLYNLIAPAKGKYIEWSEENTKQLNMVIEALNTASNLEERLPEQRLVIKVNTSPSAGYVRYYNETGKKPIMYLNYVFSKAELKFSMLEKLLTTMHKALIKAMDLAMGQEILVYSPIVSMTKIQKTPLPERKALPIRWITWMTYLEDPRIQFHYDKTLPELKHIPDVYTSSQSPVKHPSQYEGVFYTDGSAIKSPDPTKSNNAGMGIVHATYKPEYQVLNQWSIPLGNHTAQMAEIAAVEFACKKALKIPGPVLVITDSFYVAESANKELPYWKSNGFVNNKKKPLKHISKWKSIAECLSMKPDITIQHEKGISLQIPVFILKGNALADKLATQGSYVVNAGKRTADGSEFEKRTADGSEFESPKKKAKVE

SEQ ID NO: 1313 - protein, 2096 aa, synthetic construct
MPAAKRVKLDGGDKKYSIGLDIGTNSVGWAVITDEYKVPSKKFKVLGNTDRHSIKKNLIGALLFDSGETAEATRLKRTARRRYTRRKNRICYLQEIFSNEMAKVDDSFFHRLEESFLVEEDKKHERHPIFGNIVDEVAYHEKYPTIYHLRKKLVDSTDKADLRLIYLALAHMIKFRGHFLIEGDLNPDNSDVDKLFIQLVQTYNQLFEENPINASGVDAKAILSARLSKSRRLENLIAQLPGEKKNGLFGNLIALSLGLTPNFKSNFDLAEDAKLQLSKDTYDDDLDNLLAQIGDQYADLFLAAKNLSDAILLSDILRVNTEITKAPLSASMIKRYDEHHQDLTLLKALVRQQLPEKYKEIFFDQSKNGYAGYIDGGASQEEFYKFIKPILEKMDGTEELLVKLNREDLLRKQRTFDNGSIPHQIHLGELHAILRRQEDFYPFLKDNREKIEKILTFRIPYYVGPLARGNSRFAWMTRKSEETITPWNFEEVVDKGASAQSFIERMTNFDKNLPNEKVLPKHSLLYEYFTVYNELTKVKYVTEGMRKPAFLSGEQKKAIVDLLFKTNRKVTVKQLKEDYFKKIECFDSVEISGVEDRFNASLGTYHDLLKIIKDKDFLDNEENEDILEDIVLTLTLFEDREMIEERLKTYAHLFDDKVMKQLKRRRYTGWGRLSRKLINGIRDKQSGKTILDFLKSDGFANRNFMQLIHDDSLTFKEDIQKAQVSGQGDSLHEHIANLAGSPAIKKGILQTVKVVDELVKVMGRHKPENIVIEMARENQTTQKGQKNSRERMKRIEEGIKELGSQILKEHPVENTQLQNEKLYLYYLQNGRDMYVDQELDINRLSDYDVDHIVPQSFLKDDSIDNKVLTRSDKARGKSDNVPSEEVVKKMKNYWRQLLNAKLITQRKFDNLTKAERGGLSELDKAGFIKRQLVETRQITKHVAQILDSRMNTKYDENDKLIREVKVITLKSKLVSDFRKDFQFYKVREINNYHHAHDAYLNAVVGTALIKKYPKLESEFVYGDYKVYDVRKMIAKSEQEIGKATAKYFFYSNIMNFFKTEITLANGEIRKRPLIETNGETGEIVWDKGRDFATVRKVLSMPQVNIVKKTEVQTGGFSKESILPKRNSDKLIARKKDWDPKKYGGFDSPTVAYSVLVVAKVEKGKSKKLKSVKELLGITIMERSSFEKNPIDFLEAKGYKEVKKDLIIKLPKYSLFELENGRKRMLASAGELQKGNELALPSKYVNFLYLASHYEKLKGSPEDNEQKQLFVEQHKHYLDEIIEQISEFSKRVILADANLDKVLSAYNKHRDKPIREQAENIIHLFTLTNLGAPAAFKYFDTTIDRKRYTSTKEVLDATLIHQSITGLYETRIDLSQLGGDGGEAAAKEAAAKEAAAKEAAAKGGVPWLTQQPLQLTILVPLQEYQEKILSKTALPEDQKQQLKTLFVKYDNLWQHWENQVGHRKIRPHNIATGDYPPRPQKQYPINPKAKPSIQIVIDDLLKQGVLTPQNSTMNTPVYPVPKPDGRWRMVLDYREVNKTIPLTAAQNQHSAGILATIVRQKYKTTLDLANGFWAHPITPESYWLTAFTWQGKQYCWTRLPQGFLNSPALFNADVVDLLKEIPNVQVYVDDIYLSHDDPKEHVQQLEKVFQILLQAGYVVSLKKSEIGQKTVEFLGFNITKEGRGLTDTFKTKLLNITPPKDLKQLQSILGKLNFARNFIPNFAELVQPLYNLIAPAKGKYIEWSEENTKQLNMVIEALNTASNLEERLPEQRLVIKVNTSPSAGYVRYYNETGKKPIMYLNYVFSKAELKFSMLEKLLTTMHKALIKAMDLAMGQEILVYSPIVSMTKIQKTPLPERKALPIRWITWMTYLEDPRIQFHYDKTLPELKHIPDVYTSSQSPVKHPSQYEGVFYTDGSAIKSPDPTKSNNAGMGIVHATYKPEYQVLNQWSIPLGNHTAQMAEIAAVEFACKKALKIPGPVLVITDSFYVAESANKELPYWKSNGFVNNKKKPLKHISKWKSIAECLSMKPDITIQHEKGISLQIPVFILKGNALADKLATQGSYVVNAGKRTADGSEFEKRTADGSEFESPKKKAKVE

SEQ ID NO: 1314 - protein, 2096 aa, synthetic construct
MPAAKRVKLDGGDKKYSIGLDIGTNSVGWAVITDEYKVPSKKFKVLGNTDRHSIKKNLIGALLFDSGETAEATRLKRTARRRYTRRKNRICYLQEIFSNEMAKVDDSFFHRLEESFLVEEDKKHERHPIFGNIVDEVAYHEKYPTIYHLRKKLVDSTDKADLRLIYLALAHMIKFRGHFLIEGDLNPDNSDVDKLFIQLVQTYNQLFEENPINASGVDAKAILSARLSKSRRLENLIAQLPGEKKNGLFGNLIALSLGLTPNFKSNFDLAEDAKLQLSKDTYDDDLDNLLAQIGDQYADLFLAAKNLSDAILLSDILRVNTEITKAPLSASMIKRYDEHHQDLTLLKALVRQQLPEKYKEIFFDQSKNGYAGYIDGGASQEEFYKFIKPILEKMDGTEELLVKLNREDLLRKQRTFDNGSIPHQIHLGELHAILRRQEDFYPFLKDNREKIEKILTFRIPYYVGPLARGNSRFAWMTRKSEETITPWNFEEVVDKGASAQSFIERMTNFDKNLPNEKVLPKHSLLYEYFTVYNELTKVKYVTEGMRKPAFLSGEQKKAIVDLLFKTNRKVTVKQLKEDYFKKIECFDSVEISGVEDRFNASLGTYHDLLKIIKDKDFLDNEENEDILEDIVLTLTLFEDREMIEERLKTYAHLFDDKVMKQLKRRRYTGWGRLSRKLINGIRDKQSGKTILDFLKSDGFANRNFMQLIHDDSLTFKEDIQKAQVSGQGDSLHEHIANLAGSPAIKKGILQTVKVVDELVKVMGRHKPENIVIEMARENQTTQKGQKNSRERMKRIEEGIKELGSQILKEHPVENTQLQNEKLYLYYLQNGRDMYVDQELDINRLSDYDVDHIVPQSFLKDDSIDNKVLTRSDKARGKSDNVPSEEVVKKMKNYWRQLLNAKLITQRKFDNLTKAERGGLSELDKAGFIKRQLVETRQITKHVAQILDSRMNTKYDENDKLIREVKVITLKSKLVSDFRKDFQFYKVREINNYHHAHDAYLNAVVGTALIKKYPKLESEFVYGDYKVYDVRKMIAKSEQEIGKATAKYFFYSNIMNFFKTEITLANGEIRKRPLIETNGETGEIVWDKGRDFATVRKVLSMPQVNIVKKTEVQTGGFSKESILPKRNSDKLIARKKDWDPKKYGGFDSPTVAYSVLVVAKVEKGKSKKLKSVKELLGITIMERSSFEKNPIDFLEAKGYKEVKKDLIIKLPKYSLFELENGRKRMLASAGELQKGNELALPSKYVNFLYLASHYEKLKGSPEDNEQKQLFVEQHKHYLDEIIEQISEFSKRVILADANLDKVLSAYNKHRDKPIREQAENIIHLFTLTNLGAPAAFKYFDTTIDRKRYTSTKEVLDATLIHQSITGLYETRIDLSQLGGDGGGGGGSGGGGSGGGGSGGGGSGGVPWLTQQPLQLTILVPLQEYQEKILSKTALPEDQKQQLKTLFVKYDNLWQHWENQVGHRKIRPHNIATGDYPPRPQKQYPINPKAKPSIQIVIDDLLKQGVLTPQNSTMNTPVYPVPKPDGRWRMVLDYREVNKTIPLTAAQNQHSAGILATIVRQKYKTTLDLANGFWAHPITPESYWLTAFTWQGKQYCWTRLPQGFLNSPALFNADVVDLLKEIPNVQVYVDDIYLSHDDPKEHVQQLEKVFQILLQAGYVVSLKKSEIGQKTVEFLGFNITKEGRGLTDTFKTKLLNITPPKDLKQLQSILGKLNFARNFIPNFAELVQPLYNLIAPAKGKYIEWSEENTKQLNMVIEALNTASNLEERLPEQRLVIKVNTSPSAGYVRYYNETGKKPIMYLNYVFSKAELKFSMLEKLLTTMHKALIKAMDLAMGQEILVYSPIVSMTKIQKTPLPERKALPIRWITWMTYLEDPRIQFHYDKTLPELKHIPDVYTSSQSPVKHPSQYEGVFYTDGSAIKSPDPTKSNNAGMGIVHATYKPEYQVLNQWSIPLGNHTAQMAEIAAVEFACKKALKIPGPVLVITDSFYVAESANKELPYWKSNGFVNNKKKPLKHISKWKSIAECLSMKPDITIQHEKGISLQIPVFILKGNALADKLATQGSYVVNAGKRTADGSEFEKRTADGSEFESPKKKAKVE

SEQ ID NO: 1315 - protein, 2087 aa, synthetic construct
MPAAKRVKLDGGDKKYSIGLDIGTNSVGWAVITDEYKVPSKKFKVLGNTDRHSIKKNLIGALLFDSGETAEATRLKRTARRRYTRRKNRICYLQEIFSNEMAKVDDSFFHRLEESFLVEEDKKHERHPIFGNIVDEVAYHEKYPTIYHLRKKLVDSTDKADLRLIYLALAHMIKFRGHFLIEGDLNPDNSDVDKLFIQLVQTYNQLFEENPINASGVDAKAILSARLSKSRRLENLIAQLPGEKKNGLFGNLIALSLGLTPNFKSNFDLAEDAKLQLSKDTYDDDLDNLLAQIGDQYADLFLAAKNLSDAILLSDILRVNTEITKAPLSASMIKRYDEHHQDLTLLKALVRQQLPEKYKEIFFDQSKNGYAGYIDGGASQEEFYKFIKPILEKMDGTEELLVKLNREDLLRKQRTFDNGSIPHQIHLGELHAILRRQEDFYPFLKDNREKIEKILTFRIPYYVGPLARGNSRFAWMTRKSEETITPWNFEEVVDKGASAQSFIERMTNFDKNLPNEKVLPKHSLLYEYFTVYNELTKVKYVTEGMRKPAFLSGEQKKAIVDLLFKTNRKVTVKQLKEDYFKKIECFDSVEISGVEDRFNASLGTYHDLLKIIKDKDFLDNEENEDILEDIVLTLTLFEDREMIEERLKTYAHLFDDKVMKQLKRRRYTGWGRLSRKLINGIRDKQSGKTILDFLKSDGFANRNFMQLIHDDSLTFKEDIQKAQVSGQGDSLHEHIANLAGSPAIKKGILQTVKVVDELVKVMGRHKPENIVIEMARENQTTQKGQKNSRERMKRIEEGIKELGSQILKEHPVENTQLQNEKLYLYYLQNGRDMYVDQELDINRLSDYDVDHIVPQSFLKDDSIDNKVLTRSDKARGKSDNVPSEEVVKKMKNYWRQLLNAKLITQRKFDNLTKAERGGLSELDKAGFIKRQLVETRQITKHVAQILDSRMNTKYDENDKLIREVKVITLKSKLVSDFRKDFQFYKVREINNYHHAHDAYLNAVVGTALIKKYPKLESEFVYGDYKVYDVRKMIAKSEQEIGKATAKYFFYSNIMNFFKTEITLANGEIRKRPLIETNGETGEIVWDKGRDFATVRKVLSMPQVNIVKKTEVQTGGFSKESILPKRNSDKLIARKKDWDPKKYGGFDSPTVAYSVLVVAKVEKGKSKKLKSVKELLGITIMERSSFEKNPIDFLEAKGYKEVKKDLIIKLPKYSLFELENGRKRMLASAGELQKGNELALPSKYVNFLYLASHYEKLKGSPEDNEQKQLFVEQHKHYLDEIIEQISEFSKRVILADANLDKVLSAYNKHRDKPIREQAENIIHLFTLTNLGAPAAFKYFDTTIDRKRYTSTKEVLDATLIHQSITGLYETRIDLSQLGGDGGGSSPAPEAAAKGGVPWLTQQPLQLTILVPLQEYQEKILSKTALPEDQKQQLKTLFVKYDNLWQHWENQVGHRKIRPHNIATGDYPPRPQKQYPINPKAKPSIQIVIDDLLKQGVLTPQNSTMNTPVYPVPKPDGRWRMVLDYREVNKTIPLTAAQNQHSAGILATIVRQKYKTTLDLANGFWAHPITPESYWLTAFTWQGKQYCWTRLPQGFLNSPALFNADVVDLLKEIPNVQVYVDDIYLSHDDPKEHVQQLEKVFQILLQAGYVVSLKKSEIGQKTVEFLGFNITKEGRGLTDTFKTKLLNITPPKDLKQLQSILGKLNFARNFIPNFAELVQPLYNLIAPAKGKYIEWSEENTKQLNMVIEALNTASNLEERLPEQRLVIKVNTSPSAGYVRYYNETGKKPIMYLNYVFSKAELKFSMLEKLLTTMHKALIKAMDLAMGQEILVYSPIVSMTKIQKTPLPERKALPIRWITWMTYLEDPRIQFHYDKTLPELKHIPDVYTSSQSPVKHPSQYEGVFYTDGSAIKSPDPTKSNNAGMGIVHATYKPEYQVLNQWSIPLGNHTAQMAEIAAVEFACKKALKIPGPVLVITDSFYVAESANKELPYWKSNGFVNNKKKPLKHISKWKSIAECLSMKPDITIQHEKGISLQIPVFILKGNALADKLATQGSYVVNAGKRTADGSEFEKRTADGSEFESPKKKAKVE

SEQ ID NO: 1316 - protein, 2086 aa, synthetic construct
MPAAKRVKLDGGDKKYSIGLDIGTNSVGWAVITDEYKVPSKKFKVLGNTDRHSIKKNLIGALLFDSGETAEATRLKRTARRRYTRRKNRICYLQEIFSNEMAKVDDSFFHRLEESFLVEEDKKHERHPIFGNIVDEVAYHEKYPTIYHLRKKLVDSTDKADLRLIYLALAHMIKFRGHFLIEGDLNPDNSDVDKLFIQLVQTYNQLFEENPINASGVDAKAILSARLSKSRRLENLIAQLPGEKKNGLFGNLIALSLGLTPNFKSNFDLAEDAKLQLSKDTYDDDLDNLLAQIGDQYADLFLAAKNLSDAILLSDILRVNTEITKAPLSASMIKRYDEHHQDLTLLKALVRQQLPEKYKEIFFDQSKNGYAGYIDGGASQEEFYKFIKPILEKMDGTEELLVKLNREDLLRKQRTFDNGSIPHQIHLGELHAILRRQEDFYPFLKDNREKIEKILTFRIPYYVGPLARGNSRFAWMTRKSEETITPWNFEEVVDKGASAQSFIERMTNFDKNLPNEKVLPKHSLLYEYFTVYNELTKVKYVTEGMRKPAFLSGEQKKAIVDLLFKTNRKVTVKQLKEDYFKKIECFDSVEISGVEDRFNASLGTYHDLLKIIKDKDFLDNEENEDILEDIVLTLTLFEDREMIEERLKTYAHLFDDKVMKQLKRRRYTGWGRLSRKLINGIRDKQSGKTILDFLKSDGFANRNFMQLIHDDSLTFKEDIQKAQVSGQGDSLHEHIANLAGSPAIKKGILQTVKVVDELVKVMGRHKPENIVIEMARENQTTQKGQKNSRERMKRIEEGIKELGSQILKEHPVENTQLQNEKLYLYYLQNGRDMYVDQELDINRLSDYDVDHIVPQSFLKDDSIDNKVLTRSDKARGKSDNVPSEEVVKKMKNYWRQLLNAKLITQRKFDNLTKAERGGLSELDKAGFIKRQLVETRQITKHVAQILDSRMNTKYDENDKLIREVKVITLKSKLVSDFRKDFQFYKVREINNYHHAHDAYLNAVVGTALIKKYPKLESEFVYGDYKVYDVRKMIAKSEQEIGKATAKYFFYSNIMNFFKTEITLANGEIRKRPLIETNGETGEIVWDKGRDFATVRKVLSMPQVNIVKKTEVQTGGFSKESILPKRNSDKLIARKKDWDPKKYGGFDSPTVAYSVLVVAKVEKGKSKKLKSVKELLGITIMERSSFEKNPIDFLEAKGYKEVKKDLIIKLPKYSLFELENGRKRMLASAGELQKGNELALPSKYVNFLYLASHYEKLKGSPEDNEQKQLFVEQHKHYLDEIIEQISEFSKRVILADANLDKVLSAYNKHRDKPIREQAENIIHLFTLTNLGAPAAFKYFDTTIDRKRYTSTKEVLDATLIHQSITGLYETRIDLSQLGGDGGGGGGSGGGGSGGVPWLTQQPLQLTILVPLQEYQEKILSKTALPEDQKQQLKTLFVKYDNLWQHWENQVGHRKIRPHNIATGDYPPRPQKQYPINPKAKPSIQIVIDDLLKQGVLTPQNSTMNTPVYPVPKPDGRWRMVLDYREVNKTIPLTAAQNQHSAGILATIVRQKYKTTLDLANGFWAHPITPESYWLTAFTWQGKQYCWTRLPQGFLNSPALFNADVVDLLKEIPNVQVYVDDIYLSHDDPKEHVQQLEKVFQILLQAGYVVSLKKSEIGQKTVEFLGFNITKEGRGLTDTFKTKLLNITPPKDLKQLQSILGKLNFARNFIPNFAELVQPLYNLIAPAKGKYIEWSEENTKQLNMVIEALNTASNLEERLPEQRLVIKVNTSPSAGYVRYYNETGKKPIMYLNYVFSKAELKFSMLEKLLTTMHKALIKAMDLAMGQEILVYSPIVSMTKIQKTPLPERKALPIRWITWMTYLEDPRIQFHYDKTLPELKHIPDVYTSSQSPVKHPSQYEGVFYTDGSAIKSPDPTKSNNAGMGIVHATYKPEYQVLNQWSIPLGNHTAQMAEIAAVEFACKKALKIPGPVLVITDSFYVAESANKELPYWKSNGFVNNKKKPLKHISKWKSIAECLSMKPDITIQHEKGISLQIPVFILKGNALADKLATQGSYVVNAGKRTADGSEFEKRTADGSEFESPKKKAKVE

SEQ ID NO: 1317 - protein, 2087 aa, synthetic construct
MPAAKRVKLDGGDKKYSIGLDIGTNSVGWAVITDEYKVPSKKFKVLGNTDRHSIKKNLIGALLFDSGETAEATRLKRTARRRYTRRKNRICYLQEIFSNEMAKVDDSFFHRLEESFLVEEDKKHERHPIFGNIVDEVAYHEKYPTIYHLRKKLVDSTDKADLRLIYLALAHMIKFRGHFLIEGDLNPDNSDVDKLFIQLVQTYNQLFEENPINASGVDAKAILSARLSKSRRLENLIAQLPGEKKNGLFGNLIALSLGLTPNFKSNFDLAEDAKLQLSKDTYDDDLDNLLAQIGDQYADLFLAAKNLSDAILLSDILRVNTEITKAPLSASMIKRYDEHHQDLTLLKALVRQQLPEKYKEIFFDQSKNGYAGYIDGGASQEEFYKFIKPILEKMDGTEELLVKLNREDLLRKQRTFDNGSIPHQIHLGELHAILRRQEDFYPFLKDNREKIEKILTFRIPYYVGPLARGNSRFAWMTRKSEETITPWNFEEVVDKGASAQSFIERMTNFDKNLPNEKVLPKHSLLYEYFTVYNELTKVKYVTEGMRKPAFLSGEQKKAIVDLLFKTNRKVTVKQLKEDYFKKIECFDSVEISGVEDRFNASLGTYHDLLKIIKDKDFLDNEENEDILEDIVLTLTLFEDREMIEERLKTYAHLFDDKVMKQLKRRRYTGWGRLSRKLINGIRDKQSGKTILDFLKSDGFANRNFMQLIHDDSLTFKEDIQKAQVSGQGDSLHEHIANLAGSPAIKKGILQTVKVVDELVKVMGRHKPENIVIEMARENQTTQKGQKNSRERMKRIEEGIKELGSQILKEHPVENTQLQNEKLYLYYLQNGRDMYVDQELDINRLSDYDVDHIVPQSFLKDDSIDNKVLTRSDKARGKSDNVPSEEVVKKMKNYWRQLLNAKLITQRKFDNLTKAERGGLSELDKAGFIKRQLVETRQITKHVAQILDSRMNTKYDENDKLIREVKVITLKSKLVSDFRKDFQFYKVREINNYHHAHDAYLNAVVGTALIKKYPKLESEFVYGDYKVYDVRKMIAKSEQEIGKATAKYFFYSNIMNFFKTEITLANGEIRKRPLIETNGETGEIVWDKGRDFATVRKVLSMPQVNIVKKTEVQTGGFSKESILPKRNSDKLIARKKDWDPKKYGGFDSPTVAYSVLVVAKVEKGKSKKLKSVKELLGITIMERSSFEKNPIDFLEAKGYKEVKKDLIIKLPKYSLFELENGRKRMLASAGELQKGNELALPSKYVNFLYLASHYEKLKGSPEDNEQKQLFVEQHKHYLDEIIEQISEFSKRVILADANLDKVLSAYNKHRDKPIREQAENIIHLFTLTNLGAPAAFKYFDTTIDRKRYTSTKEVLDATLIHQSITGLYETRIDLSQLGGDGGPAPGSSEAAAKGGVPWLTQQPLQLTILVPLQEYQEKILSKTALPEDQKQQLKTLFVKYDNLWQHWENQVGHRKIRPHNIATGDYPPRPQKQYPINPKAKPSIQIVIDDLLKQGVLTPQNSTMNTPVYPVPKPDGRWRMVLDYREVNKTIPLTAAQNQHSAGILATIVRQKYKTTLDLANGFWAHPITPESYWLTAFTWQGKQYCWTRLPQGFLNSPALFNADVVDLLKEIPNVQVYVDDIYLSHDDPKEHVQQLEKVFQILLQAGYVVSLKKSEIGQKTVEFLGFNITKEGRGLTDTFKTKLLNITPPKDLKQLQSILGKLNFARNFIPNFAELVQPLYNLIAPAKGKYIEWSEENTKQLNMVIEALNTASNLEERLPEQRLVIKVNTSPSAGYVRYYNETGKKPIMYLNYVFSKAELKFSMLEKLLTTMHKALIKAMDLAMGQEILVYSPIVSMTKIQKTPLPERKALPIRWITWMTYLEDPRIQFHYDKTLPELKHIPDVYTSSQSPVKHPSQYEGVFYTDGSAIKSPDPTKSNNAGMGIVHATYKPEYQVLNQWSIPLGNHTAQMAEIAAVEFACKKALKIPGPVLVITDSFYVAESANKELPYWKSNGFVNNKKKPLKHISKWKSIAECLSMKPDITIQHEKGISLQIPVFILKGNALADKLATQGSYVVNAGKRTADGSEFEKRTADGSEFESPKKKAKVE

SEQ ID NO: 1318 - protein, 2087 aa, synthetic construct
MPAAKRVKLDGGDKKYSIGLDIGTNSVGWAVITDEYKVPSKKFKVLGNTDRHSIKKNLIGALLFDSGETAEATRLKRTARRRYTRRKNRICYLQEIFSNEMAKVDDSFFHRLEESFLVEEDKKHERHPIFGNIVDEVAYHEKYPTIYHLRKKLVDSTDKADLRLIYLALAHMIKFRGHFLIEGDLNPDNSDVDKLFIQLVQTYNQLFEENPINASGVDAKAILSARLSKSRRLENLIAQLPGEKKNGLFGNLIALSLGLTPNFKSNFDLAEDAKLQLSKDTYDDDLDNLLAQIGDQYADLFLAAKNLSDAILLSDILRVNTEITKAPLSASMIKRYDEHHQDLTLLKALVRQQLPEKYKEIFFDQSKNGYAGYIDGGASQEEFYKFIKPILEKMDGTEELLVKLNREDLLRKQRTFDNGSIPHQIHLGELHAILRRQEDFYPFLKDNREKIEKILTFRIPYYVGPLARGNSRFAWMTRKSEETITPWNFEEVVDKGASAQSFIERMTNFDKNLPNEKVLPKHSLLYEYFTVYNELTKVKYVTEGMRKPAFLSGEQKKAIVDLLFKTNRKVTVKQLKEDYFKKIECFDSVEISGVEDRFNASLGTYHDLLKIIKDKDFLDNEENEDILEDIVLTLTLFEDREMIEERLKTYAHLFDDKVMKQLKRRRYTGWGRLSRKLINGIRDKQSGKTILDFLKSDGFANRNFMQLIHDDSLTFKEDIQKAQVSGQGDSLHEHIANLAGSPAIKKGILQTVKVVDELVKVMGRHKPENIVIEMARENQTTQKGQKNSRERMKRIEEGIKELGSQILKEHPVENTQLQNEKLYLYYLQNGRDMYVDQELDINRLSDYDVDHIVPQSFLKDDSIDNKVLTRSDKARGKSDNVPSEEVVKKMKNYWRQLLNAKLITQRKFDNLTKAERGGLSELDKAGFIKRQLVETRQITKHVAQILDSRMNTKYDENDKLIREVKVITLKSKLVSDFRKDFQFYKVREINNYHHAHDAYLNAVVGTALIKKYPKLESEFVYGDYKVYDVRKMIAKSEQEIGKATAKYFFYSNIMNFFKTEITLANGEIRKRPLIETNGETGEIVWDKGRDFATVRKVLSMPQVNIVKKTEVQTGGFSKESILPKRNSDKLIARKKDWDPKKYGGFDSPTVAYSVLVVAKVEKGKSKKLKSVKELLGITIMERSSFEKNPIDFLEAKGYKEVKKDLIIKLPKYSLFELENGRKRMLASAGELQKGNELALPSKYVNFLYLASHYEKLKGSPEDNEQKQLFVEQHKHYLDEIIEQISEFSKRVILADANLDKVLSAYNKHRDKPIREQAENIIHLFTLTNLGAPAAFKYFDTTIDRKRYTSTKEVLDATLIHQSITGLYETRIDLSQLGGDGGPAPAPAPAPAPGGVPWLTQQPLQLTILVPLQEYQEKILSKTALPEDQKQQLKTLFVKYDNLWQHWENQVGHRKIRPHNIATGDYPPRPQKQYPINPKAKPSIQIVIDDLLKQGVLTPQNSTMNTPVYPVPKPDGRWRMVLDYREVNKTIPLTAAQNQHSAGILATIVRQKYKTTLDLANGFWAHPITPESYWLTAFTWQGKQYCWTRLPQGFLNSPALFNADVVDLLKEIPNVQVYVDDIYLSHDDPKEHVQQLEKVFQILLQAGYVVSLKKSEIGQKTVEFLGFNITKEGRGLTDTFKTKLLNITPPKDLKQLQSILGKLNFARNFIPNFAELVQPLYNLIAPAKGKYIEWSEENTKQLNMVIEALNTASNLEERLPEQRLVIKVNTSPSAGYVRYYNETGKKPIMYLNYVFSKAELKFSMLEKLLTTMHKALIKAMDLAMGQEILVYSPIVSMTKIQKTPLPERKALPIRWITWMTYLEDPRIQFHYDKTLPELKHIPDVYTSSQSPVKHPSQYEGVFYTDGSAIKSPDPTKSNNAGMGIVHATYKPEYQVLNQWSIPLGNHTAQMAEIAAVEFACKKALKIPGPVLVITDSFYVAESANKELPYWKSNGFVNNKKKPLKHISKWKSIAECLSMKPDITIQHEKGISLQIPVFILKGNALADKLATQGSYVVNAGKRTADGSEFEKRTADGSEFESPKKKAKVE

SEQ ID NO: 1319 - protein, 2085 aa, synthetic construct
MPAAKRVKLDGGDKKYSIGLDIGTNSVGWAVITDEYKVPSKKFKVLGNTDRHSIKKNLIGALLFDSGETAEATRLKRTARRRYTRRKNRICYLQEIFSNEMAKVDDSFFHRLEESFLVEEDKKHERHPIFGNIVDEVAYHEKYPTIYHLRKKLVDSTDKADLRLIYLALAHMIKFRGHFLIEGDLNPDNSDVDKLFIQLVQTYNQLFEENPINASGVDAKAILSARLSKSRRLENLIAQLPGEKKNGLFGNLIALSLGLTPNFKSNFDLAEDAKLQLSKDTYDDDLDNLLAQIGDQYADLFLAAKNLSDAILLSDILRVNTEITKAPLSASMIKRYDEHHQDLTLLKALVRQQLPEKYKEIFFDQSKNGYAGYIDGGASQEEFYKFIKPILEKMDGTEELLVKLNREDLLRKQRTFDNGSIPHQIHLGELHAILRRQEDFYPFLKDNREKIEKILTFRIPYYVGPLARGNSRFAWMTRKSEETITPWNFEEVVDKGASAQSFIERMTNFDKNLPNEKVLPKHSLLYEYFTVYNELTKVKYVTEGMRKPAFLSGEQKKAIVDLLFKTNRKVTVKQLKEDYFKKIECFDSVEISGVEDRFNASLGTYHDLLKIIKDKDFLDNEENEDILEDIVLTLTLFEDREMIEERLKTYAHLFDDKVMKQLKRRRYTGWGRLSRKLINGIRDKQSGKTILDFLKSDGFANRNFMQLIHDDSLTFKEDIQKAQVSGQGDSLHEHIANLAGSPAIKKGILQTVKVVDELVKVMGRHKPENIVIEMARENQTTQKGQKNSRERMKRIEEGIKELGSQILKEHPVENTQLQNEKLYLYYLQNGRDMYVDQELDINRLSDYDVDHIVPQSFLKDDSIDNKVLTRSDKARGKSDNVPSEEVVKKMKNYWRQLLNAKLITQRKFDNLTKAERGGLSELDKAGFIKRQLVETRQITKHVAQILDSRMNTKYDENDKLIREVKVITLKSKLVSDFRKDFQFYKVREINNYHHAHDAYLNAVVGTALIKKYPKLESEFVYGDYKVYDVRKMIAKSEQEIGKATAKYFFYSNIMNFFKTEITLANGEIRKRPLIETNGETGEIVWDKGRDFATVRKVLSMPQVNIVKKTEVQTGGFSKESILPKRNSDKLIARKKDWDPKKYGGFDSPTVAYSVLVVAKVEKGKSKKLKSVKELLGITIMERSSFEKNPIDFLEAKGYKEVKKDLIIKLPKYSLFELENGRKRMLASAGELQKGNELALPSKYVNFLYLASHYEKLKGSPEDNEQKQLFVEQHKHYLDEIIEQISEFSKRVILADANLDKVLSAYNKHRDKPIREQAENIIHLFTLTNLGAPAAFKYFDTTIDRKRYTSTKEVLDATLIHQSITGLYETRIDLSQLGGDGGPAPGSSGGGGGVPWLTQQPLQLTILVPLQEYQEKILSKTALPEDQKQQLKTLFVKYDNLWQHWENQVGHRKIRPHNIATGDYPPRPQKQYPINPKAKPSIQIVIDDLLKQGVLTPQNSTMNTPVYPVPKPDGRWRMVLDYREVNKTIPLTAAQNQHSAGILATIVRQKYKTTLDLANGFWAHPITPESYWLTAFTWQGKQYCWTRLPQGFLNSPALFNADVVDLLKEIPNVQVYVDDIYLSHDDPKEHVQQLEKVFQILLQAGYVVSLKKSEIGQKTVEFLGFNITKEGRGLTDTFKTKLLNITPPKDLKQLQSILGKLNFARNFIPNFAELVQPLYNLIAPAKGKYIEWSEENTKQLNMVIEALNTASNLEERLPEQRLVIKVNTSPSAGYVRYYNETGKKPIMYLNYVFSKAELKFSMLEKLLTTMHKALIKAMDLAMGQEILVYSPIVSMTKIQKTPLPERKALPIRWITWMTYLEDPRIQFHYDKTLPELKHIPDVYTSSQSPVKHPSQYEGVFYTDGSAIKSPDPTKSNNAGMGIVHATYKPEYQVLNQWSIPLGNHTAQMAEIAAVEFACKKALKIPGPVLVITDSFYVAESANKELPYWKSNGFVNNKKKPLKHISKWKSIAECLSMKPDITIQHEKGISLQIPVFILKGNALADKLATQGSYVVNAGKRTADGSEFEKRTADGSEFESPKKKAKVE

SEQ ID NO: 1320 - protein, 2176 aa, synthetic construct
MPAAKRVKLDGGDKKYSIGLDIGTNSVGWAVITDEYKVPSKKFKVLGNTDRHSIKKNLIGALLFDSGETAEATRLKRTARRRYTRRKNRICYLQEIFSNEMAKVDDSFFHRLEESFLVEEDKKHERHPIFGNIVDEVAYHEKYPTIYHLRKKLVDSTDKADLRLIYLALAHMIKFRGHFLIEGDLNPDNSDVDKLFIQLVQTYNQLFEENPINASGVDAKAILSARLSKSRRLENLIAQLPGEKKNGLFGNLIALSLGLTPNFKSNFDLAEDAKLQLSKDTYDDDLDNLLAQIGDQYADLFLAAKNLSDAILLSDILRVNTEITKAPLSASMIKRYDEHHQDLTLLKALVRQQLPEKYKEIFFDQSKNGYAGYIDGGASQEEFYKFIKPILEKMDGTEELLVKLNREDLLRKQRTFDNGSIPHQIHLGELHAILRRQEDFYPFLKDNREKIEKILTFRIPYYVGPLARGNSRFAWMTRKSEETITPWNFEEVVDKGASAQSFIERMTNFDKNLPNEKVLPKHSLLYEYFTVYNELTKVKYVTEGMRKPAFLSGEQKKAIVDLLFKTNRKVTVKQLKEDYFKKIECFDSVEISGVEDRFNASLGTYHDLLKIIKDKDFLDNEENEDILEDIVLTLTLFEDREMIEERLKTYAHLFDDKVMKQLKRRRYTGWGRLSRKLINGIRDKQSGKTILDFLKSDGFANRNFMQLIHDDSLTFKEDIQKAQVSGQGDSLHEHIANLAGSPAIKKGILQTVKVVDELVKVMGRHKPENIVIEMARENQTTQKGQKNSRERMKRIEEGIKELGSQILKEHPVENTQLQNEKLYLYYLQNGRDMYVDQELDINRLSDYDVDHIVPQSFLKDDSIDNKVLTRSDKARGKSDNVPSEEVVKKMKNYWRQLLNAKLITQRKFDNLTKAERGGLSELDKAGFIKRQLVETRQITKHVAQILDSRMNTKYDENDKLIREVKVITLKSKLVSDFRKDFQFYKVREINNYHHAHDAYLNAVVGTALIKKYPKLESEFVYGDYKVYDVRKMIAKSEQEIGKATAKYFFYSNIMNFFKTEITLANGEIRKRPLIETNGETGEIVWDKGRDFATVRKVLSMPQVNIVKKTEVQTGGFSKESILPKRNSDKLIARKKDWDPKKYGGFDSPTVAYSVLVVAKVEKGKSKKLKSVKELLGITIMERSSFEKNPIDFLEAKGYKEVKKDLIIKLPKYSLFELENGRKRMLASAGELQKGNELALPSKYVNFLYLASHYEKLKGSPEDNEQKQLFVEQHKHYLDEIIEQISEFSKRVILADANLDKVLSAYNKHRDKPIREQAENIIHLFTLTNLGAPAAFKYFDTTIDRKRYTSTKEVLDATLIHQSITGLYETRIDLSQLGGDGGEAAAKPAPGSSGGMNPLQLLQPLPAEIKGTKLLAHWNSGATITCIPESFLEDEQPIKKTLIKTIHGEKQQNVYYVTFKVKGRKVEAEVIASPYEYILLSPTDVPWLTQQPLQLTILVPLQEYQEKILSKTALPEDQKQQLKTLFVKYDNLWQHWENQVGHRKIRPHNIATGDYPPRPQKQYPINPKAKPSIQIVIDDLLKQGVLTPQNSTMNTPVYPVPKPDGRWRMVLDYREVNKTIPLTAAQNQHSAGILATIVRQKYKTTLDLANGFWAHPITPESYWLTAFTWQGKQYCWTRLPQGFLNSPALFNADVVDLLKEIPNVQVYVDDIYLSHDDPKEHVQQLEKVFQILLQAGYVVSLKKSEIGQKTVEFLGFNITKEGRGLTDTFKTKLLNITPPKDLKQLQSILGLLNFARNFIPNFAELVQPLYNLIAPAKGKYIEWSEENTKQLNMVIEALNTASNLEERLPEQRLVIKVNTSPSAGYVRYYNETGKKPIMYLNYVFSKAELKFSMLEKLLTTMHKALIKAMDLAMGQEILVYSPIVSMTKIQKTPLPERKALPIRWITWMTYLEDPRIQFHYDKTLPELKHIPDVYTSSQSPVKHPSQYEGVFYTDGSAIKSPDPTKSNNAGMGIVHATYKPEYQVLNQWSIPLGNHTAQMAEIAAVEFACKKALKIPGPVLVITDSFYVAESANKELPYWKSNGFVNNKKKPLKHISKWKSIAECLSMKPDITIQHEKGISLQIPVFILKGNALADKLATQGSYVVNAGKRTADGSEFEKRTADGSEFESPKKKAKVE

SEQ ID NO: 1321 - protein, 2178 aa, synthetic construct
MPAAKRVKLDGGDKKYSIGLDIGTNSVGWAVITDEYKVPSKKFKVLGNTDRHSIKKNLIGALLFDSGETAEATRLKRTARRRYTRRKNRICYLQEIFSNEMAKVDDSFFHRLEESFLVEEDKKHERHPIFGNIVDEVAYHEKYPTIYHLRKKLVDSTDKADLRLIYLALAHMIKFRGHFLIEGDLNPDNSDVDKLFIQLVQTYNQLFEENPINASGVDAKAILSARLSKSRRLENLIAQLPGEKKNGLFGNLIALSLGLTPNFKSNFDLAEDAKLQLSKDTYDDDLDNLLAQIGDQYADLFLAAKNLSDAILLSDILRVNTEITKAPLSASMIKRYDEHHQDLTLLKALVRQQLPEKYKEIFFDQSKNGYAGYIDGGASQEEFYKFIKPILEKMDGTEELLVKLNREDLLRKQRTFDNGSIPHQIHLGELHAILRRQEDFYPFLKDNREKIEKILTFRIPYYVGPLARGNSRFAWMTRKSEETITPWNFEEVVDKGASAQSFIERMTNFDKNLPNEKVLPKHSLLYEYFTVYNELTKVKYVTEGMRKPAFLSGEQKKAIVDLLFKTNRKVTVKQLKEDYFKKIECFDSVEISGVEDRFNASLGTYHDLLKIIKDKDFLDNEENEDILEDIVLTLTLFEDREMIEERLKTYAHLFDDKVMKQLKRRRYTGWGRLSRKLINGIRDKQSGKTILDFLKSDGFANRNFMQLIHDDSLTFKEDIQKAQVSGQGDSLHEHIANLAGSPAIKKGILQTVKVVDELVKVMGRHKPENIVIEMARENQTTQKGQKNSRERMKRIEEGIKELGSQILKEHPVENTQLQNEKLYLYYLQNGRDMYVDQELDINRLSDYDVDHIVPQSFLKDDSIDNKVLTRSDKARGKSDNVPSEEVVKKMKNYWRQLLNAKLITQRKFDNLTKAERGGLSELDKAGFIKRQLVETRQITKHVAQILDSRMNTKYDENDKLIREVKVITLKSKLVSDFRKDFQFYKVREINNYHHAHDAYLNAVVGTALIKKYPKLESEFVYGDYKVYDVRKMIAKSEQEIGKATAKYFFYSNIMNFFKTEITLANGEIRKRPLIETNGETGEIVWDKGRDFATVRKVLSMPQVNIVKKTEVQTGGFSKESILPKRNSDKLIARKKDWDPKKYGGFDSPTVAYSVLVVAKVEKGKSKKLKSVKELLGITIMERSSFEKNPIDFLEAKGYKEVKKDLIIKLPKYSLFELENGRKRMLASAGELQKGNELALPSKYVNFLYLASHYEKLKGSPEDNEQKQLFVEQHKHYLDEIIEQISEFSKRVILADANLDKVLSAYNKHRDKPIREQAENIIHLFTLTNLGAPAAFKYFDTTIDRKRYTSTKEVLDATLIHQSITGLYETRIDLSQLGGDGGPAPAPAPAPAPAPGGMNPLQLLQPLPAEIKGTKLLAHWNSGATITCIPESFLEDEQPIKKTLIKTIHGEKQQNVYYVTFKVKGRKVEAEVIASPYEYILLSPTDVPWLTQQPLQLTILVPLQEYQEKILSKTALPEDQKQQLKTLFVKYDNLWQHWENQVGHRKIRPHNIATGDYPPRPQKQYPINPKAKPSIQIVIDDLLKQGVLTPQNSTMNTPVYPVPKPDGRWRMVLDYREVNKTIPLTAAQNQHSAGILATIVRQKYKTTLDLANGFWAHPITPESYWLTAFTWQGKQYCWTRLPQGFLNSPALFNADVVDLLKEIPNVQVYVDDIYLSHDDPKEHVQQLEKVFQILLQAGYVVSLKKSEIGQKTVEFLGFNITKEGRGLTDTFKTKLLNITPPKDLKQLQSILGLLNFARNFIPNFAELVQPLYNLIAPAKGKYIEWSEENTKQLNMVIEALNTASNLEERLPEQRLVIKVNTSPSAGYVRYYNETGKKPIMYLNYVFSKAELKFSMLEKLLTTMHKALIKAMDLAMGQEILVYSPIVSMTKIQKTPLPERKALPIRWITWMTYLEDPRIQFHYDKTLPELKHIPDVYTSSQSPVKHPSQYEGVFYTDGSAIKSPDPTKSNNAGMGIVHATYKPEYQVLNQWSIPLGNHTAQMAEIAAVEFACKKALKIPGPVLVITDSFYVAESANKELPYWKSNGFVNNKKKPLKHISKWKSIAECLSMKPDITIQHEKGISLQIPVFILKGNALADKLATQGSYVVNAGKRTADGSEFEKRTADGSEFESPKKKAKVE

SEQ ID NO: 1322 - protein, 2174 aa, synthetic construct
MPAAKRVKLDGGDKKYSIGLDIGTNSVGWAVITDEYKVPSKKFKVLGNTDRHSIKKNLIGALLFDSGETAEATRLKRTARRRYTRRKNRICYLQEIFSNEMAKVDDSFFHRLEESFLVEEDKKHERHPIFGNIVDEVAYHEKYPTIYHLRKKLVDSTDKADLRLIYLALAHMIKFRGHFLIEGDLNPDNSDVDKLFIQLVQTYNQLFEENPINASGVDAKAILSARLSKSRRLENLIAQLPGEKKNGLFGNLIALSLGLTPNFKSNFDLAEDAKLQLSKDTYDDDLDNLLAQIGDQYADLFLAAKNLSDAILLSDILRVNTEITKAPLSASMIKRYDEHHQDLTLLKALVRQQLPEKYKEIFFDQSKNGYAGYIDGGASQEEFYKFIKPILEKMDGTEELLVKLNREDLLRKQRTFDNGSIPHQIHLGELHAILRRQEDFYPFLKDNREKIEKILTFRIPYYVGPLARGNSRFAWMTRKSEETITPWNFEEVVDKGASAQSFIERMTNFDKNLPNEKVLPKHSLLYEYFTVYNELTKVKYVTEGMRKPAFLSGEQKKAIVDLLFKTNRKVTVKQLKEDYFKKIECFDSVEISGVEDRFNASLGTYHDLLKIIKDKDFLDNEENEDILEDIVLTLTLFEDREMIEERLKTYAHLFDDKVMKQLKRRRYTGWGRLSRKLINGIRDKQSGKTILDFLKSDGFANRNFMQLIHDDSLTFKEDIQKAQVSGQGDSLHEHIANLAGSPAIKKGILQTVKVVDELVKVMGRHKPENIVIEMARENQTTQKGQKNSRERMKRIEEGIKELGSQILKEHPVENTQLQNEKLYLYYLQNGRDMYVDQELDINRLSDYDVDHIVPQSFLKDDSIDNKVLTRSDKARGKSDNVPSEEVVKKMKNYWRQLLNAKLITQRKFDNLTKAERGGLSELDKAGFIKRQLVETRQITKHVAQILDSRMNTKYDENDKLIREVKVITLKSKLVSDFRKDFQFYKVREINNYHHAHDAYLNAVVGTALIKKYPKLESEFVYGDYKVYDVRKMIAKSEQEIGKATAKYFFYSNIMNFFKTEITLANGEIRKRPLIETNGETGEIVWDKGRDFATVRKVLSMPQVNIVKKTEVQTGGFSKESILPKRNSDKLIARKKDWDPKKYGGFDSPTVAYSVLVVAKVEKGKSKKLKSVKELLGITIMERSSFEKNPIDFLEAKGYKEVKKDLIIKLPKYSLFELENGRKRMLASAGELQKGNELALPSKYVNFLYLASHYEKLKGSPEDNEQKQLFVEQHKHYLDEIIEQISEFSKRVILADANLDKVLSAYNKHRDKPIREQAENIIHLFTLTNLGAPAAFKYFDTTIDRKRYTSTKEVLDATLIHQSITGLYETRIDLSQLGGDGGGGSGGGPAPGGMNPLQLLQPLPAEIKGTKLLAHWNSGATITCIPESFLEDEQPIKKTLIKTIHGEKQQNVYYVTFKVKGRKVEAEVIASPYEYILLSPTDVPWLTQQPLQLTILVPLQEYQEKILSKTALPEDQKQQLKTLFVKYDNLWQHWENQVGHRKIRPHNIATGDYPPRPQKQYPINPKAKPSIQIVIDDLLKQGVLTPQNSTMNTPVYPVPKPDGRWRMVLDYREVNKTIPLTAAQNQHSAGILATIVRQKYKTTLDLANGFWAHPITPESYWLTAFTWQGKQYCWTRLPQGFLNSPALFNADVVDLLKEIPNVQVYVDDIYLSHDDPKEHVQQLEKVFQILLQAGYVVSLKKSEIGQKTVEFLGFNITKEGRGLTDTFKTKLLNITPPKDLKQLQSILGLLNFARNFIPNFAELVQPLYNLIAPAKGKYIEWSEENTKQLNMVIEALNTASNLEERLPEQRLVIKVNTSPSAGYVRYYNETGKKPIMYLNYVFSKAELKFSMLEKLLTTMHKALIKAMDLAMGQEILVYSPIVSMTKIQKTPLPERKALPIRWITWMTYLEDPRIQFHYDKTLPELKHIPDVYTSSQSPVKHPSQYEGVFYTDGSAIKSPDPTKSNNAGMGIVHATYKPEYQVLNQWSIPLGNHTAQMAEIAAVEFACKKALKIPGPVLVITDSFYVAESANKELPYWKSNGFVNNKKKPLKHISKWKSIAECLSMKPDITIQHEKGISLQIPVFILKGNALADKLATQGSYVVNAGKRTADGSEFEKRTADGSEFESPKKKAKVE

SEQ ID NO: 1323 - protein, 2176 aa, synthetic construct
MPAAKRVKLDGGDKKYSIGLDIGTNSVGWAVITDEYKVPSKKFKVLGNTDRHSIKKNLIGALLFDSGETAEATRLKRTARRRYTRRKNRICYLQEIFSNEMAKVDDSFFHRLEESFLVEEDKKHERHPIFGNIVDEVAYHEKYPTIYHLRKKLVDSTDKADLRLIYLALAHMIKFRGHFLIEGDLNPDNSDVDKLFIQLVQTYNQLFEENPINASGVDAKAILSARLSKSRRLENLIAQLPGEKKNGLFGNLIALSLGLTPNFKSNFDLAEDAKLQLSKDTYDDDLDNLLAQIGDQYADLFLAAKNLSDAILLSDILRVNTEITKAPLSASMIKRYDEHHQDLTLLKALVRQQLPEKYKEIFFDQSKNGYAGYIDGGASQEEFYKFIKPILEKMDGTEELLVKLNREDLLRKQRTFDNGSIPHQIHLGELHAILRRQEDFYPFLKDNREKIEKILTFRIPYYVGPLARGNSRFAWMTRKSEETITPWNFEEVVDKGASAQSFIERMTNFDKNLPNEKVLPKHSLLYEYFTVYNELTKVKYVTEGMRKPAFLSGEQKKAIVDLLFKTNRKVTVKQLKEDYFKKIECFDSVEISGVEDRFNASLGTYHDLLKIIKDKDFLDNEENEDILEDIVLTLTLFEDREMIEERLKTYAHLFDDKVMKQLKRRRYTGWGRLSRKLINGIRDKQSGKTILDFLKSDGFANRNFMQLIHDDSLTFKEDIQKAQVSGQGDSLHEHIANLAGSPAIKKGILQTVKVVDELVKVMGRHKPENIVIEMARENQTTQKGQKNSRERMKRIEEGIKELGSQILKEHPVENTQLQNEKLYLYYLQNGRDMYVDQELDINRLSDYDVDHIVPQSFLKDDSIDNKVLTRSDKARGKSDNVPSEEVVKKMKNYWRQLLNAKLITQRKFDNLTKAERGGLSELDKAGFIKRQLVETRQITKHVAQILDSRMNTKYDENDKLIREVKVITLKSKLVSDFRKDFQFYKVREINNYHHAHDAYLNAVVGTALIKKYPKLESEFVYGDYKVYDVRKMIAKSEQEIGKATAKYFFYSNIMNFFKTEITLANGEIRKRPLIETNGETGEIVWDKGRDFATVRKVLSMPQVNIVKKTEVQTGGFSKESILPKRNSDKLIARKKDWDPKKYGGFDSPTVAYSVLVVAKVEKGKSKKLKSVKELLGITIMERSSFEKNPIDFLEAKGYKEVKKDLIIKLPKYSLFELENGRKRMLASAGELQKGNELALPSKYVNFLYLASHYEKLKGSPEDNEQKQLFVEQHKHYLDEIIEQISEFSKRVILADANLDKVLSAYNKHRDKPIREQAENIIHLFTLTNLGAPAAFKYFDTTIDRKRYTSTKEVLDATLIHQSITGLYETRIDLSQLGGDGGGGSEAAAKGGGGGMNPLQLLQPLPAEIKGTKLLAHWNSGATITCIPESFLEDEQPIKKTLIKTIHGEKQQNVYYVTFKVKGRKVEAEVIASPYEYILLSPTDVPWLTQQPLQLTILVPLQEYQEKILSKTALPEDQKQQLKTLFVKYDNLWQHWENQVGHRKIRPHNIATGDYPPRPQKQYPINPKAKPSIQIVIDDLLKQGVLTPQNSTMNTPVYPVPKPDGRWRMVLDYREVNKTIPLTAAQNQHSAGILATIVRQKYKTTLDLANGFWAHPITPESYWLTAFTWQGKQYCWTRLPQGFLNSPALFNADVVDLLKEIPNVQVYVDDIYLSHDDPKEHVQQLEKVFQILLQAGYVVSLKKSEIGQKTVEFLGFNITKEGRGLTDTFKTKLLNITPPKDLKQLQSILGLLNFARNFIPNFAELVQPLYNLIAPAKGKYIEWSEENTKQLNMVIEALNTASNLEERLPEQRLVIKVNTSPSAGYVRYYNETGKKPIMYLNYVFSKAELKFSMLEKLLTTMHKALIKAMDLAMGQEILVYSPIVSMTKIQKTPLPERKALPIRWITWMTYLEDPRIQFHYDKTLPELKHIPDVYTSSQSPVKHPSQYEGVFYTDGSAIKSPDPTKSNNAGMGIVHATYKPEYQVLNQWSIPLGNHTAQMAEIAAVEFACKKALKIPGPVLVITDSFYVAESANKELPYWKSNGFVNNKKKPLKHISKWKSIAECLSMKPDITIQHEKGISLQIPVFILKGNALADKLATQGSYVVNAGKRTADGSEFEKRTADGSEFESPKKKAKVE

SEQ ID NO: 1324 - protein, 2176 aa, synthetic construct
MPAAKRVKLDGGDKKYSIGLDIGTNSVGWAVITDEYKVPSKKFKVLGNTDRHSIKKNLIGALLFDSGETAEATRLKRTARRRYTRRKNRICYLQEIFSNEMAKVDDSFFHRLEESFLVEEDKKHERHPIFGNIVDEVAYHEKYPTIYHLRKKLVDSTDKADLRLIYLALAHMIKFRGHFLIEGDLNPDNSDVDKLFIQLVQTYNQLFEENPINASGVDAKAILSARLSKSRRLENLIAQLPGEKKNGLFGNLIALSLGLTPNFKSNFDLAEDAKLQLSKDTYDDDLDNLLAQIGDQYADLFLAAKNLSDAILLSDILRVNTEITKAPLSASMIKRYDEHHQDLTLLKALVRQQLPEKYKEIFFDQSKNGYAGYIDGGASQEEFYKFIKPILEKMDGTEELLVKLNREDLLRKQRTFDNGSIPHQIHLGELHAILRRQEDFYPFLKDNREKIEKILTFRIPYYVGPLARGNSRFAWMTRKSEETITPWNFEEVVDKGASAQSFIERMTNFDKNLPNEKVLPKHSLLYEYFTVYNELTKVKYVTEGMRKPAFLSGEQKKAIVDLLFKTNRKVTVKQLKEDYFKKIECFDSVEISGVEDRFNASLGTYHDLLKIIKDKDFLDNEENEDILEDIVLTLTLFEDREMIEERLKTYAHLFDDKVMKQLKRRRYTGWGRLSRKLINGIRDKQSGKTILDFLKSDGFANRNFMQLIHDDSLTFKEDIQKAQVSGQGDSLHEHIANLAGSPAIKKGILQTVKVVDELVKVMGRHKPENIVIEMARENQTTQKGQKNSRERMKRIEEGIKELGSQILKEHPVENTQLQNEKLYLYYLQNGRDMYVDQELDINRLSDYDVDHIVPQSFLKDDSIDNKVLTRSDKARGKSDNVPSEEVVKKMKNYWRQLLNAKLITQRKFDNLTKAERGGLSELDKAGFIKRQLVETRQITKHVAQILDSRMNTKYDENDKLIREVKVITLKSKLVSDFRKDFQFYKVREINNYHHAHDAYLNAVVGTALIKKYPKLESEFVYGDYKVYDVRKMIAKSEQEIGKATAKYFFYSNIMNFFKTEITLANGEIRKRPLIETNGETGEIVWDKGRDFATVRKVLSMPQVNIVKKTEVQTGGFSKESILPKRNSDKLIARKKDWDPKKYGGFDSPTVAYSVLVVAKVEKGKSKKLKSVKELLGITIMERSSFEKNPIDFLEAKGYKEVKKDLIIKLPKYSLFELENGRKRMLASAGELQKGNELALPSKYVNFLYLASHYEKLKGSPEDNEQKQLFVEQHKHYLDEIIEQISEFSKRVILADANLDKVLSAYNKHRDKPIREQAENIIHLFTLTNLGAPAAFKYFDTTIDRKRYTSTKEVLDATLIHQSITGLYETRIDLSQLGGDGGPAPEAAAKGGSGGMNPLQLLQPLPAEIKGTKLLAHWNSGATITCIPESFLEDEQPIKKTLIKTIHGEKQQNVYYVTFKVKGRKVEAEVIASPYEYILLSPTDVPWLTQQPLQLTILVPLQEYQEKILSKTALPEDQKQQLKTLFVKYDNLWQHWENQVGHRKIRPHNIATGDYPPRPQKQYPINPKAKPSIQIVIDDLLKQGVLTPQNSTMNTPVYPVPKPDGRWRMVLDYREVNKTIPLTAAQNQHSAGILATIVRQKYKTTLDLANGFWAHPITPESYWLTAFTWQGKQYCWTRLPQGFLNSPALFNADVVDLLKEIPNVQVYVDDIYLSHDDPKEHVQQLEKVFQILLQAGYVVSLKKSEIGQKTVEFLGFNITKEGRGLTDTFKTKLLNITPPKDLKQLQSILGLLNFARNFIPNFAELVQPLYNLIAPAKGKYIEWSEENTKQLNMVIEALNTASNLEERLPEQRLVIKVNTSPSAGYVRYYNETGKKPIMYLNYVFSKAELKFSMLEKLLTTMHKALIKAMDLAMGQEILVYSPIVSMTKIQKTPLPERKALPIRWITWMTYLEDPRIQFHYDKTLPELKHIPDVYTSSQSPVKHPSQYEGVFYTDGSAIKSPDPTKSNNAGMGIVHATYKPEYQVLNQWSIPLGNHTAQMAEIAAVEFACKKALKIPGPVLVITDSFYVAESANKELPYWKSNGFVNNKKKPLKHISKWKSIAECLSMKPDITIQHEKGISLQIPVFILKGNALADKLATQGSYVVNAGKRTADGSEFEKRTADGSEFESPKKKAKVE

SEQ ID NO: 1325 - protein, 2176 aa, synthetic construct
MPAAKRVKLDGGDKKYSIGLDIGTNSVGWAVITDEYKVPSKKFKVLGNTDRHSIKKNLIGALLFDSGETAEATRLKRTARRRYTRRKNRICYLQEIFSNEMAKVDDSFFHRLEESFLVEEDKKHERHPIFGNIVDEVAYHEKYPTIYHLRKKLVDSTDKADLRLIYLALAHMIKFRGHFLIEGDLNPDNSDVDKLFIQLVQTYNQLFEENPINASGVDAKAILSARLSKSRRLENLIAQLPGEKKNGLFGNLIALSLGLTPNFKSNFDLAEDAKLQLSKDTYDDDLDNLLAQIGDQYADLFLAAKNLSDAILLSDILRVNTEITKAPLSASMIKRYDEHHQDLTLLKALVRQQLPEKYKEIFFDQSKNGYAGYIDGGASQEEFYKFIKPILEKMDGTEELLVKLNREDLLRKQRTFDNGSIPHQIHLGELHAILRRQEDFYPFLKDNREKIEKILTFRIPYYVGPLARGNSRFAWMTRKSEETITPWNFEEVVDKGASAQSFIERMTNFDKNLPNEKVLPKHSLLYEYFTVYNELTKVKYVTEGMRKPAFLSGEQKKAIVDLLFKTNRKVTVKQLKEDYFKKIECFDSVEISGVEDRFNASLGTYHDLLKIIKDKDFLDNEENEDILEDIVLTLTLFEDREMIEERLKTYAHLFDDKVMKQLKRRRYTGWGRLSRKLINGIRDKQSGKTILDFLKSDGFANRNFMQLIHDDSLTFKEDIQKAQVSGQGDSLHEHIANLAGSPAIKKGILQTVKVVDELVKVMGRHKPENIVIEMARENQTTQKGQKNSRERMKRIEEGIKELGSQILKEHPVENTQLQNEKLYLYYLQNGRDMYVDQELDINRLSDYDVDHIVPQSFLKDDSIDNKVLTRSDKARGKSDNVPSEEVVKKMKNYWRQLLNAKLITQRKFDNLTKAERGGLSELDKAGFIKRQLVETRQITKHVAQILDSRMNTKYDENDKLIREVKVITLKSKLVSDFRKDFQFYKVREINNYHHAHDAYLNAVVGTALIKKYPKLESEFVYGDYKVYDVRKMIAKSEQEIGKATAKYFFYSNIMNFFKTEITLANGEIRKRPLIETNGETGEIVWDKGRDFATVRKVLSMPQVNIVKKTEVQTGGFSKESILPKRNSDKLIARKKDWDPKKYGGFDSPTVAYSVLVVAKVEKGKSKKLKSVKELLGITIMERSSFEKNPIDFLEAKGYKEVKKDLIIKLPKYSLFELENGRKRMLASAGELQKGNELALPSKYVNFLYLASHYEKLKGSPEDNEQKQLFVEQHKHYLDEIIEQISEFSKRVILADANLDKVLSAYNKHRDKPIREQAENIIHLFTLTNLGAPAAFKYFDTTIDRKRYTSTKEVLDATLIHQSITGLYETRIDLSQLGGDGGEAAAKGGSPAPGGMNPLQLLQPLPAEIKGTKLLAHWNSGATITCIPESFLEDEQPIKKTLIKTIHGEKQQNVYYVTFKVKGRKVEAEVIASPYEYILLSPTDVPWLTQQPLQLTILVPLQEYQEKILSKTALPEDQKQQLKTLFVKYDNLWQHWENQVGHRKIRPHNIATGDYPPRPQKQYPINPKAKPSIQIVIDDLLKQGVLTPQNSTMNTPVYPVPKPDGRWRMVLDYREVNKTIPLTAAQNQHSAGILATIVRQKYKTTLDLANGFWAHPITPESYWLTAFTWQGKQYCWTRLPQGFLNSPALFNADVVDLLKEIPNVQVYVDDIYLSHDDPKEHVQQLEKVFQILLQAGYVVSLKKSEIGQKTVEFLGFNITKEGRGLTDTFKTKLLNITPPKDLKQLQSILGLLNFARNFIPNFAELVQPLYNLIAPAKGKYIEWSEENTKQLNMVIEALNTASNLEERLPEQRLVIKVNTSPSAGYVRYYNETGKKPIMYLNYVFSKAELKFSMLEKLLTTMHKALIKAMDLAMGQEILVYSPIVSMTKIQKTPLPERKALPIRWITWMTYLEDPRIQFHYDKTLPELKHIPDVYTSSQSPVKHPSQYEGVFYTDGSAIKSPDPTKSNNAGMGIVHATYKPEYQVLNQWSIPLGNHTAQMAEIAAVEFACKKALKIPGPVLVITDSFYVAESANKELPYWKSNGFVNNKKKPLKHISKWKSIAECLSMKPDITIQHEKGISLQIPVFILKGNALADKLATQGSYVVNAGKRTADGSEFEKRTADGSEFESPKKKAKVE

SEQ ID NO: 1326 - protein, 2176 aa, synthetic construct
MPAAKRVKLDGGDKKYSIGLDIGTNSVGWAVITDEYKVPSKKFKVLGNTDRHSIKKNLIGALLFDSGETAEATRLKRTARRRYTRRKNRICYLQEIFSNEMAKVDDSFFHRLEESFLVEEDKKHERHPIFGNIVDEVAYHEKYPTIYHLRKKLVDSTDKADLRLIYLALAHMIKFRGHFLIEGDLNPDNSDVDKLFIQLVQTYNQLFEENPINASGVDAKAILSARLSKSRRLENLIAQLPGEKKNGLFGNLIALSLGLTPNFKSNFDLAEDAKLQLSKDTYDDDLDNLLAQIGDQYADLFLAAKNLSDAILLSDILRVNTEITKAPLSASMIKRYDEHHQDLTLLKALVRQQLPEKYKEIFFDQSKNGYAGYIDGGASQEEFYKFIKPILEKMDGTEELLVKLNREDLLRKQRTFDNGSIPHQIHLGELHAILRRQEDFYPFLKDNREKIEKILTFRIPYYVGPLARGNSRFAWMTRKSEETITPWNFEEVVDKGASAQSFIERMTNFDKNLPNEKVLPKHSLLYEYFTVYNELTKVKYVTEGMRKPAFLSGEQKKAIVDLLFKTNRKVTVKQLKEDYFKKIECFDSVEISGVEDRFNASLGTYHDLLKIIKDKDFLDNEENEDILEDIVLTLTLFEDREMIEERLKTYAHLFDDKVMKQLKRRRYTGWGRLSRKLINGIRDKQSGKTILDFLKSDGFANRNFMQLIHDDSLTFKEDIQKAQVSGQGDSLHEHIANLAGSPAIKKGILQTVKVVDELVKVMGRHKPENIVIEMARENQTTQKGQKNSRERMKRIEEGIKELGSQILKEHPVENTQLQNEKLYLYYLQNGRDMYVDQELDINRLSDYDVDHIVPQSFLKDDSIDNKVLTRSDKARGKSDNVPSEEVVKKMKNYWRQLLNAKLITQRKFDNLTKAERGGLSELDKAGFIKRQLVETRQITKHVAQILDSRMNTKYDENDKLIREVKVITLKSKLVSDFRKDFQFYKVREINNYHHAHDAYLNAVVGTALIKKYPKLESEFVYGDYKVYDVRKMIAKSEQEIGKATAKYFFYSNIMNFFKTEITLANGEIRKRPLIETNGETGEIVWDKGRDFATVRKVLSMPQVNIVKKTEVQTGGFSKESILPKRNSDKLIARKKDWDPKKYGGFDSPTVAYSVLVVAKVEKGKSKKLKSVKELLGITIMERSSFEKNPIDFLEAKGYKEVKKDLIIKLPKYSLFELENGRKRMLASAGELQKGNELALPSKYVNFLYLASHYEKLKGSPEDNEQKQLFVEQHKHYLDEIIEQISEFSKRVILADANLDKVLSAYNKHRDKPIREQAENIIHLFTLTNLGAPAAFKYFDTTIDRKRYTSTKEVLDATLIHQSITGLYETRIDLSQLGGDGGGGGGGSEAAAKGGMNPLQLLQPLPAEIKGTKLLAHWNSGATITCIPESFLEDEQPIKKTLIKTIHGEKQQNVYYVTFKVKGRKVEAEVIASPYEYILLSPTDVPWLTQQPLQLTILVPLQEYQEKILSKTALPEDQKQQLKTLFVKYDNLWQHWENQVGHRKIRPHNIATGDYPPRPQKQYPINPKAKPSIQIVIDDLLKQGVLTPQNSTMNTPVYPVPKPDGRWRMVLDYREVNKTIPLTAAQNQHSAGILATIVRQKYKTTLDLANGFWAHPITPESYWLTAFTWQGKQYCWTRLPQGFLNSPALFNADVVDLLKEIPNVQVYVDDIYLSHDDPKEHVQQLEKVFQILLQAGYVVSLKKSEIGQKTVEFLGFNITKEGRGLTDTFKTKLLNITPPKDLKQLQSILGLLNFARNFIPNFAELVQPLYNLIAPAKGKYIEWSEENTKQLNMVIEALNTASNLEERLPEQRLVIKVNTSPSAGYVRYYNETGKKPIMYLNYVFSKAELKFSMLEKLLTTMHKALIKAMDLAMGQEILVYSPIVSMTKIQKTPLPERKALPIRWITWMTYLEDPRIQFHYDKTLPELKHIPDVYTSSQSPVKHPSQYEGVFYTDGSAIKSPDPTKSNNAGMGIVHATYKPEYQVLNQWSIPLGNHTAQMAEIAAVEFACKKALKIPGPVLVITDSFYVAESANKELPYWKSNGFVNNKKKPLKHISKWKSIAECLSMKPDITIQHEKGISLQIPVFILKGNALADKLATQGSYVVNAGKRTADGSEFEKRTADGSEFESPKKKAKVE

SEQ ID NO: 1327 - protein, 2176 aa, synthetic construct
MPAAKRVKLDGGDKKYSIGLDIGTNSVGWAVITDEYKVPSKKFKVLGNTDRHSIKKNLIGALLFDSGETAEATRLKRTARRRYTRRKNRICYLQEIFSNEMAKVDDSFFHRLEESFLVEEDKKHERHPIFGNIVDEVAYHEKYPTIYHLRKKLVDSTDKADLRLIYLALAHMIKFRGHFLIEGDLNPDNSDVDKLFIQLVQTYNQLFEENPINASGVDAKAILSARLSKSRRLENLIAQLPGEKKNGLFGNLIALSLGLTPNFKSNFDLAEDAKLQLSKDTYDDDLDNLLAQIGDQYADLFLAAKNLSDAILLSDILRVNTEITKAPLSASMIKRYDEHHQDLTLLKALVRQQLPEKYKEIFFDQSKNGYAGYIDGGASQEEFYKFIKPILEKMDGTEELLVKLNREDLLRKQRTFDNGSIPHQIHLGELHAILRRQEDFYPFLKDNREKIEKILTFRIPYYVGPLARGNSRFAWMTRKSEETITPWNFEEVVDKGASAQSFIERMTNFDKNLPNEKVLPKHSLLYEYFTVYNELTKVKYVTEGMRKPAFLSGEQKKAIVDLLFKTNRKVTVKQLKEDYFKKIECFDSVEISGVEDRFNASLGTYHDLLKIIKDKDFLDNEENEDILEDIVLTLTLFEDREMIEERLKTYAHLFDDKVMKQLKRRRYTGWGRLSRKLINGIRDKQSGKTILDFLKSDGFANRNFMQLIHDDSLTFKEDIQKAQVSGQGDSLHEHIANLAGSPAIKKGILQTVKVVDELVKVMGRHKPENIVIEMARENQTTQKGQKNSRERMKRIEEGIKELGSQILKEHPVENTQLQNEKLYLYYLQNGRDMYVDQELDINRLSDYDVDHIVPQSFLKDDSIDNKVLTRSDKARGKSDNVPSEEVVKKMKNYWRQLLNAKLITQRKFDNLTKAERGGLSELDKAGFIKRQLVETRQITKHVAQILDSRMNTKYDENDKLIREVKVITLKSKLVSDFRKDFQFYKVREINNYHHAHDAYLNAVVGTALIKKYPKLESEFVYGDYKVYDVRKMIAKSEQEIGKATAKYFFYSNIMNFFKTEITLANGEIRKRPLIETNGETGEIVWDKGRDFATVRKVLSMPQVNIVKKTEVQTGGFSKESILPKRNSDKLIARKKDWDPKKYGGFDSPTVAYSVLVVAKVEKGKSKKLKSVKELLGITIMERSSFEKNPIDFLEAKGYKEVKKDLIIKLPKYSLFELENGRKRMLASAGELQKGNELALPSKYVNFLYLASHYEKLKGSPEDNEQKQLFVEQHKHYLDEIIEQISEFSKRVILADANLDKVLSAYNKHRDKPIREQAENIIHLFTLTNLGAPAAFKYFDTTIDRKRYTSTKEVLDATLIHQSITGLYETRIDLSQLGGDGGEAAAKGSSPAPGGMNPLQLLQPLPAEIKGTKLLAHWNSGATITCIPESFLEDEQPIKKTLIKTIHGEKQQNVYYVTFKVKGRKVEAEVIASPYEYILLSPTDVPWLTQQPLQLTILVPLQEYQEKILSKTALPEDQKQQLKTLFVKYDNLWQHWENQVGHRKIRPHNIATGDYPPRPQKQYPINPKAKPSIQIVIDDLLKQGVLTPQNSTMNTPVYPVPKPDGRWRMVLDYREVNKTIPLTAAQNQHSAGILATIVRQKYKTTLDLANGFWAHPITPESYWLTAFTWQGKQYCWTRLPQGFLNSPALFNADVVDLLKEIPNVQVYVDDIYLSHDDPKEHVQQLEKVFQILLQAGYVVSLKKSEIGQKTVEFLGFNITKEGRGLTDTFKTKLLNITPPKDLKQLQSILGLLNFARNFIPNFAELVQPLYNLIAPAKGKYIEWSEENTKQLNMVIEALNTASNLEERLPEQRLVIKVNTSPSAGYVRYYNETGKKPIMYLNYVFSKAELKFSMLEKLLTTMHKALIKAMDLAMGQEILVYSPIVSMTKIQKTPLPERKALPIRWITWMTYLEDPRIQFHYDKTLPELKHIPDVYTSSQSPVKHPSQYEGVFYTDGSAIKSPDPTKSNNAGMGIVHATYKPEYQVLNQWSIPLGNHTAQMAEIAAVEFACKKALKIPGPVLVITDSFYVAESANKELPYWKSNGFVNNKKKPLKHISKWKSIAECLSMKPDITIQHEKGISLQIPVFILKGNALADKLATQGSYVVNAGKRTADGSEFEKRTADGSEFESPKKKAKVE

SEQ ID NO: 1328 - protein, 2176 aa, synthetic construct
MPAAKRVKLDGGDKKYSIGLDIGTNSVGWAVITDEYKVPSKKFKVLGNTDRHSIKKNLIGALLFDSGETAEATRLKRTARRRYTRRKNRICYLQEIFSNEMAKVDDSFFHRLEESFLVEEDKKHERHPIFGNIVDEVAYHEKYPTIYHLRKKLVDSTDKADLRLIYLALAHMIKFRGHFLIEGDLNPDNSDVDKLFIQLVQTYNQLFEENPINASGVDAKAILSARLSKSRRLENLIAQLPGEKKNGLFGNLIALSLGLTPNFKSNFDLAEDAKLQLSKDTYDDDLDNLLAQIGDQYADLFLAAKNLSDAILLSDILRVNTEITKAPLSASMIKRYDEHHQDLTLLKALVRQQLPEKYKEIFFDQSKNGYAGYIDGGASQEEFYKFIKPILEKMDGTEELLVKLNREDLLRKQRTFDNGSIPHQIHLGELHAILRRQEDFYPFLKDNREKIEKILTFRIPYYVGPLARGNSRFAWMTRKSEETITPWNFEEVVDKGASAQSFIERMTNFDKNLPNEKVLPKHSLLYEYFTVYNELTKVKYVTEGMRKPAFLSGEQKKAIVDLLFKTNRKVTVKQLKEDYFKKIECFDSVEISGVEDRFNASLGTYHDLLKIIKDKDFLDNEENEDILEDIVLTLTLFEDREMIEERLKTYAHLFDDKVMKQLKRRRYTGWGRLSRKLINGIRDKQSGKTILDFLKSDGFANRNFMQLIHDDSLTFKEDIQKAQVSGQGDSLHEHIANLAGSPAIKKGILQTVKVVDELVKVMGRHKPENIVIEMARENQTTQKGQKNSRERMKRIEEGIKELGSQILKEHPVENTQLQNEKLYLYYLQNGRDMYVDQELDINRLSDYDVDHIVPQSFLKDDSIDNKVLTRSDKARGKSDNVPSEEVVKKMKNYWRQLLNAKLITQRKFDNLTKAERGGLSELDKAGFIKRQLVETRQITKHVAQILDSRMNTKYDENDKLIREVKVITLKSKLVSDFRKDFQFYKVREINNYHHAHDAYLNAVVGTALIKKYPKLESEFVYGDYKVYDVRKMIAKSEQEIGKATAKYFFYSNIMNFFKTEITLANGEIRKRPLIETNGETGEIVWDKGRDFATVRKVLSMPQVNIVKKTEVQTGGFSKESILPKRNSDKLIARKKDWDPKKYGGFDSPTVAYSVLVVAKVEKGKSKKLKSVKELLGITIMERSSFEKNPIDFLEAKGYKEVKKDLIIKLPKYSLFELENGRKRMLASAGELQKGNELALPSKYVNFLYLASHYEKLKGSPEDNEQKQLFVEQHKHYLDEIIEQISEFSKRVILADANLDKVLSAYNKHRDKPIREQAENIIHLFTLTNLGAPAAFKYFDTTIDRKRYTSTKEVLDATLIHQSITGLYETRIDLSQLGGDGGGGSPAPEAAAKGGMNPLQLLQPLPAEIKGTKLLAHWNSGATITCIPESFLEDEQPIKKTLIKTIHGEKQQNVYYVTFKVKGRKVEAEVIASPYEYILLSPTDVPWLTQQPLQLTILVPLQEYQEKILSKTALPEDQKQQLKTLFVKYDNLWQHWENQVGHRKIRPHNIATGDYPPRPQKQYPINPKAKPSIQIVIDDLLKQGVLTPQNSTMNTPVYPVPKPDGRWRMVLDYREVNKTIPLTAAQNQHSAGILATIVRQKYKTTLDLANGFWAHPITPESYWLTAFTWQGKQYCWTRLPQGFLNSPALFNADVVDLLKEIPNVQVYVDDIYLSHDDPKEHVQQLEKVFQILLQAGYVVSLKKSEIGQKTVEFLGFNITKEGRGLTDTFKTKLLNITPPKDLKQLQSILGLLNFARNFIPNFAELVQPLYNLIAPAKGKYIEWSEENTKQLNMVIEALNTASNLEERLPEQRLVIKVNTSPSAGYVRYYNETGKKPIMYLNYVFSKAELKFSMLEKLLTTMHKALIKAMDLAMGQEILVYSPIVSMTKIQKTPLPERKALPIRWITWMTYLEDPRIQFHYDKTLPELKHIPDVYTSSQSPVKHPSQYEGVFYTDGSAIKSPDPTKSNNAGMGIVHATYKPEYQVLNQWSIPLGNHTAQMAEIAAVEFACKKALKIPGPVLVITDSFYVAESANKELPYWKSNGFVNNKKKPLKHISKWKSIAECLSMKPDITIQHEKGISLQIPVFILKGNALADKLATQGSYVVNAGKRTADGSEFEKRTADGSEFESPKKKAKVE

SEQ ID NO: 1329 - protein, 2176 aa, synthetic construct
MPAAKRVKLDGGDKKYSIGLDIGTNSVGWAVITDEYKVPSKKFKVLGNTDRHSIKKNLIGALLFDSGETAEATRLKRTARRRYTRRKNRICYLQEIFSNEMAKVDDSFFHRLEESFLVEEDKKHERHPIFGNIVDEVAYHEKYPTIYHLRKKLVDSTDKADLRLIYLALAHMIKFRGHFLIEGDLNPDNSDVDKLFIQLVQTYNQLFEENPINASGVDAKAILSARLSKSRRLENLIAQLPGEKKNGLFGNLIALSLGLTPNFKSNFDLAEDAKLQLSKDTYDDDLDNLLAQIGDQYADLFLAAKNLSDAILLSDILRVNTEITKAPLSASMIKRYDEHHQDLTLLKALVRQQLPEKYKEIFFDQSKNGYAGYIDGGASQEEFYKFIKPILEKMDGTEELLVKLNREDLLRKQRTFDNGSIPHQIHLGELHAILRRQEDFYPFLKDNREKIEKILTFRIPYYVGPLARGNSRFAWMTRKSEETITPWNFEEVVDKGASAQSFIERMTNFDKNLPNEKVLPKHSLLYEYFTVYNELTKVKYVTEGMRKPAFLSGEQKKAIVDLLFKTNRKVTVKQLKEDYFKKIECFDSVEISGVEDRFNASLGTYHDLLKIIKDKDFLDNEENEDILEDIVLTLTLFEDREMIEERLKTYAHLFDDKVMKQLKRRRYTGWGRLSRKLINGIRDKQSGKTILDFLKSDGFANRNFMQLIHDDSLTFKEDIQKAQVSGQGDSLHEHIANLAGSPAIKKGILQTVKVVDELVKVMGRHKPENIVIEMARENQTTQKGQKNSRERMKRIEEGIKELGSQILKEHPVENTQLQNEKLYLYYLQNGRDMYVDQELDINRLSDYDVDHIVPQSFLKDDSIDNKVLTRSDKARGKSDNVPSEEVVKKMKNYWRQLLNAKLITQRKFDNLTKAERGGLSELDKAGFIKRQLVETRQITKHVAQILDSRMNTKYDENDKLIREVKVITLKSKLVSDFRKDFQFYKVREINNYHHAHDAYLNAVVGTALIKKYPKLESEFVYGDYKVYDVRKMIAKSEQEIGKATAKYFFYSNIMNFFKTEITLANGEIRKRPLIETNGETGEIVWDKGRDFATVRKVLSMPQVNIVKKTEVQTGGFSKESILPKRNSDKLIARKKDWDPKKYGGFDSPTVAYSVLVVAKVEKGKSKKLKSVKELLGITIMERSSFEKNPIDFLEAKGYKEVKKDLIIKLPKYSLFELENGRKRMLASAGELQKGNELALPSKYVNFLYLASHYEKLKGSPEDNEQKQLFVEQHKHYLDEIIEQISEFSKRVILADANLDKVLSAYNKHRDKPIREQAENIIHLFTLTNLGAPAAFKYFDTTIDRKRYTSTKEVLDATLIHQSITGLYETRIDLSQLGGDGGEAAAKGGSGGGGGMNPLQLLQPLPAEIKGTKLLAHWNSGATITCIPESFLEDEQPIKKTLIKTIHGEKQQNVYYVTFKVKGRKVEAEVIASPYEYILLSPTDVPWLTQQPLQLTILVPLQEYQEKILSKTALPEDQKQQLKTLFVKYDNLWQHWENQVGHRKIRPHNIATGDYPPRPQKQYPINPKAKPSIQIVIDDLLKQGVLTPQNSTMNTPVYPVPKPDGRWRMVLDYREVNKTIPLTAAQNQHSAGILATIVRQKYKTTLDLANGFWAHPITPESYWLTAFTWQGKQYCWTRLPQGFLNSPALFNADVVDLLKEIPNVQVYVDDIYLSHDDPKEHVQQLEKVFQILLQAGYVVSLKKSEIGQKTVEFLGFNITKEGRGLTDTFKTKLLNITPPKDLKQLQSILGLLNFARNFIPNFAELVQPLYNLIAPAKGKYIEWSEENTKQLNMVIEALNTASNLEERLPEQRLVIKVNTSPSAGYVRYYNETGKKPIMYLNYVFSKAELKFSMLEKLLTTMHKALIKAMDLAMGQEILVYSPIVSMTKIQKTPLPERKALPIRWITWMTYLEDPRIQFHYDKTLPELKHIPDVYTSSQSPVKHPSQYEGVFYTDGSAIKSPDPTKSNNAGMGIVHATYKPEYQVLNQWSIPLGNHTAQMAEIAAVEFACKKALKIPGPVLVITDSFYVAESANKELPYWKSNGFVNNKKKPLKHISKWKSIAECLSMKPDITIQHEKGISLQIPVFILKGNALADKLATQGSYVVNAGKRTADGSEFEKRTADGSEFESPKKKAKVE

SEQ ID NO: 1330 - protein, 2180 aa, synthetic construct
MPAAKRVKLDGGDKKYSIGLDIGTNSVGWAVITDEYKVPSKKFKVLGNTDRHSIKKNLIGALLFDSGETAEATRLKRTARRRYTRRKNRICYLQEIFSNEMAKVDDSFFHRLEESFLVEEDKKHERHPIFGNIVDEVAYHEKYPTIYHLRKKLVDSTDKADLRLIYLALAHMIKFRGHFLIEGDLNPDNSDVDKLFIQLVQTYNQLFEENPINASGVDAKAILSARLSKSRRLENLIAQLPGEKKNGLFGNLIALSLGLTPNFKSNFDLAEDAKLQLSKDTYDDDLDNLLAQIGDQYADLFLAAKNLSDAILLSDILRVNTEITKAPLSASMIKRYDEHHQDLTLLKALVRQQLPEKYKEIFFDQSKNGYAGYIDGGASQEEFYKFIKPILEKMDGTEELLVKLNREDLLRKQRTFDNGSIPHQIHLGELHAILRRQEDFYPFLKDNREKIEKILTFRIPYYVGPLARGNSRFAWMTRKSEETITPWNFEEVVDKGASAQSFIERMTNFDKNLPNEKVLPKHSLLYEYFTVYNELTKVKYVTEGMRKPAFLSGEQKKAIVDLLFKTNRKVTVKQLKEDYFKKIECFDSVEISGVEDRFNASLGTYHDLLKIIKDKDFLDNEENEDILEDIVLTLTLFEDREMIEERLKTYAHLFDDKVMKQLKRRRYTGWGRLSRKLINGIRDKQSGKTILDFLKSDGFANRNFMQLIHDDSLTFKEDIQKAQVSGQGDSLHEHIANLAGSPAIKKGILQTVKVVDELVKVMGRHKPENIVIEMARENQTTQKGQKNSRERMKRIEEGIKELGSQILKEHPVENTQLQNEKLYLYYLQNGRDMYVDQELDINRLSDYDVDHIVPQSFLKDDSIDNKVLTRSDKARGKSDNVPSEEVVKKMKNYWRQLLNAKLITQRKFDNLTKAERGGLSELDKAGFIKRQLVETRQITKHVAQILDSRMNTKYDENDKLIREVKVITLKSKLVSDFRKDFQFYKVREINNYHHAHDAYLNAVVGTALIKKYPKLESEFVYGDYKVYDVRKMIAKSEQEIGKATAKYFFYSNIMNFFKTEITLANGEIRKRPLIETNGETGEIVWDKGRDFATVRKVLSMPQVNIVKKTEVQTGGFSKESILPKRNSDKLIARKKDWDPKKYGGFDSPTVAYSVLVVAKVEKGKSKKLKSVKELLGITIMERSSFEKNPIDFLEAKGYKEVKKDLIIKLPKYSLFELENGRKRMLASAGELQKGNELALPSKYVNFLYLASHYEKLKGSPEDNEQKQLFVEQHKHYLDEIIEQISEFSKRVILADANLDKVLSAYNKHRDKPIREQAENIIHLFTLTNLGAPAAFKYFDTTIDRKRYTSTKEVLDATLIHQSITGLYETRIDLSQLGGDGGGGGGSEAAAKGGGGSGGMNPLQLLQPLPAEIKGTKLLAHWNSGATITCIPESFLEDEQPIKKTLIKTIHGEKQQNVYYVTFKVKGRKVEAEVIASPYEYILLSPTDVPWLTQQPLQLTILVPLQEYQEKILSKTALPEDQKQQLKTLFVKYDNLWQHWENQVGHRKIRPHNIATGDYPPRPQKQYPINPKAKPSIQIVIDDLLKQGVLTPQNSTMNTPVYPVPKPDGRWRMVLDYREVNKTIPLTAAQNQHSAGILATIVRQKYKTTLDLANGFWAHPITPESYWLTAFTWQGKQYCWTRLPQGFLNSPALFNADVVDLLKEIPNVQVYVDDIYLSHDDPKEHVQQLEKVFQILLQAGYVVSLKKSEIGQKTVEFLGFNITKEGRGLTDTFKTKLLNITPPKDLKQLQSILGLLNFARNFIPNFAELVQPLYNLIAPAKGKYIEWSEENTKQLNMVIEALNTASNLEERLPEQRLVIKVNTSPSAGYVRYYNETGKKPIMYLNYVFSKAELKFSMLEKLLTTMHKALIKAMDLAMGQEILVYSPIVSMTKIQKTPLPERKALPIRWITWMTYLEDPRIQFHYDKTLPELKHIPDVYTSSQSPVKHPSQYEGVFYTDGSAIKSPDPTKSNNAGMGIVHATYKPEYQVLNQWSIPLGNHTAQMAEIAAVEFACKKALKIPGPVLVITDSFYVAESANKELPYWKSNGFVNNKKKPLKHISKWKSIAECLSMKPDITIQHEKGISLQIPVFILKGNALADKLATQGSYVVNAGKRTADGSEFEKRTADGSEFESPKKKAKVE

SEQ ID NO: 1331 - protein, 2174 aa, synthetic construct
MPAAKRVKLDGGDKKYSIGLDIGTNSVGWAVITDEYKVPSKKFKVLGNTDRHSIKKNLIGALLFDSGETAEATRLKRTARRRYTRRKNRICYLQEIFSNEMAKVDDSFFHRLEESFLVEEDKKHERHPIFGNIVDEVAYHEKYPTIYHLRKKLVDSTDKADLRLIYLALAHMIKFRGHFLIEGDLNPDNSDVDKLFIQLVQTYNQLFEENPINASGVDAKAILSARLSKSRRLENLIAQLPGEKKNGLFGNLIALSLGLTPNFKSNFDLAEDAKLQLSKDTYDDDLDNLLAQIGDQYADLFLAAKNLSDAILLSDILRVNTEITKAPLSASMIKRYDEHHQDLTLLKALVRQQLPEKYKEIFFDQSKNGYAGYIDGGASQEEFYKFIKPILEKMDGTEELLVKLNREDLLRKQRTFDNGSIPHQIHLGELHAILRRQEDFYPFLKDNREKIEKILTFRIPYYVGPLARGNSRFAWMTRKSEETITPWNFEEVVDKGASAQSFIERMTNFDKNLPNEKVLPKHSLLYEYFTVYNELTKVKYVTEGMRKPAFLSGEQKKAIVDLLFKTNRKVTVKQLKEDYFKKIECFDSVEISGVEDRFNASLGTYHDLLKIIKDKDFLDNEENEDILEDIVLTLTLFEDREMIEERLKTYAHLFDDKVMKQLKRRRYTGWGRLSRKLINGIRDKQSGKTILDFLKSDGFANRNFMQLIHDDSLTFKEDIQKAQVSGQGDSLHEHIANLAGSPAIKKGILQTVKVVDELVKVMGRHKPENIVIEMARENQTTQKGQKNSRERMKRIEEGIKELGSQILKEHPVENTQLQNEKLYLYYLQNGRDMYVDQELDINRLSDYDVDHIVPQSFLKDDSIDNKVLTRSDKARGKSDNVPSEEVVKKMKNYWRQLLNAKLITQRKFDNLTKAERGGLSELDKAGFIKRQLVETRQITKHVAQILDSRMNTKYDENDKLIREVKVITLKSKLVSDFRKDFQFYKVREINNYHHAHDAYLNAVVGTALIKKYPKLESEFVYGDYKVYDVRKMIAKSEQEIGKATAKYFFYSNIMNFFKTEITLANGEIRKRPLIETNGETGEIVWDKGRDFATVRKVLSMPQVNIVKKTEVQTGGFSKESILPKRNSDKLIARKKDWDPKKYGGFDSPTVAYSVLVVAKVEKGKSKKLKSVKELLGITIMERSSFEKNPIDFLEAKGYKEVKKDLIIKLPKYSLFELENGRKRMLASAGELQKGNELALPSKYVNFLYLASHYEKLKGSPEDNEQKQLFVEQHKHYLDEIIEQISEFSKRVILADANLDKVLSAYNKHRDKPIREQAENIIHLFTLTNLGAPAAFKYFDTTIDRKRYTSTKEVLDATLIHQSITGLYETRIDLSQLGGDGGGGSPAPGSSGGMNPLQLLQPLPAEIKGTKLLAHWNSGATITCIPESFLEDEQPIKKTLIKTIHGEKQQNVYYVTFKVKGRKVEAEVIASPYEYILLSPTDVPWLTQQPLQLTILVPLQEYQEKILSKTALPEDQKQQLKTLFVKYDNLWQHWENQVGHRKIRPHNIATGDYPPRPQKQYPINPKAKPSIQIVIDDLLKQGVLTPQNSTMNTPVYPVPKPDGRWRMVLDYREVNKTIPLTAAQNQHSAGILATIVRQKYKTTLDLANGFWAHPITPESYWLTAFTWQGKQYCWTRLPQGFLNSPALFNADVVDLLKEIPNVQVYVDDIYLSHDDPKEHVQQLEKVFQILLQAGYVVSLKKSEIGQKTVEFLGFNITKEGRGLTDTFKTKLLNITPPKDLKQLQSILGLLNFARNFIPNFAELVQPLYNLIAPAKGKYIEWSEENTKQLNMVIEALNTASNLEERLPEQRLVIKVNTSPSAGYVRYYNETGKKPIMYLNYVFSKAELKFSMLEKLLTTMHKALIKAMDLAMGQEILVYSPIVSMTKIQKTPLPERKALPIRWITWMTYLEDPRIQFHYDKTLPELKHIPDVYTSSQSPVKHPSQYEGVFYTDGSAIKSPDPTKSNNAGMGIVHATYKPEYQVLNQWSIPLGNHTAQMAEIAAVEFACKKALKIPGPVLVITDSFYVAESANKELPYWKSNGFVNNKKKPLKHISKWKSIAECLSMKPDITIQHEKGISLQIPVFILKGNALADKLATQGSYVVNAGKRTADGSEFEKRTADGSEFESPKKKAKVE

SEQ ID NO: 1332 - protein, 2177 aa, synthetic construct
MPAAKRVKLDGGDKKYSIGLDIGTNSVGWAVITDEYKVPSKKFKVLGNTDRHSIKKNLIGALLFDSGETAEATRLKRTARRRYTRRKNRICYLQEIFSNEMAKVDDSFFHRLEESFLVEEDKKHERHPIFGNIVDEVAYHEKYPTIYHLRKKLVDSTDKADLRLIYLALAHMIKFRGHFLIEGDLNPDNSDVDKLFIQLVQTYNQLFEENPINASGVDAKAILSARLSKSRRLENLIAQLPGEKKNGLFGNLIALSLGLTPNFKSNFDLAEDAKLQLSKDTYDDDLDNLLAQIGDQYADLFLAAKNLSDAILLSDILRVNTEITKAPLSASMIKRYDEHHQDLTLLKALVRQQLPEKYKEIFFDQSKNGYAGYIDGGASQEEFYKFIKPILEKMDGTEELLVKLNREDLLRKQRTFDNGSIPHQIHLGELHAILRRQEDFYPFLKDNREKIEKILTFRIPYYVGPLARGNSRFAWMTRKSEETITPWNFEEVVDKGASAQSFIERMTNFDKNLPNEKVLPKHSLLYEYFTVYNELTKVKYVTEGMRKPAFLSGEQKKAIVDLLFKTNRKVTVKQLKEDYFKKIECFDSVEISGVEDRFNASLGTYHDLLKIIKDKDFLDNEENEDILEDIVLTLTLFEDREMIEERLKTYAHLFDDKVMKQLKRRRYTGWGRLSRKLINGIRDKQSGKTILDFLKSDGFANRNFMQLIHDDSLTFKEDIQKAQVSGQGDSLHEHIANLAGSPAIKKGILQTVKVVDELVKVMGRHKPENIVIEMARENQTTQKGQKNSRERMKRIEEGIKELGSQILKEHPVENTQLQNEKLYLYYLQNGRDMYVDQELDINRLSDYDVDHIVPQSFLKDDSIDNKVLTRSDKARGKSDNVPSEEVVKKMKNYWRQLLNAKLITQRKFDNLTKAERGGLSELDKAGFIKRQLVETRQITKHVAQILDSRMNTKYDENDKLIREVKVITLKSKLVSDFRKDFQFYKVREINNYHHAHDAYLNAVVGTALIKKYPKLESEFVYGDYKVYDVRKMIAKSEQEIGKATAKYFFYSNIMNFFKTEITLANGEIRKRPLIETNGETGEIVWDKGRDFATVRKVLSMPQVNIVKKTEVQTGGFSKESILPKRNSDKLIARKKDWDPKKYGGFDSPTVAYSVLVVAKVEKGKSKKLKSVKELLGITIMERSSFEKNPIDFLEAKGYKEVKKDLIIKLPKYSLFELENGRKRMLASAGELQKGNELALPSKYVNFLYLASHYEKLKGSPEDNEQKQLFVEQHKHYLDEIIEQISEFSKRVILADANLDKVLSAYNKHRDKPIREQAENIIHLFTLTNLGAPAAFKYFDTTIDRKRYTSTKEVLDATLIHQSITGLYETRIDLSQLGGDGGGSSGSSGSSGSSGGMNPLQLLQPLPAEIKGTKLLAHWNSGATITCIPESFLEDEQPIKKTLIKTIHGEKQQNVYYVTFKVKGRKVEAEVIASPYEYILLSPTDVPWLTQQPLQLTILVPLQEYQEKILSKTALPEDQKQQLKTLFVKYDNLWQHWENQVGHRKIRPHNIATGDYPPRPQKQYPINPKAKPSIQIVIDDLLKQGVLTPQNSTMNTPVYPVPKPDGRWRMVLDYREVNKTIPLTAAQNQHSAGILATIVRQKYKTTLDLANGFWAHPITPESYWLTAFTWQGKQYCWTRLPQGFLNSPALFNADVVDLLKEIPNVQVYVDDIYLSHDDPKEHVQQLEKVFQILLQAGYVVSLKKSEIGQKTVEFLGFNITKEGRGLTDTFKTKLLNITPPKDLKQLQSILGLLNFARNFIPNFAELVQPLYNLIAPAKGKYIEWSEENTKQLNMVIEALNTASNLEERLPEQRLVIKVNTSPSAGYVRYYNETGKKPIMYLNYVFSKAELKFSMLEKLLTTMHKALIKAMDLAMGQEILVYSPIVSMTKIQKTPLPERKALPIRWITWMTYLEDPRIQFHYDKTLPELKHIPDVYTSSQSPVKHPSQYEGVFYTDGSAIKSPDPTKSNNAGMGIVHATYKPEYQVLNQWSIPLGNHTAQMAEIAAVEFACKKALKIPGPVLVITDSFYVAESANKELPYWKSNGFVNNKKKPLKHISKWKSIAECLSMKPDITIQHEKGISLQIPVFILKGNALADKLATQGSYVVNAGKRTADGSEFEKRTADGSEFESPKKKAKVE

SEQ ID NO: 1333 - protein, 2174 aa, synthetic construct
MPAAKRVKLDGGDKKYSIGLDIGTNSVGWAVITDEYKVPSKKFKVLGNTDRHSIKKNLIGALLFDSGETAEATRLKRTARRRYTRRKNRICYLQEIFSNEMAKVDDSFFHRLEESFLVEEDKKHERHPIFGNIVDEVAYHEKYPTIYHLRKKLVDSTDKADLRLIYLALAHMIKFRGHFLIEGDLNPDNSDVDKLFIQLVQTYNQLFEENPINASGVDAKAILSARLSKSRRLENLIAQLPGEKKNGLFGNLIALSLGLTPNFKSNFDLAEDAKLQLSKDTYDDDLDNLLAQIGDQYADLFLAAKNLSDAILLSDILRVNTEITKAPLSASMIKRYDEHHQDLTLLKALVRQQLPEKYKEIFFDQSKNGYAGYIDGGASQEEFYKFIKPILEKMDGTEELLVKLNREDLLRKQRTFDNGSIPHQIHLGELHAILRRQEDFYPFLKDNREKIEKILTFRIPYYVGPLARGNSRFAWMTRKSEETITPWNFEEVVDKGASAQSFIERMTNFDKNLPNEKVLPKHSLLYEYFTVYNELTKVKYVTEGMRKPAFLSGEQKKAIVDLLFKTNRKVTVKQLKEDYFKKIECFDSVEISGVEDRFNASLGTYHDLLKIIKDKDFLDNEENEDILEDIVLTLTLFEDREMIEERLKTYAHLFDDKVMKQLKRRRYTGWGRLSRKLINGIRDKQSGKTILDFLKSDGFANRNFMQLIHDDSLTFKEDIQKAQVSGQGDSLHEHIANLAGSPAIKKGILQTVKVVDELVKVMGRHKPENIVIEMARENQTTQKGQKNSRERMKRIEEGIKELGSQILKEHPVENTQLQNEKLYLYYLQNGRDMYVDQELDINRLSDYDVDHIVPQSFLKDDSIDNKVLTRSDKARGKSDNVPSEEVVKKMKNYWRQLLNAKLITQRKFDNLTKAERGGLSELDKAGFIKRQLVETRQITKHVAQILDSRMNTKYDENDKLIREVKVITLKSKLVSDFRKDFQFYKVREINNYHHAHDAYLNAVVGTALIKKYPKLESEFVYGDYKVYDVRKMIAKSEQEIGKATAKYFFYSNIMNFFKTEITLANGEIRKRPLIETNGETGEIVWDKGRDFATVRKVLSMPQVNIVKKTEVQTGGFSKESILPKRNSDKLIARKKDWDPKKYGGFDSPTVAYSVLVVAKVEKGKSKKLKSVKELLGITIMERSSFEKNPIDFLEAKGYKEVKKDLIIKLPKYSLFELENGRKRMLASAGELQKGNELALPSKYVNFLYLASHYEKLKGSPEDNEQKQLFVEQHKHYLDEIIEQISEFSKRVILADANLDKVLSAYNKHRDKPIREQAENIIHLFTLTNLGAPAAFKYFDTTIDRKRYTSTKEVLDATLIHQSITGLYETRIDLSQLGGDGGPAPGSSGGSGGMNPLQLLQPLPAEIKGTKLLAHWNSGATITCIPESFLEDEQPIKKTLIKTIHGEKQQNVYYVTFKVKGRKVEAEVIASPYEYILLSPTDVPWLTQQPLQLTILVPLQEYQEKILSKTALPEDQKQQLKTLFVKYDNLWQHWENQVGHRKIRPHNIATGDYPPRPQKQYPINPKAKPSIQIVIDDLLKQGVLTPQNSTMNTPVYPVPKPDGRWRMVLDYREVNKTIPLTAAQNQHSAGILATIVRQKYKTTLDLANGFWAHPITPESYWLTAFTWQGKQYCWTRLPQGFLNSPALFNADVVDLLKEIPNVQVYVDDIYLSHDDPKEHVQQLEKVFQILLQAGYVVSLKKSEIGQKTVEFLGFNITKEGRGLTDTFKTKLLNITPPKDLKQLQSILGLLNFARNFIPNFAELVQPLYNLIAPAKGKYIEWSEENTKQLNMVIEALNTASNLEERLPEQRLVIKVNTSPSAGYVRYYNETGKKPIMYLNYVFSKAELKFSMLEKLLTTMHKALIKAMDLAMGQEILVYSPIVSMTKIQKTPLPERKALPIRWITWMTYLEDPRIQFHYDKTLPELKHIPDVYTSSQSPVKHPSQYEGVFYTDGSAIKSPDPTKSNNAGMGIVHATYKPEYQVLNQWSIPLGNHTAQMAEIAAVEFACKKALKIPGPVLVITDSFYVAESANKELPYWKSNGFVNNKKKPLKHISKWKSIAECLSMKPDITIQHEKGISLQIPVFILKGNALADKLATQGSYVVNAGKRTADGSEFEKRTADGSEFESPKKKAKVE

SEQ ID NO: 1334 - protein, 2176 aa, synthetic construct
MPAAKRVKLDGGDKKYSIGLDIGTNSVGWAVITDEYKVPSKKFKVLGNTDRHSIKKNLIGALLFDSGETAEATRLKRTARRRYTRRKNRICYLQEIFSNEMAKVDDSFFHRLEESFLVEEDKKHERHPIFGNIVDEVAYHEKYPTIYHLRKKLVDSTDKADLRLIYLALAHMIKFRGHFLIEGDLNPDNSDVDKLFIQLVQTYNQLFEENPINASGVDAKAILSARLSKSRRLENLIAQLPGEKKNGLFGNLIALSLGLTPNFKSNFDLAEDAKLQLSKDTYDDDLDNLLAQIGDQYADLFLAAKNLSDAILLSDILRVNTEITKAPLSASMIKRYDEHHQDLTLLKALVRQQLPEKYKEIFFDQSKNGYAGYIDGGASQEEFYKFIKPILEKMDGTEELLVKLNREDLLRKQRTFDNGSIPHQIHLGELHAILRRQEDFYPFLKDNREKIEKILTFRIPYYVGPLARGNSRFAWMTRKSEETITPWNFEEVVDKGASAQSFIERMTNFDKNLPNEKVLPKHSLLYEYFTVYNELTKVKYVTEGMRKPAFLSGEQKKAIVDLLFKTNRKVTVKQLKEDYFKKIECFDSVEISGVEDRFNASLGTYHDLLKIIKDKDFLDNEENEDILEDIVLTLTLFEDREMIEERLKTYAHLFDDKVMKQLKRRRYTGWGRLSRKLINGIRDKQSGKTILDFLKSDGFANRNFMQLIHDDSLTFKEDIQKAQVSGQGDSLHEHIANLAGSPAIKKGILQTVKVVDELVKVMGRHKPENIVIEMARENQTTQKGQKNSRERMKRIEEGIKELGSQILKEHPVENTQLQNEKLYLYYLQNGRDMYVDQELDINRLSDYDVDHIVPQSFLKDDSIDNKVLTRSDKARGKSDNVPSEEVVKKMKNYWRQLLNAKLITQRKFDNLTKAERGGLSELDKAGFIKRQLVETRQITKHVAQILDSRMNTKYDENDKLIREVKVITLKSKLVSDFRKDFQFYKVREINNYHHAHDAYLNAVVGTALIKKYPKLESEFVYGDYKVYDVRKMIAKSEQEIGKATAKYFFYSNIMNFFKTEITLANGEIRKRPLIETNGETGEIVWDKGRDFATVRKVLSMPQVNIVKKTEVQTGGFSKESILPKRNSDKLIARKKDWDPKKYGGFDSPTVAYSVLVVAKVEKGKSKKLKSVKELLGITIMERSSFEKNPIDFLEAKGYKEVKKDLIIKLPKYSLFELENGRKRMLASAGELQKGNELALPSKYVNFLYLASHYEKLKGSPEDNEQKQLFVEQHKHYLDEIIEQISEFSKRVILADANLDKVLSAYNKHRDKPIREQAENIIHLFTLTNLGAPAAFKYFDTTIDRKRYTSTKEVLDATLIHQSITGLYETRIDLSQLGGDGGEAAAKGGGGGSGGMNPLQLLQPLPAEIKGTKLLAHWNSGATITCIPESFLEDEQPIKKTLIKTIHGEKQQNVYYVTFKVKGRKVEAEVIASPYEYILLSPTDVPWLTQQPLQLTILVPLQEYQEKILSKTALPEDQKQQLKTLFVKYDNLWQHWENQVGHRKIRPHNIATGDYPPRPQKQYPINPKAKPSIQIVIDDLLKQGVLTPQNSTMNTPVYPVPKPDGRWRMVLDYREVNKTIPLTAAQNQHSAGILATIVRQKYKTTLDLANGFWAHPITPESYWLTAFTWQGKQYCWTRLPQGFLNSPALFNADVVDLLKEIPNVQVYVDDIYLSHDDPKEHVQQLEKVFQILLQAGYVVSLKKSEIGQKTVEFLGFNITKEGRGLTDTFKTKLLNITPPKDLKQLQSILGLLNFARNFIPNFAELVQPLYNLIAPAKGKYIEWSEENTKQLNMVIEALNTASNLEERLPEQRLVIKVNTSPSAGYVRYYNETGKKPIMYLNYVFSKAELKFSMLEKLLTTMHKALIKAMDLAMGQEILVYSPIVSMTKIQKTPLPERKALPIRWITWMTYLEDPRIQFHYDKTLPELKHIPDVYTSSQSPVKHPSQYEGVFYTDGSAIKSPDPTKSNNAGMGIVHATYKPEYQVLNQWSIPLGNHTAQMAEIAAVEFACKKALKIPGPVLVITDSFYVAESANKELPYWKSNGFVNNKKKPLKHISKWKSIAECLSMKPDITIQHEKGISLQIPVFILKGNALADKLATQGSYVVNAGKRTADGSEFEKRTADGSEFESPKKKAKVE

SEQ ID NO: 1335 - protein, 2176 aa, synthetic construct
MPAAKRVKLDGGDKKYSIGLDIGTNSVGWAVITDEYKVPSKKFKVLGNTDRHSIKKNLIGALLFDSGETAEATRLKRTARRRYTRRKNRICYLQEIFSNEMAKVDDSFFHRLEESFLVEEDKKHERHPIFGNIVDEVAYHEKYPTIYHLRKKLVDSTDKADLRLIYLALAHMIKFRGHFLIEGDLNPDNSDVDKLFIQLVQTYNQLFEENPINASGVDAKAILSARLSKSRRLENLIAQLPGEKKNGLFGNLIALSLGLTPNFKSNFDLAEDAKLQLSKDTYDDDLDNLLAQIGDQYADLFLAAKNLSDAILLSDILRVNTEITKAPLSASMIKRYDEHHQDLTLLKALVRQQLPEKYKEIFFDQSKNGYAGYIDGGASQEEFYKFIKPILEKMDGTEELLVKLNREDLLRKQRTFDNGSIPHQIHLGELHAILRRQEDFYPFLKDNREKIEKILTFRIPYYVGPLARGNSRFAWMTRKSEETITPWNFEEVVDKGASAQSFIERMTNFDKNLPNEKVLPKHSLLYEYFTVYNELTKVKYVTEGMRKPAFLSGEQKKAIVDLLFKTNRKVTVKQLKEDYFKKIECFDSVEISGVEDRFNASLGTYHDLLKIIKDKDFLDNEENEDILEDIVLTLTLFEDREMIEERLKTYAHLFDDKVMKQLKRRRYTGWGRLSRKLINGIRDKQSGKTILDFLKSDGFANRNFMQLIHDDSLTFKEDIQKAQVSGQGDSLHEHIANLAGSPAIKKGILQTVKVVDELVKVMGRHKPENIVIEMARENQTTQKGQKNSRERMKRIEEGIKELGSQILKEHPVENTQLQNEKLYLYYLQNGRDMYVDQELDINRLSDYDVDHIVPQSFLKDDSIDNKVLTRSDKARGKSDNVPSEEVVKKMKNYWRQLLNAKLITQRKFDNLTKAERGGLSELDKAGFIKRQLVETRQITKHVAQILDSRMNTKYDENDKLIREVKVITLKSKLVSDFRKDFQFYKVREINNYHHAHDAYLNAVVGTALIKKYPKLESEFVYGDYKVYDVRKMIAKSEQEIGKATAKYFFYSNIMNFFKTEITLANGEIRKRPLIETNGETGEIVWDKGRDFATVRKVLSMPQVNIVKKTEVQTGGFSKESILPKRNSDKLIARKKDWDPKKYGGFDSPTVAYSVLVVAKVEKGKSKKLKSVKELLGITIMERSSFEKNPIDFLEAKGYKEVKKDLIIKLPKYSLFELENGRKRMLASAGELQKGNELALPSKYVNFLYLASHYEKLKGSPEDNEQKQLFVEQHKHYLDEIIEQISEFSKRVILADANLDKVLSAYNKHRDKPIREQAENIIHLFTLTNLGAPAAFKYFDTTIDRKRYTSTKEVLDATLIHQSITGLYETRIDLSQLGGDGGEAAAKGGGGSSGGMNPLQLLQPLPAEIKGTKLLAHWNSGATITCIPESFLEDEQPIKKTLIKTIHGEKQQNVYYVTFKVKGRKVEAEVIASPYEYILLSPTDVPWLTQQPLQLTILVPLQEYQEKILSKTALPEDQKQQLKTLFVKYDNLWQHWENQVGHRKIRPHNIATGDYPPRPQKQYPINPKAKPSIQIVIDDLLKQGVLTPQNSTMNTPVYPVPKPDGRWRMVLDYREVNKTIPLTAAQNQHSAGILATIVRQKYKTTLDLANGFWAHPITPESYWLTAFTWQGKQYCWTRLPQGFLNSPALFNADVVDLLKEIPNVQVYVDDIYLSHDDPKEHVQQLEKVFQILLQAGYVVSLKKSEIGQKTVEFLGFNITKEGRGLTDTFKTKLLNITPPKDLKQLQSILGLLNFARNFIPNFAELVQPLYNLIAPAKGKYIEWSEENTKQLNMVIEALNTASNLEERLPEQRLVIKVNTSPSAGYVRYYNETGKKPIMYLNYVFSKAELKFSMLEKLLTTMHKALIKAMDLAMGQEILVYSPIVSMTKIQKTPLPERKALPIRWITWMTYLEDPRIQFHYDKTLPELKHIPDVYTSSQSPVKHPSQYEGVFYTDGSAIKSPDPTKSNNAGMGIVHATYKPEYQVLNQWSIPLGNHTAQMAEIAAVEFACKKALKIPGPVLVITDSFYVAESANKELPYWKSNGFVNNKKKPLKHISKWKSIAECLSMKPDITIQHEKGISLQIPVFILKGNALADKLATQGSYVVNAGKRTADGSEFEKRTADGSEFESPKKKAKVE

SEQ ID NO: 1336 - protein, 2174 aa, synthetic construct
MPAAKRVKLDGGDKKYSIGLDIGTNSVGWAVITDEYKVPSKKFKVLGNTDRHSIKKNLIGALLFDSGETAEATRLKRTARRRYTRRKNRICYLQEIFSNEMAKVDDSFFHRLEESFLVEEDKKHERHPIFGNIVDEVAYHEKYPTIYHLRKKLVDSTDKADLRLIYLALAHMIKFRGHFLIEGDLNPDNSDVDKLFIQLVQTYNQLFEENPINASGVDAKAILSARLSKSRRLENLIAQLPGEKKNGLFGNLIALSLGLTPNFKSNFDLAEDAKLQLSKDTYDDDLDNLLAQIGDQYADLFLAAKNLSDAILLSDILRVNTEITKAPLSASMIKRYDEHHQDLTLLKALVRQQLPEKYKEIFFDQSKNGYAGYIDGGASQEEFYKFIKPILEKMDGTEELLVKLNREDLLRKQRTFDNGSIPHQIHLGELHAILRRQEDFYPFLKDNREKIEKILTFRIPYYVGPLARGNSRFAWMTRKSEETITPWNFEEVVDKGASAQSFIERMTNFDKNLPNEKVLPKHSLLYEYFTVYNELTKVKYVTEGMRKPAFLSGEQKKAIVDLLFKTNRKVTVKQLKEDYFKKIECFDSVEISGVEDRFNASLGTYHDLLKIIKDKDFLDNEENEDILEDIVLTLTLFEDREMIEERLKTYAHLFDDKVMKQLKRRRYTGWGRLSRKLINGIRDKQSGKTILDFLKSDGFANRNFMQLIHDDSLTFKEDIQKAQVSGQGDSLHEHIANLAGSPAIKKGILQTVKVVDELVKVMGRHKPENIVIEMARENQTTQKGQKNSRERMKRIEEGIKELGSQILKEHPVENTQLQNEKLYLYYLQNGRDMYVDQELDINRLSDYDVDHIVPQSFLKDDSIDNKVLTRSDKARGKSDNVPSEEVVKKMKNYWRQLLNAKLITQRKFDNLTKAERGGLSELDKAGFIKRQLVETRQITKHVAQILDSRMNTKYDENDKLIREVKVITLKSKLVSDFRKDFQFYKVREINNYHHAHDAYLNAVVGTALIKKYPKLESEFVYGDYKVYDVRKMIAKSEQEIGKATAKYFFYSNIMNFFKTEITLANGEIRKRPLIETNGETGEIVWDKGRDFATVRKVLSMPQVNIVKKTEVQTGGFSKESILPKRNSDKLIARKKDWDPKKYGGFDSPTVAYSVLVVAKVEKGKSKKLKSVKELLGITIMERSSFEKNPIDFLEAKGYKEVKKDLIIKLPKYSLFELENGRKRMLASAGELQKGNELALPSKYVNFLYLASHYEKLKGSPEDNEQKQLFVEQHKHYLDEIIEQISEFSKRVILADANLDKVLSAYNKHRDKPIREQAENIIHLFTLTNLGAPAAFKYFDTTIDRKRYTSTKEVLDATLIHQSITGLYETRIDLSQLGGDGGGGGGSSPAPGGMNPLQLLQPLPAEIKGTKLLAHWNSGATITCIPESFLEDEQPIKKTLIKTIHGEKQQNVYYVTFKVKGRKVEAEVIASPYEYILLSPTDVPWLTQQPLQLTILVPLQEYQEKILSKTALPEDQKQQLKTLFVKYDNLWQHWENQVGHRKIRPHNIATGDYPPRPQKQYPINPKAKPSIQIVIDDLLKQGVLTPQNSTMNTPVYPVPKPDGRWRMVLDYREVNKTIPLTAAQNQHSAGILATIVRQKYKTTLDLANGFWAHPITPESYWLTAFTWQGKQYCWTRLPQGFLNSPALFNADVVDLLKEIPNVQVYVDDIYLSHDDPKEHVQQLEKVFQILLQAGYVVSLKKSEIGQKTVEFLGFNITKEGRGLTDTFKTKLLNITPPKDLKQLQSILGLLNFARNFIPNFAELVQPLYNLIAPAKGKYIEWSEENTKQLNMVIEALNTASNLEERLPEQRLVIKVNTSPSAGYVRYYNETGKKPIMYLNYVFSKAELKFSMLEKLLTTMHKALIKAMDLAMGQEILVYSPIVSMTKIQKTPLPERKALPIRWITWMTYLEDPRIQFHYDKTLPELKHIPDVYTSSQSPVKHPSQYEGVFYTDGSAIKSPDPTKSNNAGMGIVHATYKPEYQVLNQWSIPLGNHTAQMAEIAAVEFACKKALKIPGPVLVITDSFYVAESANKELPYWKSNGFVNNKKKPLKHISKWKSIAECLSMKPDITIQHEKGISLQIPVFILKGNALADKLATQGSYVVNAGKRTADGSEFEKRTADGSEFESPKKKAKVE

SEQ ID NO: 1337 - protein, 2176 aa, synthetic construct
MPAAKRVKLDGGDKKYSIGLDIGTNSVGWAVITDEYKVPSKKFKVLGNTDRHSIKKNLIGALLFDSGETAEATRLKRTARRRYTRRKNRICYLQEIFSNEMAKVDDSFFHRLEESFLVEEDKKHERHPIFGNIVDEVAYHEKYPTIYHLRKKLVDSTDKADLRLIYLALAHMIKFRGHFLIEGDLNPDNSDVDKLFIQLVQTYNQLFEENPINASGVDAKAILSARLSKSRRLENLIAQLPGEKKNGLFGNLIALSLGLTPNFKSNFDLAEDAKLQLSKDTYDDDLDNLLAQIGDQYADLFLAAKNLSDAILLSDILRVNTEITKAPLSASMIKRYDEHHQDLTLLKALVRQQLPEKYKEIFFDQSKNGYAGYIDGGASQEEFYKFIKPILEKMDGTEELLVKLNREDLLRKQRTFDNGSIPHQIHLGELHAILRRQEDFYPFLKDNREKIEKILTFRIPYYVGPLARGNSRFAWMTRKSEETITPWNFEEVVDKGASAQSFIERMTNFDKNLPNEKVLPKHSLLYEYFTVYNELTKVKYVTEGMRKPAFLSGEQKKAIVDLLFKTNRKVTVKQLKEDYFKKIECFDSVEISGVEDRFNASLGTYHDLLKIIKDKDFLDNEENEDILEDIVLTLTLFEDREMIEERLKTYAHLFDDKVMKQLKRRRYTGWGRLSRKLINGIRDKQSGKTILDFLKSDGFANRNFMQLIHDDSLTFKEDIQKAQVSGQGDSLHEHIANLAGSPAIKKGILQTVKVVDELVKVMGRHKPENIVIEMARENQTTQKGQKNSRERMKRIEEGIKELGSQILKEHPVENTQLQNEKLYLYYLQNGRDMYVDQELDINRLSDYDVDHIVPQSFLKDDSIDNKVLTRSDKARGKSDNVPSEEVVKKMKNYWRQLLNAKLITQRKFDNLTKAERGGLSELDKAGFIKRQLVETRQITKHVAQILDSRMNTKYDENDKLIREVKVITLKSKLVSDFRKDFQFYKVREINNYHHAHDAYLNAVVGTALIKKYPKLESEFVYGDYKVYDVRKMIAKSEQEIGKATAKYFFYSNIMNFFKTEITLANGEIRKRPLIETNGETGEIVWDKGRDFATVRKVLSMPQVNIVKKTEVQTGGFSKESILPKRNSDKLIARKKDWDPKKYGGFDSPTVAYSVLVVAKVEKGKSKKLKSVKELLGITIMERSSFEKNPIDFLEAKGYKEVKKDLIIKLPKYSLFELENGRKRMLASAGELQKGNELALPSKYVNFLYLASHYEKLKGSPEDNEQKQLFVEQHKHYLDEIIEQISEFSKRVILADANLDKVLSAYNKHRDKPIREQAENIIHLFTLTNLGAPAAFKYFDTTIDRKRYTSTKEVLDATLIHQSITGLYETRIDLSQLGGDGGGGGGSSEAAAKGGMNPLQLLQPLPAEIKGTKLLAHWNSGATITCIPESFLEDEQPIKKTLIKTIHGEKQQNVYYVTFKVKGRKVEAEVIASPYEYILLSPTDVPWLTQQPLQLTILVPLQEYQEKILSKTALPEDQKQQLKTLFVKYDNLWQHWENQVGHRKIRPHNIATGDYPPRPQKQYPINPKAKPSIQIVIDDLLKQGVLTPQNSTMNTPVYPVPKPDGRWRMVLDYREVNKTIPLTAAQNQHSAGILATIVRQKYKTTLDLANGFWAHPITPESYWLTAFTWQGKQYCWTRLPQGFLNSPALFNADVVDLLKEIPNVQVYVDDIYLSHDDPKEHVQQLEKVFQILLQAGYVVSLKKSEIGQKTVEFLGFNITKEGRGLTDTFKTKLLNITPPKDLKQLQSILGLLNFARNFIPNFAELVQPLYNLIAPAKGKYIEWSEENTKQLNMVIEALNTASNLEERLPEQRLVIKVNTSPSAGYVRYYNETGKKPIMYLNYVFSKAELKFSMLEKLLTTMHKALIKAMDLAMGQEILVYSPIVSMTKIQKTPLPERKALPIRWITWMTYLEDPRIQFHYDKTLPELKHIPDVYTSSQSPVKHPSQYEGVFYTDGSAIKSPDPTKSNNAGMGIVHATYKPEYQVLNQWSIPLGNHTAQMAEIAAVEFACKKALKIPGPVLVITDSFYVAESANKELPYWKSNGFVNNKKKPLKHISKWKSIAECLSMKPDITIQHEKGISLQIPVFILKGNALADKLATQGSYVVNAGKRTADGSEFEKRTADGSEFESPKKKAKVE

SEQ ID NO: 1338 - protein, 2174 aa, synthetic construct
MPAAKRVKLDGGDKKYSIGLDIGTNSVGWAVITDEYKVPSKKFKVLGNTDRHSIKKNLIGALLFDSGETAEATRLKRTARRRYTRRKNRICYLQEIFSNEMAKVDDSFFHRLEESFLVEEDKKHERHPIFGNIVDEVAYHEKYPTIYHLRKKLVDSTDKADLRLIYLALAHMIKFRGHFLIEGDLNPDNSDVDKLFIQLVQTYNQLFEENPINASGVDAKAILSARLSKSRRLENLIAQLPGEKKNGLFGNLIALSLGLTPNFKSNFDLAEDAKLQLSKDTYDDDLDNLLAQIGDQYADLFLAAKNLSDAILLSDILRVNTEITKAPLSASMIKRYDEHHQDLTLLKALVRQQLPEKYKEIFFDQSKNGYAGYIDGGASQEEFYKFIKPILEKMDGTEELLVKLNREDLLRKQRTFDNGSIPHQIHLGELHAILRRQEDFYPFLKDNREKIEKILTFRIPYYVGPLARGNSRFAWMTRKSEETITPWNFEEVVDKGASAQSFIERMTNFDKNLPNEKVLPKHSLLYEYFTVYNELTKVKYVTEGMRKPAFLSGEQKKAIVDLLFKTNRKVTVKQLKEDYFKKIECFDSVEISGVEDRFNASLGTYHDLLKIIKDKDFLDNEENEDILEDIVLTLTLFEDREMIEERLKTYAHLFDDKVMKQLKRRRYTGWGRLSRKLINGIRDKQSGKTILDFLKSDGFANRNFMQLIHDDSLTFKEDIQKAQVSGQGDSLHEHIANLAGSPAIKKGILQTVKVVDELVKVMGRHKPENIVIEMARENQTTQKGQKNSRERMKRIEEGIKELGSQILKEHPVENTQLQNEKLYLYYLQNGRDMYVDQELDINRLSDYDVDHIVPQSFLKDDSIDNKVLTRSDKARGKSDNVPSEEVVKKMKNYWRQLLNAKLITQRKFDNLTKAERGGLSELDKAGFIKRQLVETRQITKHVAQILDSRMNTKYDENDKLIREVKVITLKSKLVSDFRKDFQFYKVREINNYHHAHDAYLNAVVGTALIKKYPKLESEFVYGDYKVYDVRKMIAKSEQEIGKATAKYFFYSNIMNFFKTEITLANGEIRKRPLIETNGETGEIVWDKGRDFATVRKVLSMPQVNIVKKTEVQTGGFSKESILPKRNSDKLIARKKDWDPKKYGGFDSPTVAYSVLVVAKVEKGKSKKLKSVKELLGITIMERSSFEKNPIDFLEAKGYKEVKKDLIIKLPKYSLFELENGRKRMLASAGELQKGNELALPSKYVNFLYLASHYEKLKGSPEDNEQKQLFVEQHKHYLDEIIEQISEFSKRVILADANLDKVLSAYNKHRDKPIREQAENIIHLFTLTNLGAPAAFKYFDTTIDRKRYTSTKEVLDATLIHQSITGLYETRIDLSQLGGDGGGGGGGSGSSGGMNPLQLLQPLPAEIKGTKLLAHWNSGATITCIPESFLEDEQPIKKTLIKTIHGEKQQNVYYVTFKVKGRKVEAEVIASPYEYILLSPTDVPWLTQQPLQLTILVPLQEYQEKILSKTALPEDQKQQLKTLFVKYDNLWQHWENQVGHRKIRPHNIATGDYPPRPQKQYPINPKAKPSIQIVIDDLLKQGVLTPQNSTMNTPVYPVPKPDGRWRMVLDYREVNKTIPLTAAQNQHSAGILATIVRQKYKTTLDLANGFWAHPITPESYWLTAFTWQGKQYCWTRLPQGFLNSPALFNADVVDLLKEIPNVQVYVDDIYLSHDDPKEHVQQLEKVFQILLQAGYVVSLKKSEIGQKTVEFLGFNITKEGRGLTDTFKTKLLNITPPKDLKQLQSILGLLNFARNFIPNFAELVQPLYNLIAPAKGKYIEWSEENTKQLNMVIEALNTASNLEERLPEQRLVIKVNTSPSAGYVRYYNETGKKPIMYLNYVFSKAELKFSMLEKLLTTMHKALIKAMDLAMGQEILVYSPIVSMTKIQKTPLPERKALPIRWITWMTYLEDPRIQFHYDKTLPELKHIPDVYTSSQSPVKHPSQYEGVFYTDGSAIKSPDPTKSNNAGMGIVHATYKPEYQVLNQWSIPLGNHTAQMAEIAAVEFACKKALKIPGPVLVITDSFYVAESANKELPYWKSNGFVNNKKKPLKHISKWKSIAECLSMKPDITIQHEKGISLQIPVFILKGNALADKLATQGSYVVNAGKRTADGSEFEKRTADGSEFESPKKKAKVE

SEQ ID NO: 1339 - protein, 2176 aa, synthetic construct
MPAAKRVKLDGGDKKYSIGLDIGTNSVGWAVITDEYKVPSKKFKVLGNTDRHSIKKNLIGALLFDSGETAEATRLKRTARRRYTRRKNRICYLQEIFSNEMAKVDDSFFHRLEESFLVEEDKKHERHPIFGNIVDEVAYHEKYPTIYHLRKKLVDSTDKADLRLIYLALAHMIKFRGHFLIEGDLNPDNSDVDKLFIQLVQTYNQLFEENPINASGVDAKAILSARLSKSRRLENLIAQLPGEKKNGLFGNLIALSLGLTPNFKSNFDLAEDAKLQLSKDTYDDDLDNLLAQIGDQYADLFLAAKNLSDAILLSDILRVNTEITKAPLSASMIKRYDEHHQDLTLLKALVRQQLPEKYKEIFFDQSKNGYAGYIDGGASQEEFYKFIKPILEKMDGTEELLVKLNREDLLRKQRTFDNGSIPHQIHLGELHAILRRQEDFYPFLKDNREKIEKILTFRIPYYVGPLARGNSRFAWMTRKSEETITPWNFEEVVDKGASAQSFIERMTNFDKNLPNEKVLPKHSLLYEYFTVYNELTKVKYVTEGMRKPAFLSGEQKKAIVDLLFKTNRKVTVKQLKEDYFKKIECFDSVEISGVEDRFNASLGTYHDLLKIIKDKDFLDNEENEDILEDIVLTLTLFEDREMIEERLKTYAHLFDDKVMKQLKRRRYTGWGRLSRKLINGIRDKQSGKTILDFLKSDGFANRNFMQLIHDDSLTFKEDIQKAQVSGQGDSLHEHIANLAGSPAIKKGILQTVKVVDELVKVMGRHKPENIVIEMARENQTTQKGQKNSRERMKRIEEGIKELGSQILKEHPVENTQLQNEKLYLYYLQNGRDMYVDQELDINRLSDYDVDHIVPQSFLKDDSIDNKVLTRSDKARGKSDNVPSEEVVKKMKNYWRQLLNAKLITQRKFDNLTKAERGGLSELDKAGFIKRQLVETRQITKHVAQILDSRMNTKYDENDKLIREVKVITLKSKLVSDFRKDFQFYKVREINNYHHAHDAYLNAVVGTALIKKYPKLESEFVYGDYKVYDVRKMIAKSEQEIGKATAKYFFYSNIMNFFKTEITLANGEIRKRPLIETNGETGEIVWDKGRDFATVRKVLSMPQVNIVKKTEVQTGGFSKESILPKRNSDKLIARKKDWDPKKYGGFDSPTVAYSVLVVAKVEKGKSKKLKSVKELLGITIMERSSFEKNPIDFLEAKGYKEVKKDLIIKLPKYSLFELENGRKRMLASAGELQKGNELALPSKYVNFLYLASHYEKLKGSPEDNEQKQLFVEQHKHYLDEIIEQISEFSKRVILADANLDKVLSAYNKHRDKPIREQAENIIHLFTLTNLGAPAAFKYFDTTIDRKRYTSTKEVLDATLIHQSITGLYETRIDLSQLGGDGGGGGEAAAKGSSGGMNPLQLLQPLPAEIKGTKLLAHWNSGATITCIPESFLEDEQPIKKTLIKTIHGEKQQNVYYVTFKVKGRKVEAEVIASPYEYILLSPTDVPWLTQQPLQLTILVPLQEYQEKILSKTALPEDQKQQLKTLFVKYDNLWQHWENQVGHRKIRPHNIATGDYPPRPQKQYPINPKAKPSIQIVIDDLLKQGVLTPQNSTMNTPVYPVPKPDGRWRMVLDYREVNKTIPLTAAQNQHSAGILATIVRQKYKTTLDLANGFWAHPITPESYWLTAFTWQGKQYCWTRLPQGFLNSPALFNADVVDLLKEIPNVQVYVDDIYLSHDDPKEHVQQLEKVFQILLQAGYVVSLKKSEIGQKTVEFLGFNITKEGRGLTDTFKTKLLNITPPKDLKQLQSILGLLNFARNFIPNFAELVQPLYNLIAPAKGKYIEWSEENTKQLNMVIEALNTASNLEERLPEQRLVIKVNTSPSAGYVRYYNETGKKPIMYLNYVFSKAELKFSMLEKLLTTMHKALIKAMDLAMGQEILVYSPIVSMTKIQKTPLPERKALPIRWITWMTYLEDPRIQFHYDKTLPELKHIPDVYTSSQSPVKHPSQYEGVFYTDGSAIKSPDPTKSNNAGMGIVHATYKPEYQVLNQWSIPLGNHTAQMAEIAAVEFACKKALKIPGPVLVITDSFYVAESANKELPYWKSNGFVNNKKKPLKHISKWKSIAECLSMKPDITIQHEKGISLQIPVFILKGNALADKLATQGSYVVNAGKRTADGSEFEKRTADGSEFESPKKKAKVE

SEQ ID NO: 1340 - protein, 2171 aa, synthetic construct
MPAAKRVKLDGGDKKYSIGLDIGTNSVGWAVITDEYKVPSKKFKVLGNTDRHSIKKNLIGALLFDSGETAEATRLKRTARRRYTRRKNRICYLQEIFSNEMAKVDDSFFHRLEESFLVEEDKKHERHPIFGNIVDEVAYHEKYPTIYHLRKKLVDSTDKADLRLIYLALAHMIKFRGHFLIEGDLNPDNSDVDKLFIQLVQTYNQLFEENPINASGVDAKAILSARLSKSRRLENLIAQLPGEKKNGLFGNLIALSLGLTPNFKSNFDLAEDAKLQLSKDTYDDDLDNLLAQIGDQYADLFLAAKNLSDAILLSDILRVNTEITKAPLSASMIKRYDEHHQDLTLLKALVRQQLPEKYKEIFFDQSKNGYAGYIDGGASQEEFYKFIKPILEKMDGTEELLVKLNREDLLRKQRTFDNGSIPHQIHLGELHAILRRQEDFYPFLKDNREKIEKILTFRIPYYVGPLARGNSRFAWMTRKSEETITPWNFEEVVDKGASAQSFIERMTNFDKNLPNEKVLPKHSLLYEYFTVYNELTKVKYVTEGMRKPAFLSGEQKKAIVDLLFKTNRKVTVKQLKEDYFKKIECFDSVEISGVEDRFNASLGTYHDLLKIIKDKDFLDNEENEDILEDIVLTLTLFEDREMIEERLKTYAHLFDDKVMKQLKRRRYTGWGRLSRKLINGIRDKQSGKTILDFLKSDGFANRNFMQLIHDDSLTFKEDIQKAQVSGQGDSLHEHIANLAGSPAIKKGILQTVKVVDELVKVMGRHKPENIVIEMARENQTTQKGQKNSRERMKRIEEGIKELGSQILKEHPVENTQLQNEKLYLYYLQNGRDMYVDQELDINRLSDYDVDHIVPQSFLKDDSIDNKVLTRSDKARGKSDNVPSEEVVKKMKNYWRQLLNAKLITQRKFDNLTKAERGGLSELDKAGFIKRQLVETRQITKHVAQILDSRMNTKYDENDKLIREVKVITLKSKLVSDFRKDFQFYKVREINNYHHAHDAYLNAVVGTALIKKYPKLESEFVYGDYKVYDVRKMIAKSEQEIGKATAKYFFYSNIMNFFKTEITLANGEIRKRPLIETNGETGEIVWDKGRDFATVRKVLSMPQVNIVKKTEVQTGGFSKESILPKRNSDKLIARKKDWDPKKYGGFDSPTVAYSVLVVAKVEKGKSKKLKSVKELLGITIMERSSFEKNPIDFLEAKGYKEVKKDLIIKLPKYSLFELENGRKRMLASAGELQKGNELALPSKYVNFLYLASHYEKLKGSPEDNEQKQLFVEQHKHYLDEIIEQISEFSKRVILADANLDKVLSAYNKHRDKPIREQAENIIHLFTLTNLGAPAAFKYFDTTIDRKRYTSTKEVLDATLIHQSITGLYETRIDLSQLGGDGGGSSGGGGGMNPLQLLQPLPAEIKGTKLLAHWNSGATITCIPESFLEDEQPIKKTLIKTIHGEKQQNVYYVTFKVKGRKVEAEVIASPYEYILLSPTDVPWLTQQPLQLTILVPLQEYQEKILSKTALPEDQKQQLKTLFVKYDNLWQHWENQVGHRKIRPHNIATGDYPPRPQKQYPINPKAKPSIQIVIDDLLKQGVLTPQNSTMNTPVYPVPKPDGRWRMVLDYREVNKTIPLTAAQNQHSAGILATIVRQKYKTTLDLANGFWAHPITPESYWLTAFTWQGKQYCWTRLPQGFLNSPALFNADVVDLLKEIPNVQVYVDDIYLSHDDPKEHVQQLEKVFQILLQAGYVVSLKKSEIGQKTVEFLGFNITKEGRGLTDTFKTKLLNITPPKDLKQLQSILGLLNFARNFIPNFAELVQPLYNLIAPAKGKYIEWSEENTKQLNMVIEALNTASNLEERLPEQRLVIKVNTSPSAGYVRYYNETGKKPIMYLNYVFSKAELKFSMLEKLLTTMHKALIKAMDLAMGQEILVYSPIVSMTKIQKTPLPERKALPIRWITWMTYLEDPRIQFHYDKTLPELKHIPDVYTSSQSPVKHPSQYEGVFYTDGSAIKSPDPTKSNNAGMGIVHATYKPEYQVLNQWSIPLGNHTAQMAEIAAVEFACKKALKIPGPVLVITDSFYVAESANKELPYWKSNGFVNNKKKPLKHISKWKSIAECLSMKPDITIQHEKGISLQIPVFILKGNALADKLATQGSYVVNAGKRTADGSEFEKRTADGSEFESPKKKAKVE

SEQ ID NO: 1341 - protein, 2171 aa, synthetic construct
MPAAKRVKLDGGDKKYSIGLDIGTNSVGWAVITDEYKVPSKKFKVLGNTDRHSIKKNLIGALLFDSGETAEATRLKRTARRRYTRRKNRICYLQEIFSNEMAKVDDSFFHRLEESFLVEEDKKHERHPIFGNIVDEVAYHEKYPTIYHLRKKLVDSTDKADLRLIYLALAHMIKFRGHFLIEGDLNPDNSDVDKLFIQLVQTYNQLFEENPINASGVDAKAILSARLSKSRRLENLIAQLPGEKKNGLFGNLIALSLGLTPNFKSNFDLAEDAKLQLSKDTYDDDLDNLLAQIGDQYADLFLAAKNLSDAILLSDILRVNTEITKAPLSASMIKRYDEHHQDLTLLKALVRQQLPEKYKEIFFDQSKNGYAGYIDGGASQEEFYKFIKPILEKMDGTEELLVKLNREDLLRKQRTFDNGSIPHQIHLGELHAILRRQEDFYPFLKDNREKIEKILTFRIPYYVGPLARGNSRFAWMTRKSEETITPWNFEEVVDKGASAQSFIERMTNFDKNLPNEKVLPKHSLLYEYFTVYNELTKVKYVTEGMRKPAFLSGEQKKAIVDLLFKTNRKVTVKQLKEDYFKKIECFDSVEISGVEDRFNASLGTYHDLLKIIKDKDFLDNEENEDILEDIVLTLTLFEDREMIEERLKTYAHLFDDKVMKQLKRRRYTGWGRLSRKLINGIRDKQSGKTILDFLKSDGFANRNFMQLIHDDSLTFKEDIQKAQVSGQGDSLHEHIANLAGSPAIKKGILQTVKVVDELVKVMGRHKPENIVIEMARENQTTQKGQKNSRERMKRIEEGIKELGSQILKEHPVENTQLQNEKLYLYYLQNGRDMYVDQELDINRLSDYDVDHIVPQSFLKDDSIDNKVLTRSDKARGKSDNVPSEEVVKKMKNYWRQLLNAKLITQRKFDNLTKAERGGLSELDKAGFIKRQLVETRQITKHVAQILDSRMNTKYDENDKLIREVKVITLKSKLVSDFRKDFQFYKVREINNYHHAHDAYLNAVVGTALIKKYPKLESEFVYGDYKVYDVRKMIAKSEQEIGKATAKYFFYSNIMNFFKTEITLANGEIRKRPLIETNGETGEIVWDKGRDFATVRKVLSMPQVNIVKKTEVQTGGFSKESILPKRNSDKLIARKKDWDPKKYGGFDSPTVAYSVLVVAKVEKGKSKKLKSVKELLGITIMERSSFEKNPIDFLEAKGYKEVKKDLIIKLPKYSLFELENGRKRMLASAGELQKGNELALPSKYVNFLYLASHYEKLKGSPEDNEQKQLFVEQHKHYLDEIIEQISEFSKRVILADANLDKVLSAYNKHRDKPIREQAENIIHLFTLTNLGAPAAFKYFDTTIDRKRYTSTKEVLDATLIHQSITGLYETRIDLSQLGGDGGGGGGGSGGMNPLQLLQPLPAEIKGTKLLAHWNSGATITCIPESFLEDEQPIKKTLIKTIHGEKQQNVYYVTFKVKGRKVEAEVIASPYEYILLSPTDVPWLTQQPLQLTILVPLQEYQEKILSKTALPEDQKQQLKTLFVKYDNLWQHWENQVGHRKIRPHNIATGDYPPRPQKQYPINPKAKPSIQIVIDDLLKQGVLTPQNSTMNTPVYPVPKPDGRWRMVLDYREVNKTIPLTAAQNQHSAGILATIVRQKYKTTLDLANGFWAHPITPESYWLTAFTWQGKQYCWTRLPQGFLNSPALFNADVVDLLKEIPNVQVYVDDIYLSHDDPKEHVQQLEKVFQILLQAGYVVSLKKSEIGQKTVEFLGFNITKEGRGLTDTFKTKLLNITPPKDLKQLQSILGLLNFARNFIPNFAELVQPLYNLIAPAKGKYIEWSEENTKQLNMVIEALNTASNLEERLPEQRLVIKVNTSPSAGYVRYYNETGKKPIMYLNYVFSKAELKFSMLEKLLTTMHKALIKAMDLAMGQEILVYSPIVSMTKIQKTPLPERKALPIRWITWMTYLEDPRIQFHYDKTLPELKHIPDVYTSSQSPVKHPSQYEGVFYTDGSAIKSPDPTKSNNAGMGIVHATYKPEYQVLNQWSIPLGNHTAQMAEIAAVEFACKKALKIPGPVLVITDSFYVAESANKELPYWKSNGFVNNKKKPLKHISKWKSIAECLSMKPDITIQHEKGISLQIPVFILKGNALADKLATQGSYVVNAGKRTADGSEFEKRTADGSEFESPKKKAKVE

SEQ ID NO: 1342 - protein, 2176 aa, synthetic construct
MPAAKRVKLDGGDKKYSIGLDIGTNSVGWAVITDEYKVPSKKFKVLGNTDRHSIKKNLIGALLFDSGETAEATRLKRTARRRYTRRKNRICYLQEIFSNEMAKVDDSFFHRLEESFLVEEDKKHERHPIFGNIVDEVAYHEKYPTIYHLRKKLVDSTDKADLRLIYLALAHMIKFRGHFLIEGDLNPDNSDVDKLFIQLVQTYNQLFEENPINASGVDAKAILSARLSKSRRLENLIAQLPGEKKNGLFGNLIALSLGLTPNFKSNFDLAEDAKLQLSKDTYDDDLDNLLAQIGDQYADLFLAAKNLSDAILLSDILRVNTEITKAPLSASMIKRYDEHHQDLTLLKALVRQQLPEKYKEIFFDQSKNGYAGYIDGGASQEEFYKFIKPILEKMDGTEELLVKLNREDLLRKQRTFDNGSIPHQIHLGELHAILRRQEDFYPFLKDNREKIEKILTFRIPYYVGPLARGNSRFAWMTRKSEETITPWNFEEVVDKGASAQSFIERMTNFDKNLPNEKVLPKHSLLYEYFTVYNELTKVKYVTEGMRKPAFLSGEQKKAIVDLLFKTNRKVTVKQLKEDYFKKIECFDSVEISGVEDRFNASLGTYHDLLKIIKDKDFLDNEENEDILEDIVLTLTLFEDREMIEERLKTYAHLFDDKVMKQLKRRRYTGWGRLSRKLINGIRDKQSGKTILDFLKSDGFANRNFMQLIHDDSLTFKEDIQKAQVSGQGDSLHEHIANLAGSPAIKKGILQTVKVVDELVKVMGRHKPENIVIEMARENQTTQKGQKNSRERMKRIEEGIKELGSQILKEHPVENTQLQNEKLYLYYLQNGRDMYVDQELDINRLSDYDVDHIVPQSFLKDDSIDNKVLTRSDKARGKSDNVPSEEVVKKMKNYWRQLLNAKLITQRKFDNLTKAERGGLSELDKAGFIKRQLVETRQITKHVAQILDSRMNTKYDENDKLIREVKVITLKSKLVSDFRKDFQFYKVREINNYHHAHDAYLNAVVGTALIKKYPKLESEFVYGDYKVYDVRKMIAKSEQEIGKATAKYFFYSNIMNFFKTEITLANGEIRKRPLIETNGETGEIVWDKGRDFATVRKVLSMPQVNIVKKTEVQTGGFSKESILPKRNSDKLIARKKDWDPKKYGGFDSPTVAYSVLVVAKVEKGKSKKLKSVKELLGITIMERSSFEKNPIDFLEAKGYKEVKKDLIIKLPKYSLFELENGRKRMLASAGELQKGNELALPSKYVNFLYLASHYEKLKGSPEDNEQKQLFVEQHKHYLDEIIEQISEFSKRVILADANLDKVLSAYNKHRDKPIREQAENIIHLFTLTNLGAPAAFKYFDTTIDRKRYTSTKEVLDATLIHQSITGLYETRIDLSQLGGDGGEAAAKGGGPAPGGMNPLQLLQPLPAEIKGTKLLAHWNSGATITCIPESFLEDEQPIKKTLIKTIHGEKQQNVYYVTFKVKGRKVEAEVIASPYEYILLSPTDVPWLTQQPLQLTILVPLQEYQEKILSKTALPEDQKQQLKTLFVKYDNLWQHWENQVGHRKIRPHNIATGDYPPRPQKQYPINPKAKPSIQIVIDDLLKQGVLTPQNSTMNTPVYPVPKPDGRWRMVLDYREVNKTIPLTAAQNQHSAGILATIVRQKYKTTLDLANGFWAHPITPESYWLTAFTWQGKQYCWTRLPQGFLNSPALFNADVVDLLKEIPNVQVYVDDIYLSHDDPKEHVQQLEKVFQILLQAGYVVSLKKSEIGQKTVEFLGFNITKEGRGLTDTFKTKLLNITPPKDLKQLQSILGLLNFARNFIPNFAELVQPLYNLIAPAKGKYIEWSEENTKQLNMVIEALNTASNLEERLPEQRLVIKVNTSPSAGYVRYYNETGKKPIMYLNYVFSKAELKFSMLEKLLTTMHKALIKAMDLAMGQEILVYSPIVSMTKIQKTPLPERKALPIRWITWMTYLEDPRIQFHYDKTLPELKHIPDVYTSSQSPVKHPSQYEGVFYTDGSAIKSPDPTKSNNAGMGIVHATYKPEYQVLNQWSIPLGNHTAQMAEIAAVEFACKKALKIPGPVLVITDSFYVAESANKELPYWKSNGFVNNKKKPLKHISKWKSIAECLSMKPDITIQHEKGISLQIPVFILKGNALADKLATQGSYVVNAGKRTADGSEFEKRTADGSEFESPKKKAKVE

SEQ ID NO: 1343 - protein, 2171 aa, synthetic construct
MPAAKRVKLDGGDKKYSIGLDIGTNSVGWAVITDEYKVPSKKFKVLGNTDRHSIKKNLIGALLFDSGETAEATRLKRTARRRYTRRKNRICYLQEIFSNEMAKVDDSFFHRLEESFLVEEDKKHERHPIFGNIVDEVAYHEKYPTIYHLRKKLVDSTDKADLRLIYLALAHMIKFRGHFLIEGDLNPDNSDVDKLFIQLVQTYNQLFEENPINASGVDAKAILSARLSKSRRLENLIAQLPGEKKNGLFGNLIALSLGLTPNFKSNFDLAEDAKLQLSKDTYDDDLDNLLAQIGDQYADLFLAAKNLSDAILLSDILRVNTEITKAPLSASMIKRYDEHHQDLTLLKALVRQQLPEKYKEIFFDQSKNGYAGYIDGGASQEEFYKFIKPILEKMDGTEELLVKLNREDLLRKQRTFDNGSIPHQIHLGELHAILRRQEDFYPFLKDNREKIEKILTFRIPYYVGPLARGNSRFAWMTRKSEETITPWNFEEVVDKGASAQSFIERMTNFDKNLPNEKVLPKHSLLYEYFTVYNELTKVKYVTEGMRKPAFLSGEQKKAIVDLLFKTNRKVTVKQLKEDYFKKIECFDSVEISGVEDRFNASLGTYHDLLKIIKDKDFLDNEENEDILEDIVLTLTLFEDREMIEERLKTYAHLFDDKVMKQLKRRRYTGWGRLSRKLINGIRDKQSGKTILDFLKSDGFANRNFMQLIHDDSLTFKEDIQKAQVSGQGDSLHEHIANLAGSPAIKKGILQTVKVVDELVKVMGRHKPENIVIEMARENQTTQKGQKNSRERMKRIEEGIKELGSQILKEHPVENTQLQNEKLYLYYLQNGRDMYVDQELDINRLSDYDVDHIVPQSFLKDDSIDNKVLTRSDKARGKSDNVPSEEVVKKMKNYWRQLLNAKLITQRKFDNLTKAERGGLSELDKAGFIKRQLVETRQITKHVAQILDSRMNTKYDENDKLIREVKVITLKSKLVSDFRKDFQFYKVREINNYHHAHDAYLNAVVGTALIKKYPKLESEFVYGDYKVYDVRKMIAKSEQEIGKATAKYFFYSNIMNFFKTEITLANGEIRKRPLIETNGETGEIVWDKGRDFATVRKVLSMPQVNIVKKTEVQTGGFSKESILPKRNSDKLIARKKDWDPKKYGGFDSPTVAYSVLVVAKVEKGKSKKLKSVKELLGITIMERSSFEKNPIDFLEAKGYKEVKKDLIIKLPKYSLFELENGRKRMLASAGELQKGNELALPSKYVNFLYLASHYEKLKGSPEDNEQKQLFVEQHKHYLDEIIEQISEFSKRVILADANLDKVLSAYNKHRDKPIREQAENIIHLFTLTNLGAPAAFKYFDTTIDRKRYTSTKEVLDATLIHQSITGLYETRIDLSQLGGDGGGGGGSSGGMNPLQLLQPLPAEIKGTKLLAHWNSGATITCIPESFLEDEQPIKKTLIKTIHGEKQQNVYYVTFKVKGRKVEAEVIASPYEYILLSPTDVPWLTQQPLQLTILVPLQEYQEKILSKTALPEDQKQQLKTLFVKYDNLWQHWENQVGHRKIRPHNIATGDYPPRPQKQYPINPKAKPSIQIVIDDLLKQGVLTPQNSTMNTPVYPVPKPDGRWRMVLDYREVNKTIPLTAAQNQHSAGILATIVRQKYKTTLDLANGFWAHPITPESYWLTAFTWQGKQYCWTRLPQGFLNSPALFNADVVDLLKEIPNVQVYVDDIYLSHDDPKEHVQQLEKVFQILLQAGYVVSLKKSEIGQKTVEFLGFNITKEGRGLTDTFKTKLLNITPPKDLKQLQSILGLLNFARNFIPNFAELVQPLYNLIAPAKGKYIEWSEENTKQLNMVIEALNTASNLEERLPEQRLVIKVNTSPSAGYVRYYNETGKKPIMYLNYVFSKAELKFSMLEKLLTTMHKALIKAMDLAMGQEILVYSPIVSMTKIQKTPLPERKALPIRWITWMTYLEDPRIQFHYDKTLPELKHIPDVYTSSQSPVKHPSQYEGVFYTDGSAIKSPDPTKSNNAGMGIVHATYKPEYQVLNQWSIPLGNHTAQMAEIAAVEFACKKALKIPGPVLVITDSFYVAESANKELPYWKSNGFVNNKKKPLKHISKWKSIAECLSMKPDITIQHEKGISLQIPVFILKGNALADKLATQGSYVVNAGKRTADGSEFEKRTADGSEFESPKKKAKVE

SEQ ID NO: 1344 - protein, 2174 aa, synthetic construct
MPAAKRVKLDGGDKKYSIGLDIGTNSVGWAVITDEYKVPSKKFKVLGNTDRHSIKKNLIGALLFDSGETAEATRLKRTARRRYTRRKNRICYLQEIFSNEMAKVDDSFFHRLEESFLVEEDKKHERHPIFGNIVDEVAYHEKYPTIYHLRKKLVDSTDKADLRLIYLALAHMIKFRGHFLIEGDLNPDNSDVDKLFIQLVQTYNQLFEENPINASGVDAKAILSARLSKSRRLENLIAQLPGEKKNGLFGNLIALSLGLTPNFKSNFDLAEDAKLQLSKDTYDDDLDNLLAQIGDQYADLFLAAKNLSDAILLSDILRVNTEITKAPLSASMIKRYDEHHQDLTLLKALVRQQLPEKYKEIFFDQSKNGYAGYIDGGASQEEFYKFIKPILEKMDGTEELLVKLNREDLLRKQRTFDNGSIPHQIHLGELHAILRRQEDFYPFLKDNREKIEKILTFRIPYYVGPLARGNSRFAWMTRKSEETITPWNFEEVVDKGASAQSFIERMTNFDKNLPNEKVLPKHSLLYEYFTVYNELTKVKYVTEGMRKPAFLSGEQKKAIVDLLFKTNRKVTVKQLKEDYFKKIECFDSVEISGVEDRFNASLGTYHDLLKIIKDKDFLDNEENEDILEDIVLTLTLFEDREMIEERLKTYAHLFDDKVMKQLKRRRYTGWGRLSRKLINGIRDKQSGKTILDFLKSDGFANRNFMQLIHDDSLTFKEDIQKAQVSGQGDSLHEHIANLAGSPAIKKGILQTVKVVDELVKVMGRHKPENIVIEMARENQTTQKGQKNSRERMKRIEEGIKELGSQILKEHPVENTQLQNEKLYLYYLQNGRDMYVDQELDINRLSDYDVDHIVPQSFLKDDSIDNKVLTRSDKARGKSDNVPSEEVVKKMKNYWRQLLNAKLITQRKFDNLTKAERGGLSELDKAGFIKRQLVETRQITKHVAQILDSRMNTKYDENDKLIREVKVITLKSKLVSDFRKDFQFYKVREINNYHHAHDAYLNAVVGTALIKKYPKLESEFVYGDYKVYDVRKMIAKSEQEIGKATAKYFFYSNIMNFFKTEITLANGEIRKRPLIETNGETGEIVWDKGRDFATVRKVLSMPQVNIVKKTEVQTGGFSKESILPKRNSDKLIARKKDWDPKKYGGFDSPTVAYSVLVVAKVEKGKSKKLKSVKELLGITIMERSSFEKNPIDFLEAKGYKEVKKDLIIKLPKYSLFELENGRKRMLASAGELQKGNELALPSKYVNFLYLASHYEKLKGSPEDNEQKQLFVEQHKHYLDEIIEQISEFSKRVILADANLDKVLSAYNKHRDKPIREQAENIIHLFTLTNLGAPAAFKYFDTTIDRKRYTSTKEVLDATLIHQSITGLYETRIDLSQLGGDGGGSSGSSGSSGGMNPLQLLQPLPAEIKGTKLLAHWNSGATITCIPESFLEDEQPIKKTLIKTIHGEKQQNVYYVTFKVKGRKVEAEVIASPYEYILLSPTDVPWLTQQPLQLTILVPLQEYQEKILSKTALPEDQKQQLKTLFVKYDNLWQHWENQVGHRKIRPHNIATGDYPPRPQKQYPINPKAKPSIQIVIDDLLKQGVLTPQNSTMNTPVYPVPKPDGRWRMVLDYREVNKTIPLTAAQNQHSAGILATIVRQKYKTTLDLANGFWAHPITPESYWLTAFTWQGKQYCWTRLPQGFLNSPALFNADVVDLLKEIPNVQVYVDDIYLSHDDPKEHVQQLEKVFQILLQAGYVVSLKKSEIGQKTVEFLGFNITKEGRGLTDTFKTKLLNITPPKDLKQLQSILGLLNFARNFIPNFAELVQPLYNLIAPAKGKYIEWSEENTKQLNMVIEALNTASNLEERLPEQRLVIKVNTSPSAGYVRYYNETGKKPIMYLNYVFSKAELKFSMLEKLLTTMHKALIKAMDLAMGQEILVYSPIVSMTKIQKTPLPERKALPIRWITWMTYLEDPRIQFHYDKTLPELKHIPDVYTSSQSPVKHPSQYEGVFYTDGSAIKSPDPTKSNNAGMGIVHATYKPEYQVLNQWSIPLGNHTAQMAEIAAVEFACKKALKIPGPVLVITDSFYVAESANKELPYWKSNGFVNNKKKPLKHISKWKSIAECLSMKPDITIQHEKGISLQIPVFILKGNALADKLATQGSYVVNAGKRTADGSEFEKRTADGSEFESPKKKAKVE

SEQ ID NO: 1345 - protein, 2171 aa, synthetic construct
MPAAKRVKLDGGDKKYSIGLDIGTNSVGWAVITDEYKVPSKKFKVLGNTDRHSIKKNLIGALLFDSGETAEATRLKRTARRRYTRRKNRICYLQEIFSNEMAKVDDSFFHRLEESFLVEEDKKHERHPIFGNIVDEVAYHEKYPTIYHLRKKLVDSTDKADLRLIYLALAHMIKFRGHFLIEGDLNPDNSDVDKLFIQLVQTYNQLFEENPINASGVDAKAILSARLSKSRRLENLIAQLPGEKKNGLFGNLIALSLGLTPNFKSNFDLAEDAKLQLSKDTYDDDLDNLLAQIGDQYADLFLAAKNLSDAILLSDILRVNTEITKAPLSASMIKRYDEHHQDLTLLKALVRQQLPEKYKEIFFDQSKNGYAGYIDGGASQEEFYKFIKPILEKMDGTEELLVKLNREDLLRKQRTFDNGSIPHQIHLGELHAILRRQEDFYPFLKDNREKIEKILTFRIPYYVGPLARGNSRFAWMTRKSEETITPWNFEEVVDKGASAQSFIERMTNFDKNLPNEKVLPKHSLLYEYFTVYNELTKVKYVTEGMRKPAFLSGEQKKAIVDLLFKTNRKVTVKQLKEDYFKKIECFDSVEISGVEDRFNASLGTYHDLLKIIKDKDFLDNEENEDILEDIVLTLTLFEDREMIEERLKTYAHLFDDKVMKQLKRRRYTGWGRLSRKLINGIRDKQSGKTILDFLKSDGFANRNFMQLIHDDSLTFKEDIQKAQVSGQGDSLHEHIANLAGSPAIKKGILQTVKVVDELVKVMGRHKPENIVIEMARENQTTQKGQKNSRERMKRIEEGIKELGSQILKEHPVENTQLQNEKLYLYYLQNGRDMYVDQELDINRLSDYDVDHIVPQSFLKDDSIDNKVLTRSDKARGKSDNVPSEEVVKKMKNYWRQLLNAKLITQRKFDNLTKAERGGLSELDKAGFIKRQLVETRQITKHVAQILDSRMNTKYDENDKLIREVKVITLKSKLVSDFRKDFQFYKVREINNYHHAHDAYLNAVVGTALIKKYPKLESEFVYGDYKVYDVRKMIAKSEQEIGKATAKYFFYSNIMNFFKTEITLANGEIRKRPLIETNGETGEIVWDKGRDFATVRKVLSMPQVNIVKKTEVQTGGFSKESILPKRNSDKLIARKKDWDPKKYGGFDSPTVAYSVLVVAKVEKGKSKKLKSVKELLGITIMERSSFEKNPIDFLEAKGYKEVKKDLIIKLPKYSLFELENGRKRMLASAGELQKGNELALPSKYVNFLYLASHYEKLKGSPEDNEQKQLFVEQHKHYLDEIIEQISEFSKRVILADANLDKVLSAYNKHRDKPIREQAENIIHLFTLTNLGAPAAFKYFDTTIDRKRYTSTKEVLDATLIHQSITGLYETRIDLSQLGGDGGPAPGGGGGMNPLQLLQPLPAEIKGTKLLAHWNSGATITCIPESFLEDEQPIKKTLIKTIHGEKQQNVYYVTFKVKGRKVEAEVIASPYEYILLSPTDVPWLTQQPLQLTILVPLQEYQEKILSKTALPEDQKQQLKTLFVKYDNLWQHWENQVGHRKIRPHNIATGDYPPRPQKQYPINPKAKPSIQIVIDDLLKQGVLTPQNSTMNTPVYPVPKPDGRWRMVLDYREVNKTIPLTAAQNQHSAGILATIVRQKYKTTLDLANGFWAHPITPESYWLTAFTWQGKQYCWTRLPQGFLNSPALFNADVVDLLKEIPNVQVYVDDIYLSHDDPKEHVQQLEKVFQILLQAGYVVSLKKSEIGQKTVEFLGFNITKEGRGLTDTFKTKLLNITPPKDLKQLQSILGLLNFARNFIPNFAELVQPLYNLIAPAKGKYIEWSEENTKQLNMVIEALNTASNLEERLPEQRLVIKVNTSPSAGYVRYYNETGKKPIMYLNYVFSKAELKFSMLEKLLTTMHKALIKAMDLAMGQEILVYSPIVSMTKIQKTPLPERKALPIRWITWMTYLEDPRIQFHYDKTLPELKHIPDVYTSSQSPVKHPSQYEGVFYTDGSAIKSPDPTKSNNAGMGIVHATYKPEYQVLNQWSIPLGNHTAQMAEIAAVEFACKKALKIPGPVLVITDSFYVAESANKELPYWKSNGFVNNKKKPLKHISKWKSIAECLSMKPDITIQHEKGISLQIPVFILKGNALADKLATQGSYVVNAGKRTADGSEFEKRTADGSEFESPKKKAKVE

SEQ ID NO: 1346 - protein, 2195 aa, synthetic construct
MPAAKRVKLDGGDKKYSIGLDIGTNSVGWAVITDEYKVPSKKFKVLGNTDRHSIKKNLIGALLFDSGETAEATRLKRTARRRYTRRKNRICYLQEIFSNEMAKVDDSFFHRLEESFLVEEDKKHERHPIFGNIVDEVAYHEKYPTIYHLRKKLVDSTDKADLRLIYLALAHMIKFRGHFLIEGDLNPDNSDVDKLFIQLVQTYNQLFEENPINASGVDAKAILSARLSKSRRLENLIAQLPGEKKNGLFGNLIALSLGLTPNFKSNFDLAEDAKLQLSKDTYDDDLDNLLAQIGDQYADLFLAAKNLSDAILLSDILRVNTEITKAPLSASMIKRYDEHHQDLTLLKALVRQQLPEKYKEIFFDQSKNGYAGYIDGGASQEEFYKFIKPILEKMDGTEELLVKLNREDLLRKQRTFDNGSIPHQIHLGELHAILRRQEDFYPFLKDNREKIEKILTFRIPYYVGPLARGNSRFAWMTRKSEETITPWNFEEVVDKGASAQSFIERMTNFDKNLPNEKVLPKHSLLYEYFTVYNELTKVKYVTEGMRKPAFLSGEQKKAIVDLLFKTNRKVTVKQLKEDYFKKIECFDSVEISGVEDRFNASLGTYHDLLKIIKDKDFLDNEENEDILEDIVLTLTLFEDREMIEERLKTYAHLFDDKVMKQLKRRRYTGWGRLSRKLINGIRDKQSGKTILDFLKSDGFANRNFMQLIHDDSLTFKEDIQKAQVSGQGDSLHEHIANLAGSPAIKKGILQTVKVVDELVKVMGRHKPENIVIEMARENQTTQKGQKNSRERMKRIEEGIKELGSQILKEHPVENTQLQNEKLYLYYLQNGRDMYVDQELDINRLSDYDVDHIVPQSFLKDDSIDNKVLTRSDKARGKSDNVPSEEVVKKMKNYWRQLLNAKLITQRKFDNLTKAERGGLSELDKAGFIKRQLVETRQITKHVAQILDSRMNTKYDENDKLIREVKVITLKSKLVSDFRKDFQFYKVREINNYHHAHDAYLNAVVGTALIKKYPKLESEFVYGDYKVYDVRKMIAKSEQEIGKATAKYFFYSNIMNFFKTEITLANGEIRKRPLIETNGETGEIVWDKGRDFATVRKVLSMPQVNIVKKTEVQTGGFSKESILPKRNSDKLIARKKDWDPKKYGGFDSPTVAYSVLVVAKVEKGKSKKLKSVKELLGITIMERSSFEKNPIDFLEAKGYKEVKKDLIIKLPKYSLFELENGRKRMLASAGELQKGNELALPSKYVNFLYLASHYEKLKGSPEDNEQKQLFVEQHKHYLDEIIEQISEFSKRVILADANLDKVLSAYNKHRDKPIREQAENIIHLFTLTNLGAPAAFKYFDTTIDRKRYTSTKEVLDATLIHQSITGLYETRIDLSQLGGDGGEAAAKEAAAKEAAAKEAAAKEAAAKEAAAKGGMNPLQLLQPLPAEIKGTKLLAHWNSGATITCIPESFLEDEQPIKKTLIKTIHGEKQQNVYYVTFKVKGRKVEAEVIASPYEYILLSPTDVPWLTQQPLQLTILVPLQEYQEKILSKTALPEDQKQQLKTLFVKYDNLWQHWENQVGHRKIRPHNIATGDYPPRPQKQYPINPKAKPSIQIVIDDLLKQGVLTPQNSTMNTPVYPVPKPDGRWRMVLDYREVNKTIPLTAAQNQHSAGILATIVRQKYKTTLDLANGFWAHPITPESYWLTAFTWQGKQYCWTRLPQGFLNSPALFNADVVDLLKEIPNVQVYVDDIYLSHDDPKEHVQQLEKVFQILLQAGYVVSLKKSEIGQKTVEFLGFNITKEGRGLTDTFKTKLLNITPPKDLKQLQSILGKLNFARNFIPNFAELVQPLYNLIAPAKGKYIEWSEENTKQLNMVIEALNTASNLEERLPEQRLVIKVNTSPSAGYVRYYNETGKKPIMYLNYVFSKAELKFSMLEKLLTTMHKALIKAMDLAMGQEILVYSPIVSMTKIQKTPLPERKALPIRWITWMTYLEDPRIQFHYDKTLPELKHIPDVYTSSQSPVKHPSQYEGVFYTDGSAIKSPDPTKSNNAGMGIVHATYKPEYQVLNQWSIPLGNHTAQMAEIAAVEFACKKALKIPGPVLVITDSFYVAESANKELPYWKSNGFVNNKKKPLKHISKWKSIAECLSMKPDITIQHEKGISLQIPVFILKGNALADKLATQGSYVVNAGKRTADGSEFEKRTADGSEFESPKKKAKVE

SEQ ID NO: 1347 - protein, 2185 aa, synthetic construct
MPAAKRVKLDGGDKKYSIGLDIGTNSVGWAVITDEYKVPSKKFKVLGNTDRHSIKKNLIGALLFDSGETAEATRLKRTARRRYTRRKNRICYLQEIFSNEMAKVDDSFFHRLEESFLVEEDKKHERHPIFGNIVDEVAYHEKYPTIYHLRKKLVDSTDKADLRLIYLALAHMIKFRGHFLIEGDLNPDNSDVDKLFIQLVQTYNQLFEENPINASGVDAKAILSARLSKSRRLENLIAQLPGEKKNGLFGNLIALSLGLTPNFKSNFDLAEDAKLQLSKDTYDDDLDNLLAQIGDQYADLFLAAKNLSDAILLSDILRVNTEITKAPLSASMIKRYDEHHQDLTLLKALVRQQLPEKYKEIFFDQSKNGYAGYIDGGASQEEFYKFIKPILEKMDGTEELLVKLNREDLLRKQRTFDNGSIPHQIHLGELHAILRRQEDFYPFLKDNREKIEKILTFRIPYYVGPLARGNSRFAWMTRKSEETITPWNFEEVVDKGASAQSFIERMTNFDKNLPNEKVLPKHSLLYEYFTVYNELTKVKYVTEGMRKPAFLSGEQKKAIVDLLFKTNRKVTVKQLKEDYFKKIECFDSVEISGVEDRFNASLGTYHDLLKIIKDKDFLDNEENEDILEDIVLTLTLFEDREMIEERLKTYAHLFDDKVMKQLKRRRYTGWGRLSRKLINGIRDKQSGKTILDFLKSDGFANRNFMQLIHDDSLTFKEDIQKAQVSGQGDSLHEHIANLAGSPAIKKGILQTVKVVDELVKVMGRHKPENIVIEMARENQTTQKGQKNSRERMKRIEEGIKELGSQILKEHPVENTQLQNEKLYLYYLQNGRDMYVDQELDINRLSDYDVDHIVPQSFLKDDSIDNKVLTRSDKARGKSDNVPSEEVVKKMKNYWRQLLNAKLITQRKFDNLTKAERGGLSELDKAGFIKRQLVETRQITKHVAQILDSRMNTKYDENDKLIREVKVITLKSKLVSDFRKDFQFYKVREINNYHHAHDAYLNAVVGTALIKKYPKLESEFVYGDYKVYDVRKMIAKSEQEIGKATAKYFFYSNIMNFFKTEITLANGEIRKRPLIETNGETGEIVWDKGRDFATVRKVLSMPQVNIVKKTEVQTGGFSKESILPKRNSDKLIARKKDWDPKKYGGFDSPTVAYSVLVVAKVEKGKSKKLKSVKELLGITIMERSSFEKNPIDFLEAKGYKEVKKDLIIKLPKYSLFELENGRKRMLASAGELQKGNELALPSKYVNFLYLASHYEKLKGSPEDNEQKQLFVEQHKHYLDEIIEQISEFSKRVILADANLDKVLSAYNKHRDKPIREQAENIIHLFTLTNLGAPAAFKYFDTTIDRKRYTSTKEVLDATLIHQSITGLYETRIDLSQLGGDGGEAAAKEAAAKEAAAKEAAAKGGMNPLQLLQPLPAEIKGTKLLAHWNSGATITCIPESFLEDEQPIKKTLIKTIHGEKQQNVYYVTFKVKGRKVEAEVIASPYEYILLSPTDVPWLTQQPLQLTILVPLQEYQEKILSKTALPEDQKQQLKTLFVKYDNLWQHWENQVGHRKIRPHNIATGDYPPRPQKQYPINPKAKPSIQIVIDDLLKQGVLTPQNSTMNTPVYPVPKPDGRWRMVLDYREVNKTIPLTAAQNQHSAGILATIVRQKYKTTLDLANGFWAHPITPESYWLTAFTWQGKQYCWTRLPQGFLNSPALFNADVVDLLKEIPNVQVYVDDIYLSHDDPKEHVQQLEKVFQILLQAGYVVSLKKSEIGQKTVEFLGFNITKEGRGLTDTFKTKLLNITPPKDLKQLQSILGKLNFARNFIPNFAELVQPLYNLIAPAKGKYIEWSEENTKQLNMVIEALNTASNLEERLPEQRLVIKVNTSPSAGYVRYYNETGKKPIMYLNYVFSKAELKFSMLEKLLTTMHKALIKAMDLAMGQEILVYSPIVSMTKIQKTPLPERKALPIRWITWMTYLEDPRIQFHYDKTLPELKHIPDVYTSSQSPVKHPSQYEGVFYTDGSAIKSPDPTKSNNAGMGIVHATYKPEYQVLNQWSIPLGNHTAQMAEIAAVEFACKKALKIPGPVLVITDSFYVAESANKELPYWKSNGFVNNKKKPLKHISKWKSIAECLSMKPDITIQHEKGISLQIPVFILKGNALADKLATQGSYVVNAGKRTADGSEFEKRTADGSEFESPKKKAKVE

SEQ ID NO: 1348 - protein, 2176 aa, synthetic construct
MPAAKRVKLDGGDKKYSIGLDIGTNSVGWAVITDEYKVPSKKFKVLGNTDRHSIKKNLIGALLFDSGETAEATRLKRTARRRYTRRKNRICYLQEIFSNEMAKVDDSFFHRLEESFLVEEDKKHERHPIFGNIVDEVAYHEKYPTIYHLRKKLVDSTDKADLRLIYLALAHMIKFRGHFLIEGDLNPDNSDVDKLFIQLVQTYNQLFEENPINASGVDAKAILSARLSKSRRLENLIAQLPGEKKNGLFGNLIALSLGLTPNFKSNFDLAEDAKLQLSKDTYDDDLDNLLAQIGDQYADLFLAAKNLSDAILLSDILRVNTEITKAPLSASMIKRYDEHHQDLTLLKALVRQQLPEKYKEIFFDQSKNGYAGYIDGGASQEEFYKFIKPILEKMDGTEELLVKLNREDLLRKQRTFDNGSIPHQIHLGELHAILRRQEDFYPFLKDNREKIEKILTFRIPYYVGPLARGNSRFAWMTRKSEETITPWNFEEVVDKGASAQSFIERMTNFDKNLPNEKVLPKHSLLYEYFTVYNELTKVKYVTEGMRKPAFLSGEQKKAIVDLLFKTNRKVTVKQLKEDYFKKIECFDSVEISGVEDRFNASLGTYHDLLKIIKDKDFLDNEENEDILEDIVLTLTLFEDREMIEERLKTYAHLFDDKVMKQLKRRRYTGWGRLSRKLINGIRDKQSGKTILDFLKSDGFANRNFMQLIHDDSLTFKEDIQKAQVSGQGDSLHEHIANLAGSPAIKKGILQTVKVVDELVKVMGRHKPENIVIEMARENQTTQKGQKNSRERMKRIEEGIKELGSQILKEHPVENTQLQNEKLYLYYLQNGRDMYVDQELDINRLSDYDVDHIVPQSFLKDDSIDNKVLTRSDKARGKSDNVPSEEVVKKMKNYWRQLLNAKLITQRKFDNLTKAERGGLSELDKAGFIKRQLVETRQITKHVAQILDSRMNTKYDENDKLIREVKVITLKSKLVSDFRKDFQFYKVREINNYHHAHDAYLNAVVGTALIKKYPKLESEFVYGDYKVYDVRKMIAKSEQEIGKATAKYFFYSNIMNFFKTEITLANGEIRKRPLIETNGETGEIVWDKGRDFATVRKVLSMPQVNIVKKTEVQTGGFSKESILPKRNSDKLIARKKDWDPKKYGGFDSPTVAYSVLVVAKVEKGKSKKLKSVKELLGITIMERSSFEKNPIDFLEAKGYKEVKKDLIIKLPKYSLFELENGRKRMLASAGELQKGNELALPSKYVNFLYLASHYEKLKGSPEDNEQKQLFVEQHKHYLDEIIEQISEFSKRVILADANLDKVLSAYNKHRDKPIREQAENIIHLFTLTNLGAPAAFKYFDTTIDRKRYTSTKEVLDATLIHQSITGLYETRIDLSQLGGDGGGGSPAPEAAAKGGMNPLQLLQPLPAEIKGTKLLAHWNSGATITCIPESFLEDEQPIKKTLIKTIHGEKQQNVYYVTFKVKGRKVEAEVIASPYEYILLSPTDVPWLTQQPLQLTILVPLQEYQEKILSKTALPEDQKQQLKTLFVKYDNLWQHWENQVGHRKIRPHNIATGDYPPRPQKQYPINPKAKPSIQIVIDDLLKQGVLTPQNSTMNTPVYPVPKPDGRWRMVLDYREVNKTIPLTAAQNQHSAGILATIVRQKYKTTLDLANGFWAHPITPESYWLTAFTWQGKQYCWTRLPQGFLNSPALFNADVVDLLKEIPNVQVYVDDIYLSHDDPKEHVQQLEKVFQILLQAGYVVSLKKSEIGQKTVEFLGFNITKEGRGLTDTFKTKLLNITPPKDLKQLQSILGKLNFARNFIPNFAELVQPLYNLIAPAKGKYIEWSEENTKQLNMVIEALNTASNLEERLPEQRLVIKVNTSPSAGYVRYYNETGKKPIMYLNYVFSKAELKFSMLEKLLTTMHKALIKAMDLAMGQEILVYSPIVSMTKIQKTPLPERKALPIRWITWMTYLEDPRIQFHYDKTLPELKHIPDVYTSSQSPVKHPSQYEGVFYTDGSAIKSPDPTKSNNAGMGIVHATYKPEYQVLNQWSIPLGNHTAQMAEIAAVEFACKKALKIPGPVLVITDSFYVAESANKELPYWKSNGFVNNKKKPLKHISKWKSIAECLSMKPDITIQHEKGISLQIPVFILKGNALADKLATQGSYVVNAGKRTADGSEFEKRTADGSEFESPKKKAKVE

SEQ ID NO: 1349 - protein, 2177 aa, synthetic construct
MPAAKRVKLDGGDKKYSIGLDIGTNSVGWAVITDEYKVPSKKFKVLGNTDRHSIKKNLIGALLFDSGETAEATRLKRTARRRYTRRKNRICYLQEIFSNEMAKVDDSFFHRLEESFLVEEDKKHERHPIFGNIVDEVAYHEKYPTIYHLRKKLVDSTDKADLRLIYLALAHMIKFRGHFLIEGDLNPDNSDVDKLFIQLVQTYNQLFEENPINASGVDAKAILSARLSKSRRLENLIAQLPGEKKNGLFGNLIALSLGLTPNFKSNFDLAEDAKLQLSKDTYDDDLDNLLAQIGDQYADLFLAAKNLSDAILLSDILRVNTEITKAPLSASMIKRYDEHHQDLTLLKALVRQQLPEKYKEIFFDQSKNGYAGYIDGGASQEEFYKFIKPILEKMDGTEELLVKLNREDLLRKQRTFDNGSIPHQIHLGELHAILRRQEDFYPFLKDNREKIEKILTFRIPYYVGPLARGNSRFAWMTRKSEETITPWNFEEVVDKGASAQSFIERMTNFDKNLPNEKVLPKHSLLYEYFTVYNELTKVKYVTEGMRKPAFLSGEQKKAIVDLLFKTNRKVTVKQLKEDYFKKIECFDSVEISGVEDRFNASLGTYHDLLKIIKDKDFLDNEENEDILEDIVLTLTLFEDREMIEERLKTYAHLFDDKVMKQLKRRRYTGWGRLSRKLINGIRDKQSGKTILDFLKSDGFANRNFMQLIHDDSLTFKEDIQKAQVSGQGDSLHEHIANLAGSPAIKKGILQTVKVVDELVKVMGRHKPENIVIEMARENQTTQKGQKNSRERMKRIEEGIKELGSQILKEHPVENTQLQNEKLYLYYLQNGRDMYVDQELDINRLSDYDVDHIVPQSFLKDDSIDNKVLTRSDKARGKSDNVPSEEVVKKMKNYWRQLLNAKLITQRKFDNLTKAERGGLSELDKAGFIKRQLVETRQITKHVAQILDSRMNTKYDENDKLIREVKVITLKSKLVSDFRKDFQFYKVREINNYHHAHDAYLNAVVGTALIKKYPKLESEFVYGDYKVYDVRKMIAKSEQEIGKATAKYFFYSNIMNFFKTEITLANGEIRKRPLIETNGETGEIVWDKGRDFATVRKVLSMPQVNIVKKTEVQTGGFSKESILPKRNSDKLIARKKDWDPKKYGGFDSPTVAYSVLVVAKVEKGKSKKLKSVKELLGITIMERSSFEKNPIDFLEAKGYKEVKKDLIIKLPKYSLFELENGRKRMLASAGELQKGNELALPSKYVNFLYLASHYEKLKGSPEDNEQKQLFVEQHKHYLDEIIEQISEFSKRVILADANLDKVLSAYNKHRDKPIREQAENIIHLFTLTNLGAPAAFKYFDTTIDRKRYTSTKEVLDATLIHQSITGLYETRIDLSQLGGDGGGSAGSAAGSGEFGGMNPLQLLQPLPAEIKGTKLLAHWNSGATITCIPESFLEDEQPIKKTLIKTIHGEKQQNVYYVTFKVKGRKVEAEVIASPYEYILLSPTDVPWLTQQPLQLTILVPLQEYQEKILSKTALPEDQKQQLKTLFVKYDNLWQHWENQVGHRKIRPHNIATGDYPPRPQKQYPINPKAKPSIQIVIDDLLKQGVLTPQNSTMNTPVYPVPKPDGRWRMVLDYREVNKTIPLTAAQNQHSAGILATIVRQKYKTTLDLANGFWAHPITPESYWLTAFTWQGKQYCWTRLPQGFLNSPALFNADVVDLLKEIPNVQVYVDDIYLSHDDPKEHVQQLEKVFQILLQAGYVVSLKKSEIGQKTVEFLGFNITKEGRGLTDTFKTKLLNITPPKDLKQLQSILGKLNFARNFIPNFAELVQPLYNLIAPAKGKYIEWSEENTKQLNMVIEALNTASNLEERLPEQRLVIKVNTSPSAGYVRYYNETGKKPIMYLNYVFSKAELKFSMLEKLLTTMHKALIKAMDLAMGQEILVYSPIVSMTKIQKTPLPERKALPIRWITWMTYLEDPRIQFHYDKTLPELKHIPDVYTSSQSPVKHPSQYEGVFYTDGSAIKSPDPTKSNNAGMGIVHATYKPEYQVLNQWSIPLGNHTAQMAEIAAVEFACKKALKIPGPVLVITDSFYVAESANKELPYWKSNGFVNNKKKPLKHISKWKSIAECLSMKPDITIQHEKGISLQIPVFILKGNALADKLATQGSYVVNAGKRTADGSEFEKRTADGSEFESPKKKAKVE

SEQ ID NO: 1350 - protein, 2173 aa, synthetic construct
MPAAKRVKLDGGDKKYSIGLDIGTNSVGWAVITDEYKVPSKKFKVLGNTDRHSIKKNLIGALLFDSGETAEATRLKRTARRRYTRRKNRICYLQEIFSNEMAKVDDSFFHRLEESFLVEEDKKHERHPIFGNIVDEVAYHEKYPTIYHLRKKLVDSTDKADLRLIYLALAHMIKFRGHFLIEGDLNPDNSDVDKLFIQLVQTYNQLFEENPINASGVDAKAILSARLSKSRRLENLIAQLPGEKKNGLFGNLIALSLGLTPNFKSNFDLAEDAKLQLSKDTYDDDLDNLLAQIGDQYADLFLAAKNLSDAILLSDILRVNTEITKAPLSASMIKRYDEHHQDLTLLKALVRQQLPEKYKEIFFDQSKNGYAGYIDGGASQEEFYKFIKPILEKMDGTEELLVKLNREDLLRKQRTFDNGSIPHQIHLGELHAILRRQEDFYPFLKDNREKIEKILTFRIPYYVGPLARGNSRFAWMTRKSEETITPWNFEEVVDKGASAQSFIERMTNFDKNLPNEKVLPKHSLLYEYFTVYNELTKVKYVTEGMRKPAFLSGEQKKAIVDLLFKTNRKVTVKQLKEDYFKKIECFDSVEISGVEDRFNASLGTYHDLLKIIKDKDFLDNEENEDILEDIVLTLTLFEDREMIEERLKTYAHLFDDKVMKQLKRRRYTGWGRLSRKLINGIRDKQSGKTILDFLKSDGFANRNFMQLIHDDSLTFKEDIQKAQVSGQGDSLHEHIANLAGSPAIKKGILQTVKVVDELVKVMGRHKPENIVIEMARENQTTQKGQKNSRERMKRIEEGIKELGSQILKEHPVENTQLQNEKLYLYYLQNGRDMYVDQELDINRLSDYDVDHIVPQSFLKDDSIDNKVLTRSDKARGKSDNVPSEEVVKKMKNYWRQLLNAKLITQRKFDNLTKAERGGLSELDKAGFIKRQLVETRQITKHVAQILDSRMNTKYDENDKLIREVKVITLKSKLVSDFRKDFQFYKVREINNYHHAHDAYLNAVVGTALIKKYPKLESEFVYGDYKVYDVRKMIAKSEQEIGKATAKYFFYSNIMNFFKTEITLANGEIRKRPLIETNGETGEIVWDKGRDFATVRKVLSMPQVNIVKKTEVQTGGFSKESILPKRNSDKLIARKKDWDPKKYGGFDSPTVAYSVLVVAKVEKGKSKKLKSVKELLGITIMERSSFEKNPIDFLEAKGYKEVKKDLIIKLPKYSLFELENGRKRMLASAGELQKGNELALPSKYVNFLYLASHYEKLKGSPEDNEQKQLFVEQHKHYLDEIIEQISEFSKRVILADANLDKVLSAYNKHRDKPIREQAENIIHLFTLTNLGAPAAFKYFDTTIDRKRYTSTKEVLDATLIHQSITGLYETRIDLSQLGGDGGGGGEAAAKGGMNPLQLLQPLPAEIKGTKLLAHWNSGATITCIPESFLEDEQPIKKTLIKTIHGEKQQNVYYVTFKVKGRKVEAEVIASPYEYILLSPTDVPWLTQQPLQLTILVPLQEYQEKILSKTALPEDQKQQLKTLFVKYDNLWQHWENQVGHRKIRPHNIATGDYPPRPQKQYPINPKAKPSIQIVIDDLLKQGVLTPQNSTMNTPVYPVPKPDGRWRMVLDYREVNKTIPLTAAQNQHSAGILATIVRQKYKTTLDLANGFWAHPITPESYWLTAFTWQGKQYCWTRLPQGFLNSPALFNADVVDLLKEIPNVQVYVDDIYLSHDDPKEHVQQLEKVFQILLQAGYVVSLKKSEIGQKTVEFLGFNITKEGRGLTDTFKTKLLNITPPKDLKQLQSILGKLNFARNFIPNFAELVQPLYNLIAPAKGKYIEWSEENTKQLNMVIEALNTASNLEERLPEQRLVIKVNTSPSAGYVRYYNETGKKPIMYLNYVFSKAELKFSMLEKLLTTMHKALIKAMDLAMGQEILVYSPIVSMTKIQKTPLPERKALPIRWITWMTYLEDPRIQFHYDKTLPELKHIPDVYTSSQSPVKHPSQYEGVFYTDGSAIKSPDPTKSNNAGMGIVHATYKPEYQVLNQWSIPLGNHTAQMAEIAAVEFACKKALKIPGPVLVITDSFYVAESANKELPYWKSNGFVNNKKKPLKHISKWKSIAECLSMKPDITIQHEKGISLQIPVFILKGNALADKLATQGSYVVNAGKRTADGSEFEKRTADGSEFESPKKKAKVE

SEQ ID NO: 1351 - protein, 2176 aa, synthetic construct
MPAAKRVKLDGGDKKYSIGLDIGTNSVGWAVITDEYKVPSKKFKVLGNTDRHSIKKNLIGALLFDSGETAEATRLKRTARRRYTRRKNRICYLQEIFSNEMAKVDDSFFHRLEESFLVEEDKKHERHPIFGNIVDEVAYHEKYPTIYHLRKKLVDSTDKADLRLIYLALAHMIKFRGHFLIEGDLNPDNSDVDKLFIQLVQTYNQLFEENPINASGVDAKAILSARLSKSRRLENLIAQLPGEKKNGLFGNLIALSLGLTPNFKSNFDLAEDAKLQLSKDTYDDDLDNLLAQIGDQYADLFLAAKNLSDAILLSDILRVNTEITKAPLSASMIKRYDEHHQDLTLLKALVRQQLPEKYKEIFFDQSKNGYAGYIDGGASQEEFYKFIKPILEKMDGTEELLVKLNREDLLRKQRTFDNGSIPHQIHLGELHAILRRQEDFYPFLKDNREKIEKILTFRIPYYVGPLARGNSRFAWMTRKSEETITPWNFEEVVDKGASAQSFIERMTNFDKNLPNEKVLPKHSLLYEYFTVYNELTKVKYVTEGMRKPAFLSGEQKKAIVDLLFKTNRKVTVKQLKEDYFKKIECFDSVEISGVEDRFNASLGTYHDLLKIIKDKDFLDNEENEDILEDIVLTLTLFEDREMIEERLKTYAHLFDDKVMKQLKRRRYTGWGRLSRKLINGIRDKQSGKTILDFLKSDGFANRNFMQLIHDDSLTFKEDIQKAQVSGQGDSLHEHIANLAGSPAIKKGILQTVKVVDELVKVMGRHKPENIVIEMARENQTTQKGQKNSRERMKRIEEGIKELGSQILKEHPVENTQLQNEKLYLYYLQNGRDMYVDQELDINRLSDYDVDHIVPQSFLKDDSIDNKVLTRSDKARGKSDNVPSEEVVKKMKNYWRQLLNAKLITQRKFDNLTKAERGGLSELDKAGFIKRQLVETRQITKHVAQILDSRMNTKYDENDKLIREVKVITLKSKLVSDFRKDFQFYKVREINNYHHAHDAYLNAVVGTALIKKYPKLESEFVYGDYKVYDVRKMIAKSEQEIGKATAKYFFYSNIMNFFKTEITLANGEIRKRPLIETNGETGEIVWDKGRDFATVRKVLSMPQVNIVKKTEVQTGGFSKESILPKRNSDKLIARKKDWDPKKYGGFDSPTVAYSVLVVAKVEKGKSKKLKSVKELLGITIMERSSFEKNPIDFLEAKGYKEVKKDLIIKLPKYSLFELENGRKRMLASAGELQKGNELALPSKYVNFLYLASHYEKLKGSPEDNEQKQLFVEQHKHYLDEIIEQISEFSKRVILADANLDKVLSAYNKHRDKPIREQAENIIHLFTLTNLGAPAAFKYFDTTIDRKRYTSTKEVLDATLIHQSITGLYETRIDLSQLGGDGGGSSGGSEAAAKGGMNPLQLLQPLPAEIKGTKLLAHWNSGATITCIPESFLEDEQPIKKTLIKTIHGEKQQNVYYVTFKVKGRKVEAEVIASPYEYILLSPTDVPWLTQQPLQLTILVPLQEYQEKILSKTALPEDQKQQLKTLFVKYDNLWQHWENQVGHRKIRPHNIATGDYPPRPQKQYPINPKAKPSIQIVIDDLLKQGVLTPQNSTMNTPVYPVPKPDGRWRMVLDYREVNKTIPLTAAQNQHSAGILATIVRQKYKTTLDLANGFWAHPITPESYWLTAFTWQGKQYCWTRLPQGFLNSPALFNADVVDLLKEIPNVQVYVDDIYLSHDDPKEHVQQLEKVFQILLQAGYVVSLKKSEIGQKTVEFLGFNITKEGRGLTDTFKTKLLNITPPKDLKQLQSILGKLNFARNFIPNFAELVQPLYNLIAPAKGKYIEWSEENTKQLNMVIEALNTASNLEERLPEQRLVIKVNTSPSAGYVRYYNETGKKPIMYLNYVFSKAELKFSMLEKLLTTMHKALIKAMDLAMGQEILVYSPIVSMTKIQKTPLPERKALPIRWITWMTYLEDPRIQFHYDKTLPELKHIPDVYTSSQSPVKHPSQYEGVFYTDGSAIKSPDPTKSNNAGMGIVHATYKPEYQVLNQWSIPLGNHTAQMAEIAAVEFACKKALKIPGPVLVITDSFYVAESANKELPYWKSNGFVNNKKKPLKHISKWKSIAECLSMKPDITIQHEKGISLQIPVFILKGNALADKLATQGSYVVNAGKRTADGSEFEKRTADGSEFESPKKKAKVE

SEQ ID NO: 1352 - protein, 2174 aa, synthetic construct
MPAAKRVKLDGGDKKYSIGLDIGTNSVGWAVITDEYKVPSKKFKVLGNTDRHSIKKNLIGALLFDSGETAEATRLKRTARRRYTRRKNRICYLQEIFSNEMAKVDDSFFHRLEESFLVEEDKKHERHPIFGNIVDEVAYHEKYPTIYHLRKKLVDSTDKADLRLIYLALAHMIKFRGHFLIEGDLNPDNSDVDKLFIQLVQTYNQLFEENPINASGVDAKAILSARLSKSRRLENLIAQLPGEKKNGLFGNLIALSLGLTPNFKSNFDLAEDAKLQLSKDTYDDDLDNLLAQIGDQYADLFLAAKNLSDAILLSDILRVNTEITKAPLSASMIKRYDEHHQDLTLLKALVRQQLPEKYKEIFFDQSKNGYAGYIDGGASQEEFYKFIKPILEKMDGTEELLVKLNREDLLRKQRTFDNGSIPHQIHLGELHAILRRQEDFYPFLKDNREKIEKILTFRIPYYVGPLARGNSRFAWMTRKSEETITPWNFEEVVDKGASAQSFIERMTNFDKNLPNEKVLPKHSLLYEYFTVYNELTKVKYVTEGMRKPAFLSGEQKKAIVDLLFKTNRKVTVKQLKEDYFKKIECFDSVEISGVEDRFNASLGTYHDLLKIIKDKDFLDNEENEDILEDIVLTLTLFEDREMIEERLKTYAHLFDDKVMKQLKRRRYTGWGRLSRKLINGIRDKQSGKTILDFLKSDGFANRNFMQLIHDDSLTFKEDIQKAQVSGQGDSLHEHIANLAGSPAIKKGILQTVKVVDELVKVMGRHKPENIVIEMARENQTTQKGQKNSRERMKRIEEGIKELGSQILKEHPVENTQLQNEKLYLYYLQNGRDMYVDQELDINRLSDYDVDHIVPQSFLKDDSIDNKVLTRSDKARGKSDNVPSEEVVKKMKNYWRQLLNAKLITQRKFDNLTKAERGGLSELDKAGFIKRQLVETRQITKHVAQILDSRMNTKYDENDKLIREVKVITLKSKLVSDFRKDFQFYKVREINNYHHAHDAYLNAVVGTALIKKYPKLESEFVYGDYKVYDVRKMIAKSEQEIGKATAKYFFYSNIMNFFKTEITLANGEIRKRPLIETNGETGEIVWDKGRDFATVRKVLSMPQVNIVKKTEVQTGGFSKESILPKRNSDKLIARKKDWDPKKYGGFDSPTVAYSVLVVAKVEKGKSKKLKSVKELLGITIMERSSFEKNPIDFLEAKGYKEVKKDLIIKLPKYSLFELENGRKRMLASAGELQKGNELALPSKYVNFLYLASHYEKLKGSPEDNEQKQLFVEQHKHYLDEIIEQISEFSKRVILADANLDKVLSAYNKHRDKPIREQAENIIHLFTLTNLGAPAAFKYFDTTIDRKRYTSTKEVLDATLIHQSITGLYETRIDLSQLGGDGGGSSPAPGGSGGMNPLQLLQPLPAEIKGTKLLAHWNSGATITCIPESFLEDEQPIKKTLIKTIHGEKQQNVYYVTFKVKGRKVEAEVIASPYEYILLSPTDVPWLTQQPLQLTILVPLQEYQEKILSKTALPEDQKQQLKTLFVKYDNLWQHWENQVGHRKIRPHNIATGDYPPRPQKQYPINPKAKPSIQIVIDDLLKQGVLTPQNSTMNTPVYPVPKPDGRWRMVLDYREVNKTIPLTAAQNQHSAGILATIVRQKYKTTLDLANGFWAHPITPESYWLTAFTWQGKQYCWTRLPQGFLNSPALFNADVVDLLKEIPNVQVYVDDIYLSHDDPKEHVQQLEKVFQILLQAGYVVSLKKSEIGQKTVEFLGFNITKEGRGLTDTFKTKLLNITPPKDLKQLQSILGKLNFARNFIPNFAELVQPLYNLIAPAKGKYIEWSEENTKQLNMVIEALNTASNLEERLPEQRLVIKVNTSPSAGYVRYYNETGKKPIMYLNYVFSKAELKFSMLEKLLTTMHKALIKAMDLAMGQEILVYSPIVSMTKIQKTPLPERKALPIRWITWMTYLEDPRIQFHYDKTLPELKHIPDVYTSSQSPVKHPSQYEGVFYTDGSAIKSPDPTKSNNAGMGIVHATYKPEYQVLNQWSIPLGNHTAQMAEIAAVEFACKKALKIPGPVLVITDSFYVAESANKELPYWKSNGFVNNKKKPLKHISKWKSIAECLSMKPDITIQHEKGISLQIPVFILKGNALADKLATQGSYVVNAGKRTADGSEFEKRTADGSEFESPKKKAKVE

SEQ ID NO: 1353 - protein, 2176 aa, synthetic construct
MPAAKRVKLDGGDKKYSIGLDIGTNSVGWAVITDEYKVPSKKFKVLGNTDRHSIKKNLIGALLFDSGETAEATRLKRTARRRYTRRKNRICYLQEIFSNEMAKVDDSFFHRLEESFLVEEDKKHERHPIFGNIVDEVAYHEKYPTIYHLRKKLVDSTDKADLRLIYLALAHMIKFRGHFLIEGDLNPDNSDVDKLFIQLVQTYNQLFEENPINASGVDAKAILSARLSKSRRLENLIAQLPGEKKNGLFGNLIALSLGLTPNFKSNFDLAEDAKLQLSKDTYDDDLDNLLAQIGDQYADLFLAAKNLSDAILLSDILRVNTEITKAPLSASMIKRYDEHHQDLTLLKALVRQQLPEKYKEIFFDQSKNGYAGYIDGGASQEEFYKFIKPILEKMDGTEELLVKLNREDLLRKQRTFDNGSIPHQIHLGELHAILRRQEDFYPFLKDNREKIEKILTFRIPYYVGPLARGNSRFAWMTRKSEETITPWNFEEVVDKGASAQSFIERMTNFDKNLPNEKVLPKHSLLYEYFTVYNELTKVKYVTEGMRKPAFLSGEQKKAIVDLLFKTNRKVTVKQLKEDYFKKIECFDSVEISGVEDRFNASLGTYHDLLKIIKDKDFLDNEENEDILEDIVLTLTLFEDREMIEERLKTYAHLFDDKVMKQLKRRRYTGWGRLSRKLINGIRDKQSGKTILDFLKSDGFANRNFMQLIHDDSLTFKEDIQKAQVSGQGDSLHEHIANLAGSPAIKKGILQTVKVVDELVKVMGRHKPENIVIEMARENQTTQKGQKNSRERMKRIEEGIKELGSQILKEHPVENTQLQNEKLYLYYLQNGRDMYVDQELDINRLSDYDVDHIVPQSFLKDDSIDNKVLTRSDKARGKSDNVPSEEVVKKMKNYWRQLLNAKLITQRKFDNLTKAERGGLSELDKAGFIKRQLVETRQITKHVAQILDSRMNTKYDENDKLIREVKVITLKSKLVSDFRKDFQFYKVREINNYHHAHDAYLNAVVGTALIKKYPKLESEFVYGDYKVYDVRKMIAKSEQEIGKATAKYFFYSNIMNFFKTEITLANGEIRKRPLIETNGETGEIVWDKGRDFATVRKVLSMPQVNIVKKTEVQTGGFSKESILPKRNSDKLIARKKDWDPKKYGGFDSPTVAYSVLVVAKVEKGKSKKLKSVKELLGITIMERSSFEKNPIDFLEAKGYKEVKKDLIIKLPKYSLFELENGRKRMLASAGELQKGNELALPSKYVNFLYLASHYEKLKGSPEDNEQKQLFVEQHKHYLDEIIEQISEFSKRVILADANLDKVLSAYNKHRDKPIREQAENIIHLFTLTNLGAPAAFKYFDTTIDRKRYTSTKEVLDATLIHQSITGLYETRIDLSQLGGDGGGSSPAPEAAAKGGMNPLQLLQPLPAEIKGTKLLAHWNSGATITCIPESFLEDEQPIKKTLIKTIHGEKQQNVYYVTFKVKGRKVEAEVIASPYEYILLSPTDVPWLTQQPLQLTILVPLQEYQEKILSKTALPEDQKQQLKTLFVKYDNLWQHWENQVGHRKIRPHNIATGDYPPRPQKQYPINPKAKPSIQIVIDDLLKQGVLTPQNSTMNTPVYPVPKPDGRWRMVLDYREVNKTIPLTAAQNQHSAGILATIVRQKYKTTLDLANGFWAHPITPESYWLTAFTWQGKQYCWTRLPQGFLNSPALFNADVVDLLKEIPNVQVYVDDIYLSHDDPKEHVQQLEKVFQILLQAGYVVSLKKSEIGQKTVEFLGFNITKEGRGLTDTFKTKLLNITPPKDLKQLQSILGKLNFARNFIPNFAELVQPLYNLIAPAKGKYIEWSEENTKQLNMVIEALNTASNLEERLPEQRLVIKVNTSPSAGYVRYYNETGKKPIMYLNYVFSKAELKFSMLEKLLTTMHKALIKAMDLAMGQEILVYSPIVSMTKIQKTPLPERKALPIRWITWMTYLEDPRIQFHYDKTLPELKHIPDVYTSSQSPVKHPSQYEGVFYTDGSAIKSPDPTKSNNAGMGIVHATYKPEYQVLNQWSIPLGNHTAQMAEIAAVEFACKKALKIPGPVLVITDSFYVAESANKELPYWKSNGFVNNKKKPLKHISKWKSIAECLSMKPDITIQHEKGISLQIPVFILKGNALADKLATQGSYVVNAGKRTADGSEFEKRTADGSEFESPKKKAKVE

SEQ ID NO: 1354 - protein, 2174 aa, synthetic construct
MPAAKRVKLDGGDKKYSIGLDIGTNSVGWAVITDEYKVPSKKFKVLGNTDRHSIKKNLIGALLFDSGETAEATRLKRTARRRYTRRKNRICYLQEIFSNEMAKVDDSFFHRLEESFLVEEDKKHERHPIFGNIVDEVAYHEKYPTIYHLRKKLVDSTDKADLRLIYLALAHMIKFRGHFLIEGDLNPDNSDVDKLFIQLVQTYNQLFEENPINASGVDAKAILSARLSKSRRLENLIAQLPGEKKNGLFGNLIALSLGLTPNFKSNFDLAEDAKLQLSKDTYDDDLDNLLAQIGDQYADLFLAAKNLSDAILLSDILRVNTEITKAPLSASMIKRYDEHHQDLTLLKALVRQQLPEKYKEIFFDQSKNGYAGYIDGGASQEEFYKFIKPILEKMDGTEELLVKLNREDLLRKQRTFDNGSIPHQIHLGELHAILRRQEDFYPFLKDNREKIEKILTFRIPYYVGPLARGNSRFAWMTRKSEETITPWNFEEVVDKGASAQSFIERMTNFDKNLPNEKVLPKHSLLYEYFTVYNELTKVKYVTEGMRKPAFLSGEQKKAIVDLLFKTNRKVTVKQLKEDYFKKIECFDSVEISGVEDRFNASLGTYHDLLKIIKDKDFLDNEENEDILEDIVLTLTLFEDREMIEERLKTYAHLFDDKVMKQLKRRRYTGWGRLSRKLINGIRDKQSGKTILDFLKSDGFANRNFMQLIHDDSLTFKEDIQKAQVSGQGDSLHEHIANLAGSPAIKKGILQTVKVVDELVKVMGRHKPENIVIEMARENQTTQKGQKNSRERMKRIEEGIKELGSQILKEHPVENTQLQNEKLYLYYLQNGRDMYVDQELDINRLSDYDVDHIVPQSFLKDDSIDNKVLTRSDKARGKSDNVPSEEVVKKMKNYWRQLLNAKLITQRKFDNLTKAERGGLSELDKAGFIKRQLVETRQITKHVAQILDSRMNTKYDENDKLIREVKVITLKSKLVSDFRKDFQFYKVREINNYHHAHDAYLNAVVGTALIKKYPKLESEFVYGDYKVYDVRKMIAKSEQEIGKATAKYFFYSNIMNFFKTEITLANGEIRKRPLIETNGETGEIVWDKGRDFATVRKVLSMPQVNIVKKTEVQTGGFSKESILPKRNSDKLIARKKDWDPKKYGGFDSPTVAYSVLVVAKVEKGKSKKLKSVKELLGITIMERSSFEKNPIDFLEAKGYKEVKKDLIIKLPKYSLFELENGRKRMLASAGELQKGNELALPSKYVNFLYLASHYEKLKGSPEDNEQKQLFVEQHKHYLDEIIEQISEFSKRVILADANLDKVLSAYNKHRDKPIREQAENIIHLFTLTNLGAPAAFKYFDTTIDRKRYTSTKEVLDATLIHQSITGLYETRIDLSQLGGDGGGGSGGGPAPGGMNPLQLLQPLPAEIKGTKLLAHWNSGATITCIPESFLEDEQPIKKTLIKTIHGEKQQNVYYVTFKVKGRKVEAEVIASPYEYILLSPTDVPWLTQQPLQLTILVPLQEYQEKILSKTALPEDQKQQLKTLFVKYDNLWQHWENQVGHRKIRPHNIATGDYPPRPQKQYPINPKAKPSIQIVIDDLLKQGVLTPQNSTMNTPVYPVPKPDGRWRMVLDYREVNKTIPLTAAQNQHSAGILATIVRQKYKTTLDLANGFWAHPITPESYWLTAFTWQGKQYCWTRLPQGFLNSPALFNADVVDLLKEIPNVQVYVDDIYLSHDDPKEHVQQLEKVFQILLQAGYVVSLKKSEIGQKTVEFLGFNITKEGRGLTDTFKTKLLNITPPKDLKQLQSILGKLNFARNFIPNFAELVQPLYNLIAPAKGKYIEWSEENTKQLNMVIEALNTASNLEERLPEQRLVIKVNTSPSAGYVRYYNETGKKPIMYLNYVFSKAELKFSMLEKLLTTMHKALIKAMDLAMGQEILVYSPIVSMTKIQKTPLPERKALPIRWITWMTYLEDPRIQFHYDKTLPELKHIPDVYTSSQSPVKHPSQYEGVFYTDGSAIKSPDPTKSNNAGMGIVHATYKPEYQVLNQWSIPLGNHTAQMAEIAAVEFACKKALKIPGPVLVITDSFYVAESANKELPYWKSNGFVNNKKKPLKHISKWKSIAECLSMKPDITIQHEKGISLQIPVFILKGNALADKLATQGSYVVNAGKRTADGSEFEKRTADGSEFESPKKKAKVE

SEQ ID NO: 1355 - protein, 2176 aa, synthetic construct
MPAAKRVKLDGGDKKYSIGLDIGTNSVGWAVITDEYKVPSKKFKVLGNTDRHSIKKNLIGALLFDSGETAEATRLKRTARRRYTRRKNRICYLQEIFSNEMAKVDDSFFHRLEESFLVEEDKKHERHPIFGNIVDEVAYHEKYPTIYHLRKKLVDSTDKADLRLIYLALAHMIKFRGHFLIEGDLNPDNSDVDKLFIQLVQTYNQLFEENPINASGVDAKAILSARLSKSRRLENLIAQLPGEKKNGLFGNLIALSLGLTPNFKSNFDLAEDAKLQLSKDTYDDDLDNLLAQIGDQYADLFLAAKNLSDAILLSDILRVNTEITKAPLSASMIKRYDEHHQDLTLLKALVRQQLPEKYKEIFFDQSKNGYAGYIDGGASQEEFYKFIKPILEKMDGTEELLVKLNREDLLRKQRTFDNGSIPHQIHLGELHAILRRQEDFYPFLKDNREKIEKILTFRIPYYVGPLARGNSRFAWMTRKSEETITPWNFEEVVDKGASAQSFIERMTNFDKNLPNEKVLPKHSLLYEYFTVYNELTKVKYVTEGMRKPAFLSGEQKKAIVDLLFKTNRKVTVKQLKEDYFKKIECFDSVEISGVEDRFNASLGTYHDLLKIIKDKDFLDNEENEDILEDIVLTLTLFEDREMIEERLKTYAHLFDDKVMKQLKRRRYTGWGRLSRKLINGIRDKQSGKTILDFLKSDGFANRNFMQLIHDDSLTFKEDIQKAQVSGQGDSLHEHIANLAGSPAIKKGILQTVKVVDELVKVMGRHKPENIVIEMARENQTTQKGQKNSRERMKRIEEGIKELGSQILKEHPVENTQLQNEKLYLYYLQNGRDMYVDQELDINRLSDYDVDHIVPQSFLKDDSIDNKVLTRSDKARGKSDNVPSEEVVKKMKNYWRQLLNAKLITQRKFDNLTKAERGGLSELDKAGFIKRQLVETRQITKHVAQILDSRMNTKYDENDKLIREVKVITLKSKLVSDFRKDFQFYKVREINNYHHAHDAYLNAVVGTALIKKYPKLESEFVYGDYKVYDVRKMIAKSEQEIGKATAKYFFYSNIMNFFKTEITLANGEIRKRPLIETNGETGEIVWDKGRDFATVRKVLSMPQVNIVKKTEVQTGGFSKESILPKRNSDKLIARKKDWDPKKYGGFDSPTVAYSVLVVAKVEKGKSKKLKSVKELLGITIMERSSFEKNPIDFLEAKGYKEVKKDLIIKLPKYSLFELENGRKRMLASAGELQKGNELALPSKYVNFLYLASHYEKLKGSPEDNEQKQLFVEQHKHYLDEIIEQISEFSKRVILADANLDKVLSAYNKHRDKPIREQAENIIHLFTLTNLGAPAAFKYFDTTIDRKRYTSTKEVLDATLIHQSITGLYETRIDLSQLGGDGGEAAAKGSSGGSGGMNPLQLLQPLPAEIKGTKLLAHWNSGATITCIPESFLEDEQPIKKTLIKTIHGEKQQNVYYVTFKVKGRKVEAEVIASPYEYILLSPTDVPWLTQQPLQLTILVPLQEYQEKILSKTALPEDQKQQLKTLFVKYDNLWQHWENQVGHRKIRPHNIATGDYPPRPQKQYPINPKAKPSIQIVIDDLLKQGVLTPQNSTMNTPVYPVPKPDGRWRMVLDYREVNKTIPLTAAQNQHSAGILATIVRQKYKTTLDLANGFWAHPITPESYWLTAFTWQGKQYCWTRLPQGFLNSPALFNADVVDLLKEIPNVQVYVDDIYLSHDDPKEHVQQLEKVFQILLQAGYVVSLKKSEIGQKTVEFLGFNITKEGRGLTDTFKTKLLNITPPKDLKQLQSILGKLNFARNFIPNFAELVQPLYNLIAPAKGKYIEWSEENTKQLNMVIEALNTASNLEERLPEQRLVIKVNTSPSAGYVRYYNETGKKPIMYLNYVFSKAELKFSMLEKLLTTMHKALIKAMDLAMGQEILVYSPIVSMTKIQKTPLPERKALPIRWITWMTYLEDPRIQFHYDKTLPELKHIPDVYTSSQSPVKHPSQYEGVFYTDGSAIKSPDPTKSNNAGMGIVHATYKPEYQVLNQWSIPLGNHTAQMAEIAAVEFACKKALKIPGPVLVITDSFYVAESANKELPYWKSNGFVNNKKKPLKHISKWKSIAECLSMKPDITIQHEKGISLQIPVFILKGNALADKLATQGSYVVNAGKRTADGSEFEKRTADGSEFESPKKKAKVE

SEQ ID NO: 1356 - protein, 2172 aa, synthetic construct
MPAAKRVKLDGGDKKYSIGLDIGTNSVGWAVITDEYKVPSKKFKVLGNTDRHSIKKNLIGALLFDSGETAEATRLKRTARRRYTRRKNRICYLQEIFSNEMAKVDDSFFHRLEESFLVEEDKKHERHPIFGNIVDEVAYHEKYPTIYHLRKKLVDSTDKADLRLIYLALAHMIKFRGHFLIEGDLNPDNSDVDKLFIQLVQTYNQLFEENPINASGVDAKAILSARLSKSRRLENLIAQLPGEKKNGLFGNLIALSLGLTPNFKSNFDLAEDAKLQLSKDTYDDDLDNLLAQIGDQYADLFLAAKNLSDAILLSDILRVNTEITKAPLSASMIKRYDEHHQDLTLLKALVRQQLPEKYKEIFFDQSKNGYAGYIDGGASQEEFYKFIKPILEKMDGTEELLVKLNREDLLRKQRTFDNGSIPHQIHLGELHAILRRQEDFYPFLKDNREKIEKILTFRIPYYVGPLARGNSRFAWMTRKSEETITPWNFEEVVDKGASAQSFIERMTNFDKNLPNEKVLPKHSLLYEYFTVYNELTKVKYVTEGMRKPAFLSGEQKKAIVDLLFKTNRKVTVKQLKEDYFKKIECFDSVEISGVEDRFNASLGTYHDLLKIIKDKDFLDNEENEDILEDIVLTLTLFEDREMIEERLKTYAHLFDDKVMKQLKRRRYTGWGRLSRKLINGIRDKQSGKTILDFLKSDGFANRNFMQLIHDDSLTFKEDIQKAQVSGQGDSLHEHIANLAGSPAIKKGILQTVKVVDELVKVMGRHKPENIVIEMARENQTTQKGQKNSRERMKRIEEGIKELGSQILKEHPVENTQLQNEKLYLYYLQNGRDMYVDQELDINRLSDYDVDHIVPQSFLKDDSIDNKVLTRSDKARGKSDNVPSEEVVKKMKNYWRQLLNAKLITQRKFDNLTKAERGGLSELDKAGFIKRQLVETRQITKHVAQILDSRMNTKYDENDKLIREVKVITLKSKLVSDFRKDFQFYKVREINNYHHAHDAYLNAVVGTALIKKYPKLESEFVYGDYKVYDVRKMIAKSEQEIGKATAKYFFYSNIMNFFKTEITLANGEIRKRPLIETNGETGEIVWDKGRDFATVRKVLSMPQVNIVKKTEVQTGGFSKESILPKRNSDKLIARKKDWDPKKYGGFDSPTVAYSVLVVAKVEKGKSKKLKSVKELLGITIMERSSFEKNPIDFLEAKGYKEVKKDLIIKLPKYSLFELENGRKRMLASAGELQKGNELALPSKYVNFLYLASHYEKLKGSPEDNEQKQLFVEQHKHYLDEIIEQISEFSKRVILADANLDKVLSAYNKHRDKPIREQAENIIHLFTLTNLGAPAAFKYFDTTIDRKRYTSTKEVLDATLIHQSITGLYETRIDLSQLGGDGGGGGGGGGGGMNPLQLLQPLPAEIKGTKLLAHWNSGATITCIPESFLEDEQPIKKTLIKTIHGEKQQNVYYVTFKVKGRKVEAEVIASPYEYILLSPTDVPWLTQQPLQLTILVPLQEYQEKILSKTALPEDQKQQLKTLFVKYDNLWQHWENQVGHRKIRPHNIATGDYPPRPQKQYPINPKAKPSIQIVIDDLLKQGVLTPQNSTMNTPVYPVPKPDGRWRMVLDYREVNKTIPLTAAQNQHSAGILATIVRQKYKTTLDLANGFWAHPITPESYWLTAFTWQGKQYCWTRLPQGFLNSPALFNADVVDLLKEIPNVQVYVDDIYLSHDDPKEHVQQLEKVFQILLQAGYVVSLKKSEIGQKTVEFLGFNITKEGRGLTDTFKTKLLNITPPKDLKQLQSILGKLNFARNFIPNFAELVQPLYNLIAPAKGKYIEWSEENTKQLNMVIEALNTASNLEERLPEQRLVIKVNTSPSAGYVRYYNETGKKPIMYLNYVFSKAELKFSMLEKLLTTMHKALIKAMDLAMGQEILVYSPIVSMTKIQKTPLPERKALPIRWITWMTYLEDPRIQFHYDKTLPELKHIPDVYTSSQSPVKHPSQYEGVFYTDGSAIKSPDPTKSNNAGMGIVHATYKPEYQVLNQWSIPLGNHTAQMAEIAAVEFACKKALKIPGPVLVITDSFYVAESANKELPYWKSNGFVNNKKKPLKHISKWKSIAECLSMKPDITIQHEKGISLQIPVFILKGNALADKLATQGSYVVNAGKRTADGSEFEKRTADGSEFESPKKKAKVE

SEQ ID NO: 1357 - protein, 2176 aa, synthetic construct
MPAAKRVKLDGGDKKYSIGLDIGTNSVGWAVITDEYKVPSKKFKVLGNTDRHSIKKNLIGALLFDSGETAEATRLKRTARRRYTRRKNRICYLQEIFSNEMAKVDDSFFHRLEESFLVEEDKKHERHPIFGNIVDEVAYHEKYPTIYHLRKKLVDSTDKADLRLIYLALAHMIKFRGHFLIEGDLNPDNSDVDKLFIQLVQTYNQLFEENPINASGVDAKAILSARLSKSRRLENLIAQLPGEKKNGLFGNLIALSLGLTPNFKSNFDLAEDAKLQLSKDTYDDDLDNLLAQIGDQYADLFLAAKNLSDAILLSDILRVNTEITKAPLSASMIKRYDEHHQDLTLLKALVRQQLPEKYKEIFFDQSKNGYAGYIDGGASQEEFYKFIKPILEKMDGTEELLVKLNREDLLRKQRTFDNGSIPHQIHLGELHAILRRQEDFYPFLKDNREKIEKILTFRIPYYVGPLARGNSRFAWMTRKSEETITPWNFEEVVDKGASAQSFIERMTNFDKNLPNEKVLPKHSLLYEYFTVYNELTKVKYVTEGMRKPAFLSGEQKKAIVDLLFKTNRKVTVKQLKEDYFKKIECFDSVEISGVEDRFNASLGTYHDLLKIIKDKDFLDNEENEDILEDIVLTLTLFEDREMIEERLKTYAHLFDDKVMKQLKRRRYTGWGRLSRKLINGIRDKQSGKTILDFLKSDGFANRNFMQLIHDDSLTFKEDIQKAQVSGQGDSLHEHIANLAGSPAIKKGILQTVKVVDELVKVMGRHKPENIVIEMARENQTTQKGQKNSRERMKRIEEGIKELGSQILKEHPVENTQLQNEKLYLYYLQNGRDMYVDQELDINRLSDYDVDHIVPQSFLKDDSIDNKVLTRSDKARGKSDNVPSEEVVKKMKNYWRQLLNAKLITQRKFDNLTKAERGGLSELDKAGFIKRQLVETRQITKHVAQILDSRMNTKYDENDKLIREVKVITLKSKLVSDFRKDFQFYKVREINNYHHAHDAYLNAVVGTALIKKYPKLESEFVYGDYKVYDVRKMIAKSEQEIGKATAKYFFYSNIMNFFKTEITLANGEIRKRPLIETNGETGEIVWDKGRDFATVRKVLSMPQVNIVKKTEVQTGGFSKESILPKRNSDKLIARKKDWDPKKYGGFDSPTVAYSVLVVAKVEKGKSKKLKSVKELLGITIMERSSFEKNPIDFLEAKGYKEVKKDLIIKLPKYSLFELENGRKRMLASAGELQKGNELALPSKYVNFLYLASHYEKLKGSPEDNEQKQLFVEQHKHYLDEIIEQISEFSKRVILADANLDKVLSAYNKHRDKPIREQAENIIHLFTLTNLGAPAAFKYFDTTIDRKRYTSTKEVLDATLIHQSITGLYETRIDLSQLGGDGGGSSEAAAKGGSGGMNPLQLLQPLPAEIKGTKLLAHWNSGATITCIPESFLEDEQPIKKTLIKTIHGEKQQNVYYVTFKVKGRKVEAEVIASPYEYILLSPTDVPWLTQQPLQLTILVPLQEYQEKILSKTALPEDQKQQLKTLFVKYDNLWQHWENQVGHRKIRPHNIATGDYPPRPQKQYPINPKAKPSIQIVIDDLLKQGVLTPQNSTMNTPVYPVPKPDGRWRMVLDYREVNKTIPLTAAQNQHSAGILATIVRQKYKTTLDLANGFWAHPITPESYWLTAFTWQGKQYCWTRLPQGFLNSPALFNADVVDLLKEIPNVQVYVDDIYLSHDDPKEHVQQLEKVFQILLQAGYVVSLKKSEIGQKTVEFLGFNITKEGRGLTDTFKTKLLNITPPKDLKQLQSILGKLNFARNFIPNFAELVQPLYNLIAPAKGKYIEWSEENTKQLNMVIEALNTASNLEERLPEQRLVIKVNTSPSAGYVRYYNETGKKPIMYLNYVFSKAELKFSMLEKLLTTMHKALIKAMDLAMGQEILVYSPIVSMTKIQKTPLPERKALPIRWITWMTYLEDPRIQFHYDKTLPELKHIPDVYTSSQSPVKHPSQYEGVFYTDGSAIKSPDPTKSNNAGMGIVHATYKPEYQVLNQWSIPLGNHTAQMAEIAAVEFACKKALKIPGPVLVITDSFYVAESANKELPYWKSNGFVNNKKKPLKHISKWKSIAECLSMKPDITIQHEKGISLQIPVFILKGNALADKLATQGSYVVNAGKRTADGSEFEKRTADGSEFESPKKKAKVE

SEQ ID NO: 1358 - protein, 2171 aa, synthetic construct
MPAAKRVKLDGGDKKYSIGLDIGTNSVGWAVITDEYKVPSKKFKVLGNTDRHSIKKNLIGALLFDSGETAEATRLKRTARRRYTRRKNRICYLQEIFSNEMAKVDDSFFHRLEESFLVEEDKKHERHPIFGNIVDEVAYHEKYPTIYHLRKKLVDSTDKADLRLIYLALAHMIKFRGHFLIEGDLNPDNSDVDKLFIQLVQTYNQLFEENPINASGVDAKAILSARLSKSRRLENLIAQLPGEKKNGLFGNLIALSLGLTPNFKSNFDLAEDAKLQLSKDTYDDDLDNLLAQIGDQYADLFLAAKNLSDAILLSDILRVNTEITKAPLSASMIKRYDEHHQDLTLLKALVRQQLPEKYKEIFFDQSKNGYAGYIDGGASQEEFYKFIKPILEKMDGTEELLVKLNREDLLRKQRTFDNGSIPHQIHLGELHAILRRQEDFYPFLKDNREKIEKILTFRIPYYVGPLARGNSRFAWMTRKSEETITPWNFEEVVDKGASAQSFIERMTNFDKNLPNEKVLPKHSLLYEYFTVYNELTKVKYVTEGMRKPAFLSGEQKKAIVDLLFKTNRKVTVKQLKEDYFKKIECFDSVEISGVEDRFNASLGTYHDLLKIIKDKDFLDNEENEDILEDIVLTLTLFEDREMIEERLKTYAHLFDDKVMKQLKRRRYTGWGRLSRKLINGIRDKQSGKTILDFLKSDGFANRNFMQLIHDDSLTFKEDIQKAQVSGQGDSLHEHIANLAGSPAIKKGILQTVKVVDELVKVMGRHKPENIVIEMARENQTTQKGQKNSRERMKRIEEGIKELGSQILKEHPVENTQLQNEKLYLYYLQNGRDMYVDQELDINRLSDYDVDHIVPQSFLKDDSIDNKVLTRSDKARGKSDNVPSEEVVKKMKNYWRQLLNAKLITQRKFDNLTKAERGGLSELDKAGFIKRQLVETRQITKHVAQILDSRMNTKYDENDKLIREVKVITLKSKLVSDFRKDFQFYKVREINNYHHAHDAYLNAVVGTALIKKYPKLESEFVYGDYKVYDVRKMIAKSEQEIGKATAKYFFYSNIMNFFKTEITLANGEIRKRPLIETNGETGEIVWDKGRDFATVRKVLSMPQVNIVKKTEVQTGGFSKESILPKRNSDKLIARKKDWDPKKYGGFDSPTVAYSVLVVAKVEKGKSKKLKSVKELLGITIMERSSFEKNPIDFLEAKGYKEVKKDLIIKLPKYSLFELENGRKRMLASAGELQKGNELALPSKYVNFLYLASHYEKLKGSPEDNEQKQLFVEQHKHYLDEIIEQISEFSKRVILADANLDKVLSAYNKHRDKPIREQAENIIHLFTLTNLGAPAAFKYFDTTIDRKRYTSTKEVLDATLIHQSITGLYETRIDLSQLGGDGGPAPGSSGGMNPLQLLQPLPAEIKGTKLLAHWNSGATITCIPESFLEDEQPIKKTLIKTIHGEKQQNVYYVTFKVKGRKVEAEVIASPYEYILLSPTDVPWLTQQPLQLTILVPLQEYQEKILSKTALPEDQKQQLKTLFVKYDNLWQHWENQVGHRKIRPHNIATGDYPPRPQKQYPINPKAKPSIQIVIDDLLKQGVLTPQNSTMNTPVYPVPKPDGRWRMVLDYREVNKTIPLTAAQNQHSAGILATIVRQKYKTTLDLANGFWAHPITPESYWLTAFTWQGKQYCWTRLPQGFLNSPALFNADVVDLLKEIPNVQVYVDDIYLSHDDPKEHVQQLEKVFQILLQAGYVVSLKKSEIGQKTVEFLGFNITKEGRGLTDTFKTKLLNITPPKDLKQLQSILGKLNFARNFIPNFAELVQPLYNLIAPAKGKYIEWSEENTKQLNMVIEALNTASNLEERLPEQRLVIKVNTSPSAGYVRYYNETGKKPIMYLNYVFSKAELKFSMLEKLLTTMHKALIKAMDLAMGQEILVYSPIVSMTKIQKTPLPERKALPIRWITWMTYLEDPRIQFHYDKTLPELKHIPDVYTSSQSPVKHPSQYEGVFYTDGSAIKSPDPTKSNNAGMGIVHATYKPEYQVLNQWSIPLGNHTAQMAEIAAVEFACKKALKIPGPVLVITDSFYVAESANKELPYWKSNGFVNNKKKPLKHISKWKSIAECLSMKPDITIQHEKGISLQIPVFILKGNALADKLATQGSYVVNAGKRTADGSEFEKRTADGSEFESPKKKAKVE

SEQ ID NO: 1359 - protein, 2176 aa, synthetic construct
MPAAKRVKLDGGDKKYSIGLDIGTNSVGWAVITDEYKVPSKKFKVLGNTDRHSIKKNLIGALLFDSGETAEATRLKRTARRRYTRRKNRICYLQEIFSNEMAKVDDSFFHRLEESFLVEEDKKHERHPIFGNIVDEVAYHEKYPTIYHLRKKLVDSTDKADLRLIYLALAHMIKFRGHFLIEGDLNPDNSDVDKLFIQLVQTYNQLFEENPINASGVDAKAILSARLSKSRRLENLIAQLPGEKKNGLFGNLIALSLGLTPNFKSNFDLAEDAKLQLSKDTYDDDLDNLLAQIGDQYADLFLAAKNLSDAILLSDILRVNTEITKAPLSASMIKRYDEHHQDLTLLKALVRQQLPEKYKEIFFDQSKNGYAGYIDGGASQEEFYKFIKPILEKMDGTEELLVKLNREDLLRKQRTFDNGSIPHQIHLGELHAILRRQEDFYPFLKDNREKIEKILTFRIPYYVGPLARGNSRFAWMTRKSEETITPWNFEEVVDKGASAQSFIERMTNFDKNLPNEKVLPKHSLLYEYFTVYNELTKVKYVTEGMRKPAFLSGEQKKAIVDLLFKTNRKVTVKQLKEDYFKKIECFDSVEISGVEDRFNASLGTYHDLLKIIKDKDFLDNEENEDILEDIVLTLTLFEDREMIEERLKTYAHLFDDKVMKQLKRRRYTGWGRLSRKLINGIRDKQSGKTILDFLKSDGFANRNFMQLIHDDSLTFKEDIQKAQVSGQGDSLHEHIANLAGSPAIKKGILQTVKVVDELVKVMGRHKPENIVIEMARENQTTQKGQKNSRERMKRIEEGIKELGSQILKEHPVENTQLQNEKLYLYYLQNGRDMYVDQELDINRLSDYDVDHIVPQSFLKDDSIDNKVLTRSDKARGKSDNVPSEEVVKKMKNYWRQLLNAKLITQRKFDNLTKAERGGLSELDKAGFIKRQLVETRQITKHVAQILDSRMNTKYDENDKLIREVKVITLKSKLVSDFRKDFQFYKVREINNYHHAHDAYLNAVVGTALIKKYPKLESEFVYGDYKVYDVRKMIAKSEQEIGKATAKYFFYSNIMNFFKTEITLANGEIRKRPLIETNGETGEIVWDKGRDFATVRKVLSMPQVNIVKKTEVQTGGFSKESILPKRNSDKLIARKKDWDPKKYGGFDSPTVAYSVLVVAKVEKGKSKKLKSVKELLGITIMERSSFEKNPIDFLEAKGYKEVKKDLIIKLPKYSLFELENGRKRMLASAGELQKGNELALPSKYVNFLYLASHYEKLKGSPEDNEQKQLFVEQHKHYLDEIIEQISEFSKRVILADANLDKVLSAYNKHRDKPIREQAENIIHLFTLTNLGAPAAFKYFDTTIDRKRYTSTKEVLDATLIHQSITGLYETRIDLSQLGGDGGPAPEAAAKGGSGGMNPLQLLQPLPAEIKGTKLLAHWNSGATITCIPESFLEDEQPIKKTLIKTIHGEKQQNVYYVTFKVKGRKVEAEVIASPYEYILLSPTDVPWLTQQPLQLTILVPLQEYQEKILSKTALPEDQKQQLKTLFVKYDNLWQHWENQVGHRKIRPHNIATGDYPPRPQKQYPINPKAKPSIQIVIDDLLKQGVLTPQNSTMNTPVYPVPKPDGRWRMVLDYREVNKTIPLTAAQNQHSAGILATIVRQKYKTTLDLANGFWAHPITPESYWLTAFTWQGKQYCWTRLPQGFLNSPALFNADVVDLLKEIPNVQVYVDDIYLSHDDPKEHVQQLEKVFQILLQAGYVVSLKKSEIGQKTVEFLGFNITKEGRGLTDTFKTKLLNITPPKDLKQLQSILGKLNFARNFIPNFAELVQPLYNLIAPAKGKYIEWSEENTKQLNMVIEALNTASNLEERLPEQRLVIKVNTSPSAGYVRYYNETGKKPIMYLNYVFSKAELKFSMLEKLLTTMHKALIKAMDLAMGQEILVYSPIVSMTKIQKTPLPERKALPIRWITWMTYLEDPRIQFHYDKTLPELKHIPDVYTSSQSPVKHPSQYEGVFYTDGSAIKSPDPTKSNNAGMGIVHATYKPEYQVLNQWSIPLGNHTAQMAEIAAVEFACKKALKIPGPVLVITDSFYVAESANKELPYWKSNGFVNNKKKPLKHISKWKSIAECLSMKPDITIQHEKGISLQIPVFILKGNALADKLATQGSYVVNAGKRTADGSEFEKRTADGSEFESPKKKAKVE

SEQ ID NO: 1360 - protein, 2176 aa, synthetic construct
MPAAKRVKLDGGDKKYSIGLDIGTNSVGWAVITDEYKVPSKKFKVLGNTDRHSIKKNLIGALLFDSGETAEATRLKRTARRRYTRRKNRICYLQEIFSNEMAKVDDSFFHRLEESFLVEEDKKHERHPIFGNIVDEVAYHEKYPTIYHLRKKLVDSTDKADLRLIYLALAHMIKFRGHFLIEGDLNPDNSDVDKLFIQLVQTYNQLFEENPINASGVDAKAILSARLSKSRRLENLIAQLPGEKKNGLFGNLIALSLGLTPNFKSNFDLAEDAKLQLSKDTYDDDLDNLLAQIGDQYADLFLAAKNLSDAILLSDILRVNTEITKAPLSASMIKRYDEHHQDLTLLKALVRQQLPEKYKEIFFDQSKNGYAGYIDGGASQEEFYKFIKPILEKMDGTEELLVKLNREDLLRKQRTFDNGSIPHQIHLGELHAILRRQEDFYPFLKDNREKIEKILTFRIPYYVGPLARGNSRFAWMTRKSEETITPWNFEEVVDKGASAQSFIERMTNFDKNLPNEKVLPKHSLLYEYFTVYNELTKVKYVTEGMRKPAFLSGEQKKAIVDLLFKTNRKVTVKQLKEDYFKKIECFDSVEISGVEDRFNASLGTYHDLLKIIKDKDFLDNEENEDILEDIVLTLTLFEDREMIEERLKTYAHLFDDKVMKQLKRRRYTGWGRLSRKLINGIRDKQSGKTILDFLKSDGFANRNFMQLIHDDSLTFKEDIQKAQVSGQGDSLHEHIANLAGSPAIKKGILQTVKVVDELVKVMGRHKPENIVIEMARENQTTQKGQKNSRERMKRIEEGIKELGSQILKEHPVENTQLQNEKLYLYYLQNGRDMYVDQELDINRLSDYDVDHIVPQSFLKDDSIDNKVLTRSDKARGKSDNVPSEEVVKKMKNYWRQLLNAKLITQRKFDNLTKAERGGLSELDKAGFIKRQLVETRQITKHVAQILDSRMNTKYDENDKLIREVKVITLKSKLVSDFRKDFQFYKVREINNYHHAHDAYLNAVVGTALIKKYPKLESEFVYGDYKVYDVRKMIAKSEQEIGKATAKYFFYSNIMNFFKTEITLANGEIRKRPLIETNGETGEIVWDKGRDFATVRKVLSMPQVNIVKKTEVQTGGFSKESILPKRNSDKLIARKKDWDPKKYGGFDSPTVAYSVLVVAKVEKGKSKKLKSVKELLGITIMERSSFEKNPIDFLEAKGYKEVKKDLIIKLPKYSLFELENGRKRMLASAGELQKGNELALPSKYVNFLYLASHYEKLKGSPEDNEQKQLFVEQHKHYLDEIIEQISEFSKRVILADANLDKVLSAYNKHRDKPIREQAENIIHLFTLTNLGAPAAFKYFDTTIDRKRYTSTKEVLDATLIHQSITGLYETRIDLSQLGGDGGEAAAKGGGPAPGGMNPLQLLQPLPAEIKGTKLLAHWNSGATITCIPESFLEDEQPIKKTLIKTIHGEKQQNVYYVTFKVKGRKVEAEVIASPYEYILLSPTDVPWLTQQPLQLTILVPLQEYQEKILSKTALPEDQKQQLKTLFVKYDNLWQHWENQVGHRKIRPHNIATGDYPPRPQKQYPINPKAKPSIQIVIDDLLKQGVLTPQNSTMNTPVYPVPKPDGRWRMVLDYREVNKTIPLTAAQNQHSAGILATIVRQKYKTTLDLANGFWAHPITPESYWLTAFTWQGKQYCWTRLPQGFLNSPALFNADVVDLLKEIPNVQVYVDDIYLSHDDPKEHVQQLEKVFQILLQAGYVVSLKKSEIGQKTVEFLGFNITKEGRGLTDTFKTKLLNITPPKDLKQLQSILGKLNFARNFIPNFAELVQPLYNLIAPAKGKYIEWSEENTKQLNMVIEALNTASNLEERLPEQRLVIKVNTSPSAGYVRYYNETGKKPIMYLNYVFSKAELKFSMLEKLLTTMHKALIKAMDLAMGQEILVYSPIVSMTKIQKTPLPERKALPIRWITWMTYLEDPRIQFHYDKTLPELKHIPDVYTSSQSPVKHPSQYEGVFYTDGSAIKSPDPTKSNNAGMGIVHATYKPEYQVLNQWSIPLGNHTAQMAEIAAVEFACKKALKIPGPVLVITDSFYVAESANKELPYWKSNGFVNNKKKPLKHISKWKSIAECLSMKPDITIQHEKGISLQIPVFILKGNALADKLATQGSYVVNAGKRTADGSEFEKRTADGSEFESPKKKAKVE

SEQ ID NO: 1361 - protein, 2176 aa, synthetic construct
MPAAKRVKLDGGDKKYSIGLDIGTNSVGWAVITDEYKVPSKKFKVLGNTDRHSIKKNLIGALLFDSGETAEATRLKRTARRRYTRRKNRICYLQEIFSNEMAKVDDSFFHRLEESFLVEEDKKHERHPIFGNIVDEVAYHEKYPTIYHLRKKLVDSTDKADLRLIYLALAHMIKFRGHFLIEGDLNPDNSDVDKLFIQLVQTYNQLFEENPINASGVDAKAILSARLSKSRRLENLIAQLPGEKKNGLFGNLIALSLGLTPNFKSNFDLAEDAKLQLSKDTYDDDLDNLLAQIGDQYADLFLAAKNLSDAILLSDILRVNTEITKAPLSASMIKRYDEHHQDLTLLKALVRQQLPEKYKEIFFDQSKNGYAGYIDGGASQEEFYKFIKPILEKMDGTEELLVKLNREDLLRKQRTFDNGSIPHQIHLGELHAILRRQEDFYPFLKDNREKIEKILTFRIPYYVGPLARGNSRFAWMTRKSEETITPWNFEEVVDKGASAQSFIERMTNFDKNLPNEKVLPKHSLLYEYFTVYNELTKVKYVTEGMRKPAFLSGEQKKAIVDLLFKTNRKVTVKQLKEDYFKKIECFDSVEISGVEDRFNASLGTYHDLLKIIKDKDFLDNEENEDILEDIVLTLTLFEDREMIEERLKTYAHLFDDKVMKQLKRRRYTGWGRLSRKLINGIRDKQSGKTILDFLKSDGFANRNFMQLIHDDSLTFKEDIQKAQVSGQGDSLHEHIANLAGSPAIKKGILQTVKVVDELVKVMGRHKPENIVIEMARENQTTQKGQKNSRERMKRIEEGIKELGSQILKEHPVENTQLQNEKLYLYYLQNGRDMYVDQELDINRLSDYDVDHIVPQSFLKDDSIDNKVLTRSDKARGKSDNVPSEEVVKKMKNYWRQLLNAKLITQRKFDNLTKAERGGLSELDKAGFIKRQLVETRQITKHVAQILDSRMNTKYDENDKLIREVKVITLKSKLVSDFRKDFQFYKVREINNYHHAHDAYLNAVVGTALIKKYPKLESEFVYGDYKVYDVRKMIAKSEQEIGKATAKYFFYSNIMNFFKTEITLANGEIRKRPLIETNGETGEIVWDKGRDFATVRKVLSMPQVNIVKKTEVQTGGFSKESILPKRNSDKLIARKKDWDPKKYGGFDSPTVAYSVLVVAKVEKGKSKKLKSVKELLGITIMERSSFEKNPIDFLEAKGYKEVKKDLIIKLPKYSLFELENGRKRMLASAGELQKGNELALPSKYVNFLYLASHYEKLKGSPEDNEQKQLFVEQHKHYLDEIIEQISEFSKRVILADANLDKVLSAYNKHRDKPIREQAENIIHLFTLTNLGAPAAFKYFDTTIDRKRYTSTKEVLDATLIHQSITGLYETRIDLSQLGGDGGGSSEAAAKGGGGGMNPLQLLQPLPAEIKGTKLLAHWNSGATITCIPESFLEDEQPIKKTLIKTIHGEKQQNVYYVTFKVKGRKVEAEVIASPYEYILLSPTDVPWLTQQPLQLTILVPLQEYQEKILSKTALPEDQKQQLKTLFVKYDNLWQHWENQVGHRKIRPHNIATGDYPPRPQKQYPINPKAKPSIQIVIDDLLKQGVLTPQNSTMNTPVYPVPKPDGRWRMVLDYREVNKTIPLTAAQNQHSAGILATIVRQKYKTTLDLANGFWAHPITPESYWLTAFTWQGKQYCWTRLPQGFLNSPALFNADVVDLLKEIPNVQVYVDDIYLSHDDPKEHVQQLEKVFQILLQAGYVVSLKKSEIGQKTVEFLGFNITKEGRGLTDTFKTKLLNITPPKDLKQLQSILGKLNFARNFIPNFAELVQPLYNLIAPAKGKYIEWSEENTKQLNMVIEALNTASNLEERLPEQRLVIKVNTSPSAGYVRYYNETGKKPIMYLNYVFSKAELKFSMLEKLLTTMHKALIKAMDLAMGQEILVYSPIVSMTKIQKTPLPERKALPIRWITWMTYLEDPRIQFHYDKTLPELKHIPDVYTSSQSPVKHPSQYEGVFYTDGSAIKSPDPTKSNNAGMGIVHATYKPEYQVLNQWSIPLGNHTAQMAEIAAVEFACKKALKIPGPVLVITDSFYVAESANKELPYWKSNGFVNNKKKPLKHISKWKSIAECLSMKPDITIQHEKGISLQIPVFILKGNALADKLATQGSYVVNAGKRTADGSEFEKRTADGSEFESPKKKAKVE

SEQ ID NO: 1362 - protein, 2176 aa, synthetic construct
MPAAKRVKLDGGDKKYSIGLDIGTNSVGWAVITDEYKVPSKKFKVLGNTDRHSIKKNLIGALLFDSGETAEATRLKRTARRRYTRRKNRICYLQEIFSNEMAKVDDSFFHRLEESFLVEEDKKHERHPIFGNIVDEVAYHEKYPTIYHLRKKLVDSTDKADLRLIYLALAHMIKFRGHFLIEGDLNPDNSDVDKLFIQLVQTYNQLFEENPINASGVDAKAILSARLSKSRRLENLIAQLPGEKKNGLFGNLIALSLGLTPNFKSNFDLAEDAKLQLSKDTYDDDLDNLLAQIGDQYADLFLAAKNLSDAILLSDILRVNTEITKAPLSASMIKRYDEHHQDLTLLKALVRQQLPEKYKEIFFDQSKNGYAGYIDGGASQEEFYKFIKPILEKMDGTEELLVKLNREDLLRKQRTFDNGSIPHQIHLGELHAILRRQEDFYPFLKDNREKIEKILTFRIPYYVGPLARGNSRFAWMTRKSEETITPWNFEEVVDKGASAQSFIERMTNFDKNLPNEKVLPKHSLLYEYFTVYNELTKVKYVTEGMRKPAFLSGEQKKAIVDLLFKTNRKVTVKQLKEDYFKKIECFDSVEISGVEDRFNASLGTYHDLLKIIKDKDFLDNEENEDILEDIVLTLTLFEDREMIEERLKTYAHLFDDKVMKQLKRRRYTGWGRLSRKLINGIRDKQSGKTILDFLKSDGFANRNFMQLIHDDSLTFKEDIQKAQVSGQGDSLHEHIANLAGSPAIKKGILQTVKVVDELVKVMGRHKPENIVIEMARENQTTQKGQKNSRERMKRIEEGIKELGSQILKEHPVENTQLQNEKLYLYYLQNGRDMYVDQELDINRLSDYDVDHIVPQSFLKDDSIDNKVLTRSDKARGKSDNVPSEEVVKKMKNYWRQLLNAKLITQRKFDNLTKAERGGLSELDKAGFIKRQLVETRQITKHVAQILDSRMNTKYDENDKLIREVKVITLKSKLVSDFRKDFQFYKVREINNYHHAHDAYLNAVVGTALIKKYPKLESEFVYGDYKVYDVRKMIAKSEQEIGKATAKYFFYSNIMNFFKTEITLANGEIRKRPLIETNGETGEIVWDKGRDFATVRKVLSMPQVNIVKKTEVQTGGFSKESILPKRNSDKLIARKKDWDPKKYGGFDSPTVAYSVLVVAKVEKGKSKKLKSVKELLGITIMERSSFEKNPIDFLEAKGYKEVKKDLIIKLPKYSLFELENGRKRMLASAGELQKGNELALPSKYVNFLYLASHYEKLKGSPEDNEQKQLFVEQHKHYLDEIIEQISEFSKRVILADANLDKVLSAYNKHRDKPIREQAENIIHLFTLTNLGAPAAFKYFDTTIDRKRYTSTKEVLDATLIHQSITGLYETRIDLSQLGGDGGEAAAKGGGGSSGGMNPLQLLQPLPAEIKGTKLLAHWNSGATITCIPESFLEDEQPIKKTLIKTIHGEKQQNVYYVTFKVKGRKVEAEVIASPYEYILLSPTDVPWLTQQPLQLTILVPLQEYQEKILSKTALPEDQKQQLKTLFVKYDNLWQHWENQVGHRKIRPHNIATGDYPPRPQKQYPINPKAKPSIQIVIDDLLKQGVLTPQNSTMNTPVYPVPKPDGRWRMVLDYREVNKTIPLTAAQNQHSAGILATIVRQKYKTTLDLANGFWAHPITPESYWLTAFTWQGKQYCWTRLPQGFLNSPALFNADVVDLLKEIPNVQVYVDDIYLSHDDPKEHVQQLEKVFQILLQAGYVVSLKKSEIGQKTVEFLGFNITKEGRGLTDTFKTKLLNITPPKDLKQLQSILGKLNFARNFIPNFAELVQPLYNLIAPAKGKYIEWSEENTKQLNMVIEALNTASNLEERLPEQRLVIKVNTSPSAGYVRYYNETGKKPIMYLNYVFSKAELKFSMLEKLLTTMHKALIKAMDLAMGQEILVYSPIVSMTKIQKTPLPERKALPIRWITWMTYLEDPRIQFHYDKTLPELKHIPDVYTSSQSPVKHPSQYEGVFYTDGSAIKSPDPTKSNNAGMGIVHATYKPEYQVLNQWSIPLGNHTAQMAEIAAVEFACKKALKIPGPVLVITDSFYVAESANKELPYWKSNGFVNNKKKPLKHISKWKSIAECLSMKPDITIQHEKGISLQIPVFILKGNALADKLATQGSYVVNAGKRTADGSEFEKRTADGSEFESPKKKAKVE

SEQ ID NO: 1363 - protein, 2172 aa, synthetic construct
MPAAKRVKLDGGDKKYSIGLDIGTNSVGWAVITDEYKVPSKKFKVLGNTDRHSIKKNLIGALLFDSGETAEATRLKRTARRRYTRRKNRICYLQEIFSNEMAKVDDSFFHRLEESFLVEEDKKHERHPIFGNIVDEVAYHEKYPTIYHLRKKLVDSTDKADLRLIYLALAHMIKFRGHFLIEGDLNPDNSDVDKLFIQLVQTYNQLFEENPINASGVDAKAILSARLSKSRRLENLIAQLPGEKKNGLFGNLIALSLGLTPNFKSNFDLAEDAKLQLSKDTYDDDLDNLLAQIGDQYADLFLAAKNLSDAILLSDILRVNTEITKAPLSASMIKRYDEHHQDLTLLKALVRQQLPEKYKEIFFDQSKNGYAGYIDGGASQEEFYKFIKPILEKMDGTEELLVKLNREDLLRKQRTFDNGSIPHQIHLGELHAILRRQEDFYPFLKDNREKIEKILTFRIPYYVGPLARGNSRFAWMTRKSEETITPWNFEEVVDKGASAQSFIERMTNFDKNLPNEKVLPKHSLLYEYFTVYNELTKVKYVTEGMRKPAFLSGEQKKAIVDLLFKTNRKVTVKQLKEDYFKKIECFDSVEISGVEDRFNASLGTYHDLLKIIKDKDFLDNEENEDILEDIVLTLTLFEDREMIEERLKTYAHLFDDKVMKQLKRRRYTGWGRLSRKLINGIRDKQSGKTILDFLKSDGFANRNFMQLIHDDSLTFKEDIQKAQVSGQGDSLHEHIANLAGSPAIKKGILQTVKVVDELVKVMGRHKPENIVIEMARENQTTQKGQKNSRERMKRIEEGIKELGSQILKEHPVENTQLQNEKLYLYYLQNGRDMYVDQELDINRLSDYDVDHIVPQSFLKDDSIDNKVLTRSDKARGKSDNVPSEEVVKKMKNYWRQLLNAKLITQRKFDNLTKAERGGLSELDKAGFIKRQLVETRQITKHVAQILDSRMNTKYDENDKLIREVKVITLKSKLVSDFRKDFQFYKVREINNYHHAHDAYLNAVVGTALIKKYPKLESEFVYGDYKVYDVRKMIAKSEQEIGKATAKYFFYSNIMNFFKTEITLANGEIRKRPLIETNGETGEIVWDKGRDFATVRKVLSMPQVNIVKKTEVQTGGFSKESILPKRNSDKLIARKKDWDPKKYGGFDSPTVAYSVLVVAKVEKGKSKKLKSVKELLGITIMERSSFEKNPIDFLEAKGYKEVKKDLIIKLPKYSLFELENGRKRMLASAGELQKGNELALPSKYVNFLYLASHYEKLKGSPEDNEQKQLFVEQHKHYLDEIIEQISEFSKRVILADANLDKVLSAYNKHRDKPIREQAENIIHLFTLTNLGAPAAFKYFDTTIDRKRYTSTKEVLDATLIHQSITGLYETRIDLSQLGGDGGPAPAPAPGGMNPLQLLQPLPAEIKGTKLLAHWNSGATITCIPESFLEDEQPIKKTLIKTIHGEKQQNVYYVTFKVKGRKVEAEVIASPYEYILLSPTDVPWLTQQPLQLTILVPLQEYQEKILSKTALPEDQKQQLKTLFVKYDNLWQHWENQVGHRKIRPHNIATGDYPPRPQKQYPINPKAKPSIQIVIDDLLKQGVLTPQNSTMNTPVYPVPKPDGRWRMVLDYREVNKTIPLTAAQNQHSAGILATIVRQKYKTTLDLANGFWAHPITPESYWLTAFTWQGKQYCWTRLPQGFLNSPALFNADVVDLLKEIPNVQVYVDDIYLSHDDPKEHVQQLEKVFQILLQAGYVVSLKKSEIGQKTVEFLGFNITKEGRGLTDTFKTKLLNITPPKDLKQLQSILGKLNFARNFIPNFAELVQPLYNLIAPAKGKYIEWSEENTKQLNMVIEALNTASNLEERLPEQRLVIKVNTSPSAGYVRYYNETGKKPIMYLNYVFSKAELKFSMLEKLLTTMHKALIKAMDLAMGQEILVYSPIVSMTKIQKTPLPERKALPIRWITWMTYLEDPRIQFHYDKTLPELKHIPDVYTSSQSPVKHPSQYEGVFYTDGSAIKSPDPTKSNNAGMGIVHATYKPEYQVLNQWSIPLGNHTAQMAEIAAVEFACKKALKIPGPVLVITDSFYVAESANKELPYWKSNGFVNNKKKPLKHISKWKSIAECLSMKPDITIQHEKGISLQIPVFILKGNALADKLATQGSYVVNAGKRTADGSEFEKRTADGSEFESPKKKAKVE

SEQ ID NO: 1364 - protein, 2174 aa, synthetic construct
MPAAKRVKLDGGDKKYSIGLDIGTNSVGWAVITDEYKVPSKKFKVLGNTDRHSIKKNLIGALLFDSGETAEATRLKRTARRRYTRRKNRICYLQEIFSNEMAKVDDSFFHRLEESFLVEEDKKHERHPIFGNIVDEVAYHEKYPTIYHLRKKLVDSTDKADLRLIYLALAHMIKFRGHFLIEGDLNPDNSDVDKLFIQLVQTYNQLFEENPINASGVDAKAILSARLSKSRRLENLIAQLPGEKKNGLFGNLIALSLGLTPNFKSNFDLAEDAKLQLSKDTYDDDLDNLLAQIGDQYADLFLAAKNLSDAILLSDILRVNTEITKAPLSASMIKRYDEHHQDLTLLKALVRQQLPEKYKEIFFDQSKNGYAGYIDGGASQEEFYKFIKPILEKMDGTEELLVKLNREDLLRKQRTFDNGSIPHQIHLGELHAILRRQEDFYPFLKDNREKIEKILTFRIPYYVGPLARGNSRFAWMTRKSEETITPWNFEEVVDKGASAQSFIERMTNFDKNLPNEKVLPKHSLLYEYFTVYNELTKVKYVTEGMRKPAFLSGEQKKAIVDLLFKTNRKVTVKQLKEDYFKKIECFDSVEISGVEDRFNASLGTYHDLLKIIKDKDFLDNEENEDILEDIVLTLTLFEDREMIEERLKTYAHLFDDKVMKQLKRRRYTGWGRLSRKLINGIRDKQSGKTILDFLKSDGFANRNFMQLIHDDSLTFKEDIQKAQVSGQGDSLHEHIANLAGSPAIKKGILQTVKVVDELVKVMGRHKPENIVIEMARENQTTQKGQKNSRERMKRIEEGIKELGSQILKEHPVENTQLQNEKLYLYYLQNGRDMYVDQELDINRLSDYDVDHIVPQSFLKDDSIDNKVLTRSDKARGKSDNVPSEEVVKKMKNYWRQLLNAKLITQRKFDNLTKAERGGLSELDKAGFIKRQLVETRQITKHVAQILDSRMNTKYDENDKLIREVKVITLKSKLVSDFRKDFQFYKVREINNYHHAHDAYLNAVVGTALIKKYPKLESEFVYGDYKVYDVRKMIAKSEQEIGKATAKYFFYSNIMNFFKTEITLANGEIRKRPLIETNGETGEIVWDKGRDFATVRKVLSMPQVNIVKKTEVQTGGFSKESILPKRNSDKLIARKKDWDPKKYGGFDSPTVAYSVLVVAKVEKGKSKKLKSVKELLGITIMERSSFEKNPIDFLEAKGYKEVKKDLIIKLPKYSLFELENGRKRMLASAGELQKGNELALPSKYVNFLYLASHYEKLKGSPEDNEQKQLFVEQHKHYLDEIIEQISEFSKRVILADANLDKVLSAYNKHRDKPIREQAENIIHLFTLTNLGAPAAFKYFDTTIDRKRYTSTKEVLDATLIHQSITGLYETRIDLSQLGGDGGPAPAPAPAPGGMNPLQLLQPLPAEIKGTKLLAHWNSGATITCIPESFLEDEQPIKKTLIKTIHGEKQQNVYYVTFKVKGRKVEAEVIASPYEYILLSPTDVPWLTQQPLQLTILVPLQEYQEKILSKTALPEDQKQQLKTLFVKYDNLWQHWENQVGHRKIRPHNIATGDYPPRPQKQYPINPKAKPSIQIVIDDLLKQGVLTPQNSTMNTPVYPVPKPDGRWRMVLDYREVNKTIPLTAAQNQHSAGILATIVRQKYKTTLDLANGFWAHPITPESYWLTAFTWQGKQYCWTRLPQGFLNSPALFNADVVDLLKEIPNVQVYVDDIYLSHDDPKEHVQQLEKVFQILLQAGYVVSLKKSEIGQKTVEFLGFNITKEGRGLTDTFKTKLLNITPPKDLKQLQSILGKLNFARNFIPNFAELVQPLYNLIAPAKGKYIEWSEENTKQLNMVIEALNTASNLEERLPEQRLVIKVNTSPSAGYVRYYNETGKKPIMYLNYVFSKAELKFSMLEKLLTTMHKALIKAMDLAMGQEILVYSPIVSMTKIQKTPLPERKALPIRWITWMTYLEDPRIQFHYDKTLPELKHIPDVYTSSQSPVKHPSQYEGVFYTDGSAIKSPDPTKSNNAGMGIVHATYKPEYQVLNQWSIPLGNHTAQMAEIAAVEFACKKALKIPGPVLVITDSFYVAESANKELPYWKSNGFVNNKKKPLKHISKWKSIAECLSMKPDITIQHEKGISLQIPVFILKGNALADKLATQGSYVVNAGKRTADGSEFEKRTADGSEFESPKKKAKVE

SEQ ID NO: 1365 - protein, 2094 aa, synthetic construct
MPAAKRVKLDGGDKKYSIGLDIGTNSVGWAVITDEYKVPSKKFKVLGNTDRHSIKKNLIGALLFDSGETAEATRLKRTARRRYTRRKNRICYLQEIFSNEMAKVDDSFFHRLEESFLVEEDKKHERHPIFGNIVDEVAYHEKYPTIYHLRKKLVDSTDKADLRLIYLALAHMIKFRGHFLIEGDLNPDNSDVDKLFIQLVQTYNQLFEENPINASGVDAKAILSARLSKSRRLENLIAQLPGEKKNGLFGNLIALSLGLTPNFKSNFDLAEDAKLQLSKDTYDDDLDNLLAQIGDQYADLFLAAKNLSDAILLSDILRVNTEITKAPLSASMIKRYDEHHQDLTLLKALVRQQLPEKYKEIFFDQSKNGYAGYIDGGASQEEFYKFIKPILEKMDGTEELLVKLNREDLLRKQRTFDNGSIPHQIHLGELHAILRRQEDFYPFLKDNREKIEKILTFRIPYYVGPLARGNSRFAWMTRKSEETITPWNFEEVVDKGASAQSFIERMTNFDKNLPNEKVLPKHSLLYEYFTVYNELTKVKYVTEGMRKPAFLSGEQKKAIVDLLFKTNRKVTVKQLKEDYFKKIECFDSVEISGVEDRFNASLGTYHDLLKIIKDKDFLDNEENEDILEDIVLTLTLFEDREMIEERLKTYAHLFDDKVMKQLKRRRYTGWGRLSRKLINGIRDKQSGKTILDFLKSDGFANRNFMQLIHDDSLTFKEDIQKAQVSGQGDSLHEHIANLAGSPAIKKGILQTVKVVDELVKVMGRHKPENIVIEMARENQTTQKGQKNSRERMKRIEEGIKELGSQILKEHPVENTQLQNEKLYLYYLQNGRDMYVDQELDINRLSDYDVDHIVPQSFLKDDSIDNKVLTRSDKARGKSDNVPSEEVVKKMKNYWRQLLNAKLITQRKFDNLTKAERGGLSELDKAGFIKRQLVETRQITKHVAQILDSRMNTKYDENDKLIREVKVITLKSKLVSDFRKDFQFYKVREINNYHHAHDAYLNAVVGTALIKKYPKLESEFVYGDYKVYDVRKMIAKSEQEIGKATAKYFFYSNIMNFFKTEITLANGEIRKRPLIETNGETGEIVWDKGRDFATVRKVLSMPQVNIVKKTEVQTGGFSKESILPKRNSDKLIARKKDWDPKKYGGFDSPTVAYSVLVVAKVEKGKSKKLKSVKELLGITIMERSSFEKNPIDFLEAKGYKEVKKDLIIKLPKYSLFELENGRKRMLASAGELQKGNELALPSKYVNFLYLASHYEKLKGSPEDNEQKQLFVEQHKHYLDEIIEQISEFSKRVILADANLDKVLSAYNKHRDKPIREQAENIIHLFTLTNLGAPAAFKYFDTTIDRKRYTSTKEVLDATLIHQSITGLYETRIDLSQLGGDGGEAAAKGGSPAPGGVLNLEEEYRLHEKPVPSSIDPSWLQLFPTVWAERAGMGLANQVPPVVVELRSGASPVAVRQYPMSKEAREGIRPHIQKFLDLGVLVPCRSPWNTPLLPVKKPGTNDYRPVQDLREINKRVQDIHPTVPNPYNLLSSLPPSYTWYSVLDLKDAFFCLRLHPNSQPLFAFEWKDPEKGNTGQLTWTRLPQGFKNSPTLFDEALHRDLAPFRALNPQVVLLQYVDDLLVAAPTYEDCKKGTQKLLQELSKLGYRVSAKKAQLCQREVTYLGYLLKEGKRWLTPARKATVMKIPVPTTPRQVREFLGTAGFCRLWIPGFASLAAPLYPLTKESIPFIWTEEHQQAFDHIKKALLSAPALALPDLTKPFTLYIDERAGVARGVLTQTLGPWRRPVAYLSKKLDPVASGWPTCLKAVAAVALLLKDADKLTLGQNVTVIASHSLESIVRQPPDRWMTNARMTHYQSLLLNERVSFAPPAVLNPATLLPVESEATPVHRCSEILAEETGTRRDLEDQPLPGVPTWYTDGSSFITEGKRRAGAPIVDGKRTVWASSLPEGTSAQKAELVALTQALRLAEGKNINIYTDSRYAFATAHIHGAIYKQRGLLTSAGKDIKNKEEILALLEAIHLPRRVAIIHCPGHQRGSNPVATGNRRADEAAKQAALSTRVLAGTTKPAGKRTADGSEFEKRTADGSEFESPKKKAKVE

SEQ ID NO: 1366 - protein, 2101 aa, synthetic construct
MPAAKRVKLDGGDKKYSIGLDIGTNSVGWAVITDEYKVPSKKFKVLGNTDRHSIKKNLIGALLFDSGETAEATRLKRTARRRYTRRKNRICYLQEIFSNEMAKVDDSFFHRLEESFLVEEDKKHERHPIFGNIVDEVAYHEKYPTIYHLRKKLVDSTDKADLRLIYLALAHMIKFRGHFLIEGDLNPDNSDVDKLFIQLVQTYNQLFEENPINASGVDAKAILSARLSKSRRLENLIAQLPGEKKNGLFGNLIALSLGLTPNFKSNFDLAEDAKLQLSKDTYDDDLDNLLAQIGDQYADLFLAAKNLSDAILLSDILRVNTEITKAPLSASMIKRYDEHHQDLTLLKALVRQQLPEKYKEIFFDQSKNGYAGYIDGGASQEEFYKFIKPILEKMDGTEELLVKLNREDLLRKQRTFDNGSIPHQIHLGELHAILRRQEDFYPFLKDNREKIEKILTFRIPYYVGPLARGNSRFAWMTRKSEETITPWNFEEVVDKGASAQSFIERMTNFDKNLPNEKVLPKHSLLYEYFTVYNELTKVKYVTEGMRKPAFLSGEQKKAIVDLLFKTNRKVTVKQLKEDYFKKIECFDSVEISGVEDRFNASLGTYHDLLKIIKDKDFLDNEENEDILEDIVLTLTLFEDREMIEERLKTYAHLFDDKVMKQLKRRRYTGWGRLSRKLINGIRDKQSGKTILDFLKSDGFANRNFMQLIHDDSLTFKEDIQKAQVSGQGDSLHEHIANLAGSPAIKKGILQTVKVVDELVKVMGRHKPENIVIEMARENQTTQKGQKNSRERMKRIEEGIKELGSQILKEHPVENTQLQNEKLYLYYLQNGRDMYVDQELDINRLSDYDVDHIVPQSFLKDDSIDNKVLTRSDKARGKSDNVPSEEVVKKMKNYWRQLLNAKLITQRKFDNLTKAERGGLSELDKAGFIKRQLVETRQITKHVAQILDSRMNTKYDENDKLIREVKVITLKSKLVSDFRKDFQFYKVREINNYHHAHDAYLNAVVGTALIKKYPKLESEFVYGDYKVYDVRKMIAKSEQEIGKATAKYFFYSNIMNFFKTEITLANGEIRKRPLIETNGETGEIVWDKGRDFATVRKVLSMPQVNIVKKTEVQTGGFSKESILPKRNSDKLIARKKDWDPKKYGGFDSPTVAYSVLVVAKVEKGKSKKLKSVKELLGITIMERSSFEKNPIDFLEAKGYKEVKKDLIIKLPKYSLFELENGRKRMLASAGELQKGNELALPSKYVNFLYLASHYEKLKGSPEDNEQKQLFVEQHKHYLDEIIEQISEFSKRVILADANLDKVLSAYNKHRDKPIREQAENIIHLFTLTNLGAPAAFKYFDTTIDRKRYTSTKEVLDATLIHQSITGLYETRIDLSQLGGDGGGSSGSSGSSGSSGSSGSSGGVLNLEEEYRLHEKPVPSSIDPSWLQLFPTVWAERAGMGLANQVPPVVVELRSGASPVAVRQYPMSKEAREGIRPHIQKFLDLGVLVPCRSPWNTPLLPVKKPGTNDYRPVQDLREINKRVQDIHPTVPNPYNLLSSLPPSYTWYSVLDLKDAFFCLRLHPNSQPLFAFEWKDPEKGNTGQLTWTRLPQGFKNSPTLFDEALHRDLAPFRALNPQVVLLQYVDDLLVAAPTYEDCKKGTQKLLQELSKLGYRVSAKKAQLCQREVTYLGYLLKEGKRWLTPARKATVMKIPVPTTPRQVREFLGTAGFCRLWIPGFASLAAPLYPLTKESIPFIWTEEHQQAFDHIKKALLSAPALALPDLTKPFTLYIDERAGVARGVLTQTLGPWRRPVAYLSKKLDPVASGWPTCLKAVAAVALLLKDADKLTLGQNVTVIASHSLESIVRQPPDRWMTNARMTHYQSLLLNERVSFAPPAVLNPATLLPVESEATPVHRCSEILAEETGTRRDLEDQPLPGVPTWYTDGSSFITEGKRRAGAPIVDGKRTVWASSLPEGTSAQKAELVALTQALRLAEGKNINIYTDSRYAFATAHIHGAIYKQRGLLTSAGKDIKNKEEILALLEAIHLPRRVAIIHCPGHQRGSNPVATGNRRADEAAKQAALSTRVLAGTTKPAGKRTADGSEFEKRTADGSEFESPKKKAKVE

SEQ ID NO: 1367 - protein, 2103 aa, synthetic construct
MPAAKRVKLDGGDKKYSIGLDIGTNSVGWAVITDEYKVPSKKFKVLGNTDRHSIKKNLIGALLFDSGETAEATRLKRTARRRYTRRKNRICYLQEIFSNEMAKVDDSFFHRLEESFLVEEDKKHERHPIFGNIVDEVAYHEKYPTIYHLRKKLVDSTDKADLRLIYLALAHMIKFRGHFLIEGDLNPDNSDVDKLFIQLVQTYNQLFEENPINASGVDAKAILSARLSKSRRLENLIAQLPGEKKNGLFGNLIALSLGLTPNFKSNFDLAEDAKLQLSKDTYDDDLDNLLAQIGDQYADLFLAAKNLSDAILLSDILRVNTEITKAPLSASMIKRYDEHHQDLTLLKALVRQQLPEKYKEIFFDQSKNGYAGYIDGGASQEEFYKFIKPILEKMDGTEELLVKLNREDLLRKQRTFDNGSIPHQIHLGELHAILRRQEDFYPFLKDNREKIEKILTFRIPYYVGPLARGNSRFAWMTRKSEETITPWNFEEVVDKGASAQSFIERMTNFDKNLPNEKVLPKHSLLYEYFTVYNELTKVKYVTEGMRKPAFLSGEQKKAIVDLLFKTNRKVTVKQLKEDYFKKIECFDSVEISGVEDRFNASLGTYHDLLKIIKDKDFLDNEENEDILEDIVLTLTLFEDREMIEERLKTYAHLFDDKVMKQLKRRRYTGWGRLSRKLINGIRDKQSGKTILDFLKSDGFANRNFMQLIHDDSLTFKEDIQKAQVSGQGDSLHEHIANLAGSPAIKKGILQTVKVVDELVKVMGRHKPENIVIEMARENQTTQKGQKNSRERMKRIEEGIKELGSQILKEHPVENTQLQNEKLYLYYLQNGRDMYVDQELDINRLSDYDVDHIVPQSFLKDDSIDNKVLTRSDKARGKSDNVPSEEVVKKMKNYWRQLLNAKLITQRKFDNLTKAERGGLSELDKAGFIKRQLVETRQITKHVAQILDSRMNTKYDENDKLIREVKVITLKSKLVSDFRKDFQFYKVREINNYHHAHDAYLNAVVGTALIKKYPKLESEFVYGDYKVYDVRKMIAKSEQEIGKATAKYFFYSNIMNFFKTEITLANGEIRKRPLIETNGETGEIVWDKGRDFATVRKVLSMPQVNIVKKTEVQTGGFSKESILPKRNSDKLIARKKDWDPKKYGGFDSPTVAYSVLVVAKVEKGKSKKLKSVKELLGITIMERSSFEKNPIDFLEAKGYKEVKKDLIIKLPKYSLFELENGRKRMLASAGELQKGNELALPSKYVNFLYLASHYEKLKGSPEDNEQKQLFVEQHKHYLDEIIEQISEFSKRVILADANLDKVLSAYNKHRDKPIREQAENIIHLFTLTNLGAPAAFKYFDTTIDRKRYTSTKEVLDATLIHQSITGLYETRIDLSQLGGDGGEAAAKEAAAKEAAAKEAAAKGGVLNLEEEYRLHEKPVPSSIDPSWLQLFPTVWAERAGMGLANQVPPVVVELRSGASPVAVRQYPMSKEAREGIRPHIQKFLDLGVLVPCRSPWNTPLLPVKKPGTNDYRPVQDLREINKRVQDIHPTVPNPYNLLSSLPPSYTWYSVLDLKDAFFCLRLHPNSQPLFAFEWKDPEKGNTGQLTWTRLPQGFKNSPTLFDEALHRDLAPFRALNPQVVLLQYVDDLLVAAPTYEDCKKGTQKLLQELSKLGYRVSAKKAQLCQREVTYLGYLLKEGKRWLTPARKATVMKIPVPTTPRQVREFLGTAGFCRLWIPGFASLAAPLYPLTKESIPFIWTEEHQQAFDHIKKALLSAPALALPDLTKPFTLYIDERAGVARGVLTQTLGPWRRPVAYLSKKLDPVASGWPTCLKAVAAVALLLKDADKLTLGQNVTVIASHSLESIVRQPPDRWMTNARMTHYQSLLLNERVSFAPPAVLNPATLLPVESEATPVHRCSEILAEETGTRRDLEDQPLPGVPTWYTDGSSFITEGKRRAGAPIVDGKRTVWASSLPEGTSAQKAELVALTQALRLAEGKNINIYTDSRYAFATAHIHGAIYKQRGLLTSAGKDIKNKEEILALLEAIHLPRRVAIIHCPGHQRGSNPVATGNRRADEAAKQAALSTRVLAGTTKPAGKRTADGSEFEKRTADGSEFESPKKKAKVE

SEQ ID NO: 1368 - protein, 2098 aa, synthetic construct
MPAAKRVKLDGGDKKYSIGLDIGTNSVGWAVITDEYKVPSKKFKVLGNTDRHSIKKNLIGALLFDSGETAEATRLKRTARRRYTRRKNRICYLQEIFSNEMAKVDDSFFHRLEESFLVEEDKKHERHPIFGNIVDEVAYHEKYPTIYHLRKKLVDSTDKADLRLIYLALAHMIKFRGHFLIEGDLNPDNSDVDKLFIQLVQTYNQLFEENPINASGVDAKAILSARLSKSRRLENLIAQLPGEKKNGLFGNLIALSLGLTPNFKSNFDLAEDAKLQLSKDTYDDDLDNLLAQIGDQYADLFLAAKNLSDAILLSDILRVNTEITKAPLSASMIKRYDEHHQDLTLLKALVRQQLPEKYKEIFFDQSKNGYAGYIDGGASQEEFYKFIKPILEKMDGTEELLVKLNREDLLRKQRTFDNGSIPHQIHLGELHAILRRQEDFYPFLKDNREKIEKILTFRIPYYVGPLARGNSRFAWMTRKSEETITPWNFEEVVDKGASAQSFIERMTNFDKNLPNEKVLPKHSLLYEYFTVYNELTKVKYVTEGMRKPAFLSGEQKKAIVDLLFKTNRKVTVKQLKEDYFKKIECFDSVEISGVEDRFNASLGTYHDLLKIIKDKDFLDNEENEDILEDIVLTLTLFEDREMIEERLKTYAHLFDDKVMKQLKRRRYTGWGRLSRKLINGIRDKQSGKTILDFLKSDGFANRNFMQLIHDDSLTFKEDIQKAQVSGQGDSLHEHIANLAGSPAIKKGILQTVKVVDELVKVMGRHKPENIVIEMARENQTTQKGQKNSRERMKRIEEGIKELGSQILKEHPVENTQLQNEKLYLYYLQNGRDMYVDQELDINRLSDYDVDHIVPQSFLKDDSIDNKVLTRSDKARGKSDNVPSEEVVKKMKNYWRQLLNAKLITQRKFDNLTKAERGGLSELDKAGFIKRQLVETRQITKHVAQILDSRMNTKYDENDKLIREVKVITLKSKLVSDFRKDFQFYKVREINNYHHAHDAYLNAVVGTALIKKYPKLESEFVYGDYKVYDVRKMIAKSEQEIGKATAKYFFYSNIMNFFKTEITLANGEIRKRPLIETNGETGEIVWDKGRDFATVRKVLSMPQVNIVKKTEVQTGGFSKESILPKRNSDKLIARKKDWDPKKYGGFDSPTVAYSVLVVAKVEKGKSKKLKSVKELLGITIMERSSFEKNPIDFLEAKGYKEVKKDLIIKLPKYSLFELENGRKRMLASAGELQKGNELALPSKYVNFLYLASHYEKLKGSPEDNEQKQLFVEQHKHYLDEIIEQISEFSKRVILADANLDKVLSAYNKHRDKPIREQAENIIHLFTLTNLGAPAAFKYFDTTIDRKRYTSTKEVLDATLIHQSITGLYETRIDLSQLGGDGGGSSGSSGSSGSSGSSGGVLNLEEEYRLHEKPVPSSIDPSWLQLFPTVWAERAGMGLANQVPPVVVELRSGASPVAVRQYPMSKEAREGIRPHIQKFLDLGVLVPCRSPWNTPLLPVKKPGTNDYRPVQDLREINKRVQDIHPTVPNPYNLLSSLPPSYTWYSVLDLKDAFFCLRLHPNSQPLFAFEWKDPEKGNTGQLTWTRLPQGFKNSPTLFDEALHRDLAPFRALNPQVVLLQYVDDLLVAAPTYEDCKKGTQKLLQELSKLGYRVSAKKAQLCQREVTYLGYLLKEGKRWLTPARKATVMKIPVPTTPRQVREFLGTAGFCRLWIPGFASLAAPLYPLTKESIPFIWTEEHQQAFDHIKKALLSAPALALPDLTKPFTLYIDERAGVARGVLTQTLGPWRRPVAYLSKKLDPVASGWPTCLKAVAAVALLLKDADKLTLGQNVTVIASHSLESIVRQPPDRWMTNARMTHYQSLLLNERVSFAPPAVLNPATLLPVESEATPVHRCSEILAEETGTRRDLEDQPLPGVPTWYTDGSSFITEGKRRAGAPIVDGKRTVWASSLPEGTSAQKAELVALTQALRLAEGKNINIYTDSRYAFATAHIHGAIYKQRGLLTSAGKDIKNKEEILALLEAIHLPRRVAIIHCPGHQRGSNPVATGNRRADEAAKQAALSTRVLAGTTKPAGKRTADGSEFEKRTADGSEFESPKKKAKVE

SEQ ID NO: 1369 - protein, 2094 aa, synthetic construct
MPAAKRVKLDGGDKKYSIGLDIGTNSVGWAVITDEYKVPSKKFKVLGNTDRHSIKKNLIGALLFDSGETAEATRLKRTARRRYTRRKNRICYLQEIFSNEMAKVDDSFFHRLEESFLVEEDKKHERHPIFGNIVDEVAYHEKYPTIYHLRKKLVDSTDKADLRLIYLALAHMIKFRGHFLIEGDLNPDNSDVDKLFIQLVQTYNQLFEENPINASGVDAKAILSARLSKSRRLENLIAQLPGEKKNGLFGNLIALSLGLTPNFKSNFDLAEDAKLQLSKDTYDDDLDNLLAQIGDQYADLFLAAKNLSDAILLSDILRVNTEITKAPLSASMIKRYDEHHQDLTLLKALVRQQLPEKYKEIFFDQSKNGYAGYIDGGASQEEFYKFIKPILEKMDGTEELLVKLNREDLLRKQRTFDNGSIPHQIHLGELHAILRRQEDFYPFLKDNREKIEKILTFRIPYYVGPLARGNSRFAWMTRKSEETITPWNFEEVVDKGASAQSFIERMTNFDKNLPNEKVLPKHSLLYEYFTVYNELTKVKYVTEGMRKPAFLSGEQKKAIVDLLFKTNRKVTVKQLKEDYFKKIECFDSVEISGVEDRFNASLGTYHDLLKIIKDKDFLDNEENEDILEDIVLTLTLFEDREMIEERLKTYAHLFDDKVMKQLKRRRYTGWGRLSRKLINGIRDKQSGKTILDFLKSDGFANRNFMQLIHDDSLTFKEDIQKAQVSGQGDSLHEHIANLAGSPAIKKGILQTVKVVDELVKVMGRHKPENIVIEMARENQTTQKGQKNSRERMKRIEEGIKELGSQILKEHPVENTQLQNEKLYLYYLQNGRDMYVDQELDINRLSDYDVDHIVPQSFLKDDSIDNKVLTRSDKARGKSDNVPSEEVVKKMKNYWRQLLNAKLITQRKFDNLTKAERGGLSELDKAGFIKRQLVETRQITKHVAQILDSRMNTKYDENDKLIREVKVITLKSKLVSDFRKDFQFYKVREINNYHHAHDAYLNAVVGTALIKKYPKLESEFVYGDYKVYDVRKMIAKSEQEIGKATAKYFFYSNIMNFFKTEITLANGEIRKRPLIETNGETGEIVWDKGRDFATVRKVLSMPQVNIVKKTEVQTGGFSKESILPKRNSDKLIARKKDWDPKKYGGFDSPTVAYSVLVVAKVEKGKSKKLKSVKELLGITIMERSSFEKNPIDFLEAKGYKEVKKDLIIKLPKYSLFELENGRKRMLASAGELQKGNELALPSKYVNFLYLASHYEKLKGSPEDNEQKQLFVEQHKHYLDEIIEQISEFSKRVILADANLDKVLSAYNKHRDKPIREQAENIIHLFTLTNLGAPAAFKYFDTTIDRKRYTSTKEVLDATLIHQSITGLYETRIDLSQLGGDGGEAAAKGSSGGSGGVLNLEEEYRLHEKPVPSSIDPSWLQLFPTVWAERAGMGLANQVPPVVVELRSGASPVAVRQYPMSKEAREGIRPHIQKFLDLGVLVPCRSPWNTPLLPVKKPGTNDYRPVQDLREINKRVQDIHPTVPNPYNLLSSLPPSYTWYSVLDLKDAFFCLRLHPNSQPLFAFEWKDPEKGNTGQLTWTRLPQGFKNSPTLFDEALHRDLAPFRALNPQVVLLQYVDDLLVAAPTYEDCKKGTQKLLQELSKLGYRVSAKKAQLCQREVTYLGYLLKEGKRWLTPARKATVMKIPVPTTPRQVREFLGTAGFCRLWIPGFASLAAPLYPLTKESIPFIWTEEHQQAFDHIKKALLSAPALALPDLTKPFTLYIDERAGVARGVLTQTLGPWRRPVAYLSKKLDPVASGWPTCLKAVAAVALLLKDADKLTLGQNVTVIASHSLESIVRQPPDRWMTNARMTHYQSLLLNERVSFAPPAVLNPATLLPVESEATPVHRCSEILAEETGTRRDLEDQPLPGVPTWYTDGSSFITEGKRRAGAPIVDGKRTVWASSLPEGTSAQKAELVALTQALRLAEGKNINIYTDSRYAFATAHIHGAIYKQRGLLTSAGKDIKNKEEILALLEAIHLPRRVAIIHCPGHQRGSNPVATGNRRADEAAKQAALSTRVLAGTTKPAGKRTADGSEFEKRTADGSEFESPKKKAKVE

SEQ ID NO: 1370 - protein, 2129 aa, synthetic construct
MPAAKRVKLDGGDKKYSIGLDIGTNSVGWAVITDEYKVPSKKFKVLGNTDRHSIKKNLIGALLFDSGETAEATRLKRTARRRYTRRKNRICYLQEIFSNEMAKVDDSFFHRLEESFLVEEDKKHERHPIFGNIVDEVAYHEKYPTIYHLRKKLVDSTDKADLRLIYLALAHMIKFRGHFLIEGDLNPDNSDVDKLFIQLVQTYNQLFEENPINASGVDAKAILSARLSKSRRLENLIAQLPGEKKNGLFGNLIALSLGLTPNFKSNFDLAEDAKLQLSKDTYDDDLDNLLAQIGDQYADLFLAAKNLSDAILLSDILRVNTEITKAPLSASMIKRYDEHHQDLTLLKALVRQQLPEKYKEIFFDQSKNGYAGYIDGGASQEEFYKFIKPILEKMDGTEELLVKLNREDLLRKQRTFDNGSIPHQIHLGELHAILRRQEDFYPFLKDNREKIEKILTFRIPYYVGPLARGNSRFAWMTRKSEETITPWNFEEVVDKGASAQSFIERMTNFDKNLPNEKVLPKHSLLYEYFTVYNELTKVKYVTEGMRKPAFLSGEQKKAIVDLLFKTNRKVTVKQLKEDYFKKIECFDSVEISGVEDRFNASLGTYHDLLKIIKDKDFLDNEENEDILEDIVLTLTLFEDREMIEERLKTYAHLFDDKVMKQLKRRRYTGWGRLSRKLINGIRDKQSGKTILDFLKSDGFANRNFMQLIHDDSLTFKEDIQKAQVSGQGDSLHEHIANLAGSPAIKKGILQTVKVVDELVKVMGRHKPENIVIEMARENQTTQKGQKNSRERMKRIEEGIKELGSQILKEHPVENTQLQNEKLYLYYLQNGRDMYVDQELDINRLSDYDVDHIVPQSFLKDDSIDNKVLTRSDKARGKSDNVPSEEVVKKMKNYWRQLLNAKLITQRKFDNLTKAERGGLSELDKAGFIKRQLVETRQITKHVAQILDSRMNTKYDENDKLIREVKVITLKSKLVSDFRKDFQFYKVREINNYHHAHDAYLNAVVGTALIKKYPKLESEFVYGDYKVYDVRKMIAKSEQEIGKATAKYFFYSNIMNFFKTEITLANGEIRKRPLIETNGETGEIVWDKGRDFATVRKVLSMPQVNIVKKTEVQTGGFSKESILPKRNSDKLIARKKDWDPKKYGGFDSPTVAYSVLVVAKVEKGKSKKLKSVKELLGITIMERSSFEKNPIDFLEAKGYKEVKKDLIIKLPKYSLFELENGRKRMLASAGELQKGNELALPSKYVNFLYLASHYEKLKGSPEDNEQKQLFVEQHKHYLDEIIEQISEFSKRVILADANLDKVLSAYNKHRDKPIREQAENIIHLFTLTNLGAPAAFKYFDTTIDRKRYTSTKEVLDATLIHQSITGLYETRIDLSQLGGDGGAEAAAKEAAAKEAAAKEAAAKALEAEAAAKEAAAKEAAAKEAAAKAGGVLNLEEEYRLHEKPVPSSIDPSWLQLFPTVWAERAGMGLANQVPPVVVELRSGASPVAVRQYPMSKEAREGIRPHIQKFLDLGVLVPCRSPWNTPLLPVKKPGTNDYRPVQDLREINKRVQDIHPTVPNPYNLLSSLPPSYTWYSVLDLKDAFFCLRLHPNSQPLFAFEWKDPEKGNTGQLTWTRLPQGFKNSPTLFNEALHRDLAPFRALNPQVVLLQYVDDLLVAAPTYEDCKKGTQKLLQELSKLGYRVSAKKAQLCQREVTYLGYLLKEGKRWLTPARKATVMKIPVPTTPRQVREFLGTAGFCRLWIPGFASLAAPLYPLTKPSIPFIWTEEHQQAFDHIKKALLSAPALALPDLTKPFTLYIDERAGVARGVLTQTLGPWRRPVAYLSKKLDPVASGWPTCLKAVAAVALLLKDADKLTLGQNVTVIASHSLESIVRQPPDRWMTNARMTHYQSLLLNERVSFAPPAVLNPATLLPVESEATPVHRCSEILAEETGTRRDLEDQPLPGVPTWYTDGSSFITEGKRRAGAPIVDGKRTVWASSLPEGTSAQKAELVALTQALRLAEGKNINIYTDSRYAFATAHIHGAIYKQRGWLTSAGKDIKNKEEILALLEAIHLPRRVAIIHCPGHQRGSNPVATGNRRADEAAKQAALSTRVLAGTTKPAGKRTADGSEFEKRTADGSEFESPKKKAKVE

SEQ ID NO: 1371 - protein, 2098 aa, synthetic construct
MPAAKRVKLDGGDKKYSIGLDIGTNSVGWAVITDEYKVPSKKFKVLGNTDRHSIKKNLIGALLFDSGETAEATRLKRTARRRYTRRKNRICYLQEIFSNEMAKVDDSFFHRLEESFLVEEDKKHERHPIFGNIVDEVAYHEKYPTIYHLRKKLVDSTDKADLRLIYLALAHMIKFRGHFLIEGDLNPDNSDVDKLFIQLVQTYNQLFEENPINASGVDAKAILSARLSKSRRLENLIAQLPGEKKNGLFGNLIALSLGLTPNFKSNFDLAEDAKLQLSKDTYDDDLDNLLAQIGDQYADLFLAAKNLSDAILLSDILRVNTEITKAPLSASMIKRYDEHHQDLTLLKALVRQQLPEKYKEIFFDQSKNGYAGYIDGGASQEEFYKFIKPILEKMDGTEELLVKLNREDLLRKQRTFDNGSIPHQIHLGELHAILRRQEDFYPFLKDNREKIEKILTFRIPYYVGPLARGNSRFAWMTRKSEETITPWNFEEVVDKGASAQSFIERMTNFDKNLPNEKVLPKHSLLYEYFTVYNELTKVKYVTEGMRKPAFLSGEQKKAIVDLLFKTNRKVTVKQLKEDYFKKIECFDSVEISGVEDRFNASLGTYHDLLKIIKDKDFLDNEENEDILEDIVLTLTLFEDREMIEERLKTYAHLFDDKVMKQLKRRRYTGWGRLSRKLINGIRDKQSGKTILDFLKSDGFANRNFMQLIHDDSLTFKEDIQKAQVSGQGDSLHEHIANLAGSPAIKKGILQTVKVVDELVKVMGRHKPENIVIEMARENQTTQKGQKNSRERMKRIEEGIKELGSQILKEHPVENTQLQNEKLYLYYLQNGRDMYVDQELDINRLSDYDVDHIVPQSFLKDDSIDNKVLTRSDKARGKSDNVPSEEVVKKMKNYWRQLLNAKLITQRKFDNLTKAERGGLSELDKAGFIKRQLVETRQITKHVAQILDSRMNTKYDENDKLIREVKVITLKSKLVSDFRKDFQFYKVREINNYHHAHDAYLNAVVGTALIKKYPKLESEFVYGDYKVYDVRKMIAKSEQEIGKATAKYFFYSNIMNFFKTEITLANGEIRKRPLIETNGETGEIVWDKGRDFATVRKVLSMPQVNIVKKTEVQTGGFSKESILPKRNSDKLIARKKDWDPKKYGGFDSPTVAYSVLVVAKVEKGKSKKLKSVKELLGITIMERSSFEKNPIDFLEAKGYKEVKKDLIIKLPKYSLFELENGRKRMLASAGELQKGNELALPSKYVNFLYLASHYEKLKGSPEDNEQKQLFVEQHKHYLDEIIEQISEFSKRVILADANLDKVLSAYNKHRDKPIREQAENIIHLFTLTNLGAPAAFKYFDTTIDRKRYTSTKEVLDATLIHQSITGLYETRIDLSQLGGDGGPAPGGSEAAAKGGTAPLEEEYRLFLEAPIQNVTLLEQWKREIPKVWAEINPPGLASTQAPIHVQLLSTALPVRVRQYPITLEAKRSLRETIRKFRAAGILRPVHSPWNTPLLPVRKSGTSEYRMVQDLREVNKRVETIHPTVPNPYTLLSLLPPDRIWYSVLDLKDAFFCIPLAPESQLIFAFEWADAEEGESGQLTWTRLPQGFKNSPTLFNEALNRDLQGFRLDHPSVSLLQYVDDLLIAADTQAACLSATRDLLMTLAELGYRVSGKKAQLCQEEVTYLGFKIHKGSRSLSNSRTQAILQIPVPKTKRQVREFLGKIGYCRLFIPGFAELAQPLYAATRPGNDPLVWGEKEEEAFQSLKLALTQPPALALPSLDKPFQLFVEETSGAAKGVLTQALGPWKRPVAYLSKRLDPVAAGWPRCLRAIAAAALLTREASKLTFGQDIEITSSHNLESLLRSPPDKWLTNARITQYQVLLLDPPRVRFKQTAALNPATLLPETDDTLPIHHCLDTLDSLTSTRPDLTDQPLAQAEATLFTDGSSYIRDGKRYAGAAVVTLDSVIWAEPLPIGTSAQKAELIALTKALEWSKDKSVNIYTDSRYAFATLHVHGMIYRERGWLTAGGKAIKNAPEILALLTAVWLPKRVAVMHCKGHQKDDAPTSTGNRRADEVAREVAIRPLSTQATISAGKRTADGSEFEKRTADGSEFESPKKKAKVE

SEQ ID NO: 1372 - protein, 2133 aa, synthetic construct
MPAAKRVKLDGGDKKYSIGLDIGTNSVGWAVITDEYKVPSKKFKVLGNTDRHSIKKNLIGALLFDSGETAEATRLKRTARRRYTRRKNRICYLQEIFSNEMAKVDDSFFHRLEESFLVEEDKKHERHPIFGNIVDEVAYHEKYPTIYHLRKKLVDSTDKADLRLIYLALAHMIKFRGHFLIEGDLNPDNSDVDKLFIQLVQTYNQLFEENPINASGVDAKAILSARLSKSRRLENLIAQLPGEKKNGLFGNLIALSLGLTPNFKSNFDLAEDAKLQLSKDTYDDDLDNLLAQIGDQYADLFLAAKNLSDAILLSDILRVNTEITKAPLSASMIKRYDEHHQDLTLLKALVRQQLPEKYKEIFFDQSKNGYAGYIDGGASQEEFYKFIKPILEKMDGTEELLVKLNREDLLRKQRTFDNGSIPHQIHLGELHAILRRQEDFYPFLKDNREKIEKILTFRIPYYVGPLARGNSRFAWMTRKSEETITPWNFEEVVDKGASAQSFIERMTNFDKNLPNEKVLPKHSLLYEYFTVYNELTKVKYVTEGMRKPAFLSGEQKKAIVDLLFKTNRKVTVKQLKEDYFKKIECFDSVEISGVEDRFNASLGTYHDLLKIIKDKDFLDNEENEDILEDIVLTLTLFEDREMIEERLKTYAHLFDDKVMKQLKRRRYTGWGRLSRKLINGIRDKQSGKTILDFLKSDGFANRNFMQLIHDDSLTFKEDIQKAQVSGQGDSLHEHIANLAGSPAIKKGILQTVKVVDELVKVMGRHKPENIVIEMARENQTTQKGQKNSRERMKRIEEGIKELGSQILKEHPVENTQLQNEKLYLYYLQNGRDMYVDQELDINRLSDYDVDHIVPQSFLKDDSIDNKVLTRSDKARGKSDNVPSEEVVKKMKNYWRQLLNAKLITQRKFDNLTKAERGGLSELDKAGFIKRQLVETRQITKHVAQILDSRMNTKYDENDKLIREVKVITLKSKLVSDFRKDFQFYKVREINNYHHAHDAYLNAVVGTALIKKYPKLESEFVYGDYKVYDVRKMIAKSEQEIGKATAKYFFYSNIMNFFKTEITLANGEIRKRPLIETNGETGEIVWDKGRDFATVRKVLSMPQVNIVKKTEVQTGGFSKESILPKRNSDKLIARKKDWDPKKYGGFDSPTVAYSVLVVAKVEKGKSKKLKSVKELLGITIMERSSFEKNPIDFLEAKGYKEVKKDLIIKLPKYSLFELENGRKRMLASAGELQKGNELALPSKYVNFLYLASHYEKLKGSPEDNEQKQLFVEQHKHYLDEIIEQISEFSKRVILADANLDKVLSAYNKHRDKPIREQAENIIHLFTLTNLGAPAAFKYFDTTIDRKRYTSTKEVLDATLIHQSITGLYETRIDLSQLGGDGGAEAAAKEAAAKEAAAKEAAAKALEAEAAAKEAAAKEAAAKEAAAKAGGTAPLEEEYRLFLEAPIQNVTLLEQWKREIPKVWAEINPPGLASTQAPIHVQLLSTALPVRVRQYPITLEAKRSLRETIRKFRAAGILRPVHSPWNTPLLPVRKSGTSEYRMVQDLREVNKRVETIHPTVPNPYTLLSLLPPDRIWYSVLDLKDAFFCIPLAPESQLIFAFEWADAEEGESGQLTWTRLPQGFKNSPTLFNEALNRDLQGFRLDHPSVSLLQYVDDLLIAADTQAACLSATRDLLMTLAELGYRVSGKKAQLCQEEVTYLGFKIHKGSRSLSNSRTQAILQIPVPKTKRQVREFLGKIGYCRLFIPGFAELAQPLYAATRPGNDPLVWGEKEEEAFQSLKLALTQPPALALPSLDKPFQLFVEETSGAAKGVLTQALGPWKRPVAYLSKRLDPVAAGWPRCLRAIAAAALLTREASKLTFGQDIEITSSHNLESLLRSPPDKWLTNARITQYQVLLLDPPRVRFKQTAALNPATLLPETDDTLPIHHCLDTLDSLTSTRPDLTDQPLAQAEATLFTDGSSYIRDGKRYAGAAVVTLDSVIWAEPLPIGTSAQKAELIALTKALEWSKDKSVNIYTDSRYAFATLHVHGMIYRERGWLTAGGKAIKNAPEILALLTAVWLPKRVAVMHCKGHQKDDAPTSTGNRRADEVAREVAIRPLSTQATISAGKRTADGSEFEKRTADGSEFESPKKKAKVE

SEQ ID NO: 1373 - protein, 2117 aa, synthetic construct
MPAAKRVKLDGGDKKYSIGLDIGTNSVGWAVITDEYKVPSKKFKVLGNTDRHSIKKNLIGALLFDSGETAEATRLKRTARRRYTRRKNRICYLQEIFSNEMAKVDDSFFHRLEESFLVEEDKKHERHPIFGNIVDEVAYHEKYPTIYHLRKKLVDSTDKADLRLIYLALAHMIKFRGHFLIEGDLNPDNSDVDKLFIQLVQTYNQLFEENPINASGVDAKAILSARLSKSRRLENLIAQLPGEKKNGLFGNLIALSLGLTPNFKSNFDLAEDAKLQLSKDTYDDDLDNLLAQIGDQYADLFLAAKNLSDAILLSDILRVNTEITKAPLSASMIKRYDEHHQDLTLLKALVRQQLPEKYKEIFFDQSKNGYAGYIDGGASQEEFYKFIKPILEKMDGTEELLVKLNREDLLRKQRTFDNGSIPHQIHLGELHAILRRQEDFYPFLKDNREKIEKILTFRIPYYVGPLARGNSRFAWMTRKSEETITPWNFEEVVDKGASAQSFIERMTNFDKNLPNEKVLPKHSLLYEYFTVYNELTKVKYVTEGMRKPAFLSGEQKKAIVDLLFKTNRKVTVKQLKEDYFKKIECFDSVEISGVEDRFNASLGTYHDLLKIIKDKDFLDNEENEDILEDIVLTLTLFEDREMIEERLKTYAHLFDDKVMKQLKRRRYTGWGRLSRKLINGIRDKQSGKTILDFLKSDGFANRNFMQLIHDDSLTFKEDIQKAQVSGQGDSLHEHIANLAGSPAIKKGILQTVKVVDELVKVMGRHKPENIVIEMARENQTTQKGQKNSRERMKRIEEGIKELGSQILKEHPVENTQLQNEKLYLYYLQNGRDMYVDQELDINRLSDYDVDHIVPQSFLKDDSIDNKVLTRSDKARGKSDNVPSEEVVKKMKNYWRQLLNAKLITQRKFDNLTKAERGGLSELDKAGFIKRQLVETRQITKHVAQILDSRMNTKYDENDKLIREVKVITLKSKLVSDFRKDFQFYKVREINNYHHAHDAYLNAVVGTALIKKYPKLESEFVYGDYKVYDVRKMIAKSEQEIGKATAKYFFYSNIMNFFKTEITLANGEIRKRPLIETNGETGEIVWDKGRDFATVRKVLSMPQVNIVKKTEVQTGGFSKESILPKRNSDKLIARKKDWDPKKYGGFDSPTVAYSVLVVAKVEKGKSKKLKSVKELLGITIMERSSFEKNPIDFLEAKGYKEVKKDLIIKLPKYSLFELENGRKRMLASAGELQKGNELALPSKYVNFLYLASHYEKLKGSPEDNEQKQLFVEQHKHYLDEIIEQISEFSKRVILADANLDKVLSAYNKHRDKPIREQAENIIHLFTLTNLGAPAAFKYFDTTIDRKRYTSTKEVLDATLIHQSITGLYETRIDLSQLGGDGGGGGGSGGGGSGGGGSGGGGSGGGGSGGGGSGGTAPLEEEYRLFLEAPIQNVTLLEQWKREIPKVWAEINPPGLASTQAPIHVQLLSTALPVRVRQYPITLEAKRSLRETIRKFRAAGILRPVHSPWNTPLLPVRKSGTSEYRMVQDLREVNKRVETIHPTVPNPYTLLSLLPPDRIWYSVLDLKDAFFCIPLAPESQLIFAFEWADAEEGESGQLTWTRLPQGFKNSPTLFNEALNRDLQGFRLDHPSVSLLQYVDDLLIAADTQAACLSATRDLLMTLAELGYRVSGKKAQLCQEEVTYLGFKIHKGSRSLSNSRTQAILQIPVPKTKRQVREFLGKIGYCRLFIPGFAELAQPLYAATRPGNDPLVWGEKEEEAFQSLKLALTQPPALALPSLDKPFQLFVEETSGAAKGVLTQALGPWKRPVAYLSKRLDPVAAGWPRCLRAIAAAALLTREASKLTFGQDIEITSSHNLESLLRSPPDKWLTNARITQYQVLLLDPPRVRFKQTAALNPATLLPETDDTLPIHHCLDTLDSLTSTRPDLTDQPLAQAEATLFTDGSSYIRDGKRYAGAAVVTLDSVIWAEPLPIGTSAQKAELIALTKALEWSKDKSVNIYTDSRYAFATLHVHGMIYRERGWLTAGGKAIKNAPEILALLTAVWLPKRVAVMHCKGHQKDDAPTSTGNRRADEVAREVAIRPLSTQATISAGKRTADGSEFEKRTADGSEFESPKKKAKVE

SEQ ID NO: 1374 - protein, 2107 aa, synthetic construct
MPAAKRVKLDGGDKKYSIGLDIGTNSVGWAVITDEYKVPSKKFKVLGNTDRHSIKKNLIGALLFDSGETAEATRLKRTARRRYTRRKNRICYLQEIFSNEMAKVDDSFFHRLEESFLVEEDKKHERHPIFGNIVDEVAYHEKYPTIYHLRKKLVDSTDKADLRLIYLALAHMIKFRGHFLIEGDLNPDNSDVDKLFIQLVQTYNQLFEENPINASGVDAKAILSARLSKSRRLENLIAQLPGEKKNGLFGNLIALSLGLTPNFKSNFDLAEDAKLQLSKDTYDDDLDNLLAQIGDQYADLFLAAKNLSDAILLSDILRVNTEITKAPLSASMIKRYDEHHQDLTLLKALVRQQLPEKYKEIFFDQSKNGYAGYIDGGASQEEFYKFIKPILEKMDGTEELLVKLNREDLLRKQRTFDNGSIPHQIHLGELHAILRRQEDFYPFLKDNREKIEKILTFRIPYYVGPLARGNSRFAWMTRKSEETITPWNFEEVVDKGASAQSFIERMTNFDKNLPNEKVLPKHSLLYEYFTVYNELTKVKYVTEGMRKPAFLSGEQKKAIVDLLFKTNRKVTVKQLKEDYFKKIECFDSVEISGVEDRFNASLGTYHDLLKIIKDKDFLDNEENEDILEDIVLTLTLFEDREMIEERLKTYAHLFDDKVMKQLKRRRYTGWGRLSRKLINGIRDKQSGKTILDFLKSDGFANRNFMQLIHDDSLTFKEDIQKAQVSGQGDSLHEHIANLAGSPAIKKGILQTVKVVDELVKVMGRHKPENIVIEMARENQTTQKGQKNSRERMKRIEEGIKELGSQILKEHPVENTQLQNEKLYLYYLQNGRDMYVDQELDINRLSDYDVDHIVPQSFLKDDSIDNKVLTRSDKARGKSDNVPSEEVVKKMKNYWRQLLNAKLITQRKFDNLTKAERGGLSELDKAGFIKRQLVETRQITKHVAQILDSRMNTKYDENDKLIREVKVITLKSKLVSDFRKDFQFYKVREINNYHHAHDAYLNAVVGTALIKKYPKLESEFVYGDYKVYDVRKMIAKSEQEIGKATAKYFFYSNIMNFFKTEITLANGEIRKRPLIETNGETGEIVWDKGRDFATVRKVLSMPQVNIVKKTEVQTGGFSKESILPKRNSDKLIARKKDWDPKKYGGFDSPTVAYSVLVVAKVEKGKSKKLKSVKELLGITIMERSSFEKNPIDFLEAKGYKEVKKDLIIKLPKYSLFELENGRKRMLASAGELQKGNELALPSKYVNFLYLASHYEKLKGSPEDNEQKQLFVEQHKHYLDEIIEQISEFSKRVILADANLDKVLSAYNKHRDKPIREQAENIIHLFTLTNLGAPAAFKYFDTTIDRKRYTSTKEVLDATLIHQSITGLYETRIDLSQLGGDGGGGGGSGGGGSGGGGSGGGGSGGTAPLEEEYRLFLEAPIQNVTLLEQWKREIPKVWAEINPPGLASTQAPIHVQLLSTALPVRVRQYPITLEAKRSLRETIRKFRAAGILRPVHSPWNTPLLPVRKSGTSEYRMVQDLREVNKRVETIHPTVPNPYTLLSLLPPDRIWYSVLDLKDAFFCIPLAPESQLIFAFEWADAEEGESGQLTWTRLPQGFKNSPTLFNEALNRDLQGFRLDHPSVSLLQYVDDLLIAADTQAACLSATRDLLMTLAELGYRVSGKKAQLCQEEVTYLGFKIHKGSRSLSNSRTQAILQIPVPKTKRQVREFLGKIGYCRLFIPGFAELAQPLYAATRPGNDPLVWGEKEEEAFQSLKLALTQPPALALPSLDKPFQLFVEETSGAAKGVLTQALGPWKRPVAYLSKRLDPVAAGWPRCLRAIAAAALLTREASKLTFGQDIEITSSHNLESLLRSPPDKWLTNARITQYQVLLLDPPRVRFKQTAALNPATLLPETDDTLPIHHCLDTLDSLTSTRPDLTDQPLAQAEATLFTDGSSYIRDGKRYAGAAVVTLDSVIWAEPLPIGTSAQKAELIALTKALEWSKDKSVNIYTDSRYAFATLHVHGMIYRERGWLTAGGKAIKNAPEILALLTAVWLPKRVAVMHCKGHQKDDAPTSTGNRRADEVAREVAIRPLSTQATISAGKRTADGSEFEKRTADGSEFESPKKKAKVE

SEQ ID NO: 1375 - protein, 2093 aa, synthetic construct
MPAAKRVKLDGGDKKYSIGLDIGTNSVGWAVITDEYKVPSKKFKVLGNTDRHSIKKNLIGALLFDSGETAEATRLKRTARRRYTRRKNRICYLQEIFSNEMAKVDDSFFHRLEESFLVEEDKKHERHPIFGNIVDEVAYHEKYPTIYHLRKKLVDSTDKADLRLIYLALAHMIKFRGHFLIEGDLNPDNSDVDKLFIQLVQTYNQLFEENPINASGVDAKAILSARLSKSRRLENLIAQLPGEKKNGLFGNLIALSLGLTPNFKSNFDLAEDAKLQLSKDTYDDDLDNLLAQIGDQYADLFLAAKNLSDAILLSDILRVNTEITKAPLSASMIKRYDEHHQDLTLLKALVRQQLPEKYKEIFFDQSKNGYAGYIDGGASQEEFYKFIKPILEKMDGTEELLVKLNREDLLRKQRTFDNGSIPHQIHLGELHAILRRQEDFYPFLKDNREKIEKILTFRIPYYVGPLARGNSRFAWMTRKSEETITPWNFEEVVDKGASAQSFIERMTNFDKNLPNEKVLPKHSLLYEYFTVYNELTKVKYVTEGMRKPAFLSGEQKKAIVDLLFKTNRKVTVKQLKEDYFKKIECFDSVEISGVEDRFNASLGTYHDLLKIIKDKDFLDNEENEDILEDIVLTLTLFEDREMIEERLKTYAHLFDDKVMKQLKRRRYTGWGRLSRKLINGIRDKQSGKTILDFLKSDGFANRNFMQLIHDDSLTFKEDIQKAQVSGQGDSLHEHIANLAGSPAIKKGILQTVKVVDELVKVMGRHKPENIVIEMARENQTTQKGQKNSRERMKRIEEGIKELGSQILKEHPVENTQLQNEKLYLYYLQNGRDMYVDQELDINRLSDYDVDHIVPQSFLKDDSIDNKVLTRSDKARGKSDNVPSEEVVKKMKNYWRQLLNAKLITQRKFDNLTKAERGGLSELDKAGFIKRQLVETRQITKHVAQILDSRMNTKYDENDKLIREVKVITLKSKLVSDFRKDFQFYKVREINNYHHAHDAYLNAVVGTALIKKYPKLESEFVYGDYKVYDVRKMIAKSEQEIGKATAKYFFYSNIMNFFKTEITLANGEIRKRPLIETNGETGEIVWDKGRDFATVRKVLSMPQVNIVKKTEVQTGGFSKESILPKRNSDKLIARKKDWDPKKYGGFDSPTVAYSVLVVAKVEKGKSKKLKSVKELLGITIMERSSFEKNPIDFLEAKGYKEVKKDLIIKLPKYSLFELENGRKRMLASAGELQKGNELALPSKYVNFLYLASHYEKLKGSPEDNEQKQLFVEQHKHYLDEIIEQISEFSKRVILADANLDKVLSAYNKHRDKPIREQAENIIHLFTLTNLGAPAAFKYFDTTIDRKRYTSTKEVLDATLIHQSITGLYETRIDLSQLGGDGGGSSPAPGGTAPLEEEYRLFLEAPIQNVTLLEQWKREIPKVWAEINPPGLASTQAPIHVQLLSTALPVRVRQYPITLEAKRSLRETIRKFRAAGILRPVHSPWNTPLLPVRKSGTSEYRMVQDLREVNKRVETIHPTVPNPYTLLSLLPPDRIWYSVLDLKDAFFCIPLAPESQLIFAFEWADAEEGESGQLTWTRLPQGFKNSPTLFNEALNRDLQGFRLDHPSVSLLQYVDDLLIAADTQAACLSATRDLLMTLAELGYRVSGKKAQLCQEEVTYLGFKIHKGSRSLSNSRTQAILQIPVPKTKRQVREFLGKIGYCRLFIPGFAELAQPLYAATRPGNDPLVWGEKEEEAFQSLKLALTQPPALALPSLDKPFQLFVEETSGAAKGVLTQALGPWKRPVAYLSKRLDPVAAGWPRCLRAIAAAALLTREASKLTFGQDIEITSSHNLESLLRSPPDKWLTNARITQYQVLLLDPPRVRFKQTAALNPATLLPETDDTLPIHHCLDTLDSLTSTRPDLTDQPLAQAEATLFTDGSSYIRDGKRYAGAAVVTLDSVIWAEPLPIGTSAQKAELIALTKALEWSKDKSVNIYTDSRYAFATLHVHGMIYRERGWLTAGGKAIKNAPEILALLTAVWLPKRVAVMHCKGHQKDDAPTSTGNRRADEVAREVAIRPLSTQATISAGKRTADGSEFEKRTADGSEFESPKKKAKVE

SEQ ID NO: 1376 - protein, 2103 aa, synthetic construct
MPAAKRVKLDGGDKKYSIGLDIGTNSVGWAVITDEYKVPSKKFKVLGNTDRHSIKKNLIGALLFDSGETAEATRLKRTARRRYTRRKNRICYLQEIFSNEMAKVDDSFFHRLEESFLVEEDKKHERHPIFGNIVDEVAYHEKYPTIYHLRKKLVDSTDKADLRLIYLALAHMIKFRGHFLIEGDLNPDNSDVDKLFIQLVQTYNQLFEENPINASGVDAKAILSARLSKSRRLENLIAQLPGEKKNGLFGNLIALSLGLTPNFKSNFDLAEDAKLQLSKDTYDDDLDNLLAQIGDQYADLFLAAKNLSDAILLSDILRVNTEITKAPLSASMIKRYDEHHQDLTLLKALVRQQLPEKYKEIFFDQSKNGYAGYIDGGASQEEFYKFIKPILEKMDGTEELLVKLNREDLLRKQRTFDNGSIPHQIHLGELHAILRRQEDFYPFLKDNREKIEKILTFRIPYYVGPLARGNSRFAWMTRKSEETITPWNFEEVVDKGASAQSFIERMTNFDKNLPNEKVLPKHSLLYEYFTVYNELTKVKYVTEGMRKPAFLSGEQKKAIVDLLFKTNRKVTVKQLKEDYFKKIECFDSVEISGVEDRFNASLGTYHDLLKIIKDKDFLDNEENEDILEDIVLTLTLFEDREMIEERLKTYAHLFDDKVMKQLKRRRYTGWGRLSRKLINGIRDKQSGKTILDFLKSDGFANRNFMQLIHDDSLTFKEDIQKAQVSGQGDSLHEHIANLAGSPAIKKGILQTVKVVDELVKVMGRHKPENIVIEMARENQTTQKGQKNSRERMKRIEEGIKELGSQILKEHPVENTQLQNEKLYLYYLQNGRDMYVDQELDINRLSDYDVDHIVPQSFLKDDSIDNKVLTRSDKARGKSDNVPSEEVVKKMKNYWRQLLNAKLITQRKFDNLTKAERGGLSELDKAGFIKRQLVETRQITKHVAQILDSRMNTKYDENDKLIREVKVITLKSKLVSDFRKDFQFYKVREINNYHHAHDAYLNAVVGTALIKKYPKLESEFVYGDYKVYDVRKMIAKSEQEIGKATAKYFFYSNIMNFFKTEITLANGEIRKRPLIETNGETGEIVWDKGRDFATVRKVLSMPQVNIVKKTEVQTGGFSKESILPKRNSDKLIARKKDWDPKKYGGFDSPTVAYSVLVVAKVEKGKSKKLKSVKELLGITIMERSSFEKNPIDFLEAKGYKEVKKDLIIKLPKYSLFELENGRKRMLASAGELQKGNELALPSKYVNFLYLASHYEKLKGSPEDNEQKQLFVEQHKHYLDEIIEQISEFSKRVILADANLDKVLSAYNKHRDKPIREQAENIIHLFTLTNLGAPAAFKYFDTTIDRKRYTSTKEVLDATLIHQSITGLYETRIDLSQLGGDGGSGSETPGTSESATPESGGTAPLEEEYRLFLEAPIQNVTLLEQWKREIPKVWAEINPPGLASTQAPIHVQLLSTALPVRVRQYPITLEAKRSLRETIRKFRAAGILRPVHSPWNTPLLPVRKSGTSEYRMVQDLREVNKRVETIHPTVPNPYTLLSLLPPDRIWYSVLDLKDAFFCIPLAPESQLIFAFEWADAEEGESGQLTWTRLPQGFKNSPTLFNEALNRDLQGFRLDHPSVSLLQYVDDLLIAADTQAACLSATRDLLMTLAELGYRVSGKKAQLCQEEVTYLGFKIHKGSRSLSNSRTQAILQIPVPKTKRQVREFLGKIGYCRLFIPGFAELAQPLYAATRPGNDPLVWGEKEEEAFQSLKLALTQPPALALPSLDKPFQLFVEETSGAAKGVLTQALGPWKRPVAYLSKRLDPVAAGWPRCLRAIAAAALLTREASKLTFGQDIEITSSHNLESLLRSPPDKWLTNARITQYQVLLLDPPRVRFKQTAALNPATLLPETDDTLPIHHCLDTLDSLTSTRPDLTDQPLAQAEATLFTDGSSYIRDGKRYAGAAVVTLDSVIWAEPLPIGTSAQKAELIALTKALEWSKDKSVNIYTDSRYAFATLHVHGMIYRERGWLTAGGKAIKNAPEILALLTAVWLPKRVAVMHCKGHQKDDAPTSTGNRRADEVAREVAIRPLSTQATISAGKRTADGSEFEKRTADGSEFESPKKKAKVE

SEQ ID NO: 1377 - protein, 2098 aa, synthetic construct
MPAAKRVKLDGGDKKYSIGLDIGTNSVGWAVITDEYKVPSKKFKVLGNTDRHSIKKNLIGALLFDSGETAEATRLKRTARRRYTRRKNRICYLQEIFSNEMAKVDDSFFHRLEESFLVEEDKKHERHPIFGNIVDEVAYHEKYPTIYHLRKKLVDSTDKADLRLIYLALAHMIKFRGHFLIEGDLNPDNSDVDKLFIQLVQTYNQLFEENPINASGVDAKAILSARLSKSRRLENLIAQLPGEKKNGLFGNLIALSLGLTPNFKSNFDLAEDAKLQLSKDTYDDDLDNLLAQIGDQYADLFLAAKNLSDAILLSDILRVNTEITKAPLSASMIKRYDEHHQDLTLLKALVRQQLPEKYKEIFFDQSKNGYAGYIDGGASQEEFYKFIKPILEKMDGTEELLVKLNREDLLRKQRTFDNGSIPHQIHLGELHAILRRQEDFYPFLKDNREKIEKILTFRIPYYVGPLARGNSRFAWMTRKSEETITPWNFEEVVDKGASAQSFIERMTNFDKNLPNEKVLPKHSLLYEYFTVYNELTKVKYVTEGMRKPAFLSGEQKKAIVDLLFKTNRKVTVKQLKEDYFKKIECFDSVEISGVEDRFNASLGTYHDLLKIIKDKDFLDNEENEDILEDIVLTLTLFEDREMIEERLKTYAHLFDDKVMKQLKRRRYTGWGRLSRKLINGIRDKQSGKTILDFLKSDGFANRNFMQLIHDDSLTFKEDIQKAQVSGQGDSLHEHIANLAGSPAIKKGILQTVKVVDELVKVMGRHKPENIVIEMARENQTTQKGQKNSRERMKRIEEGIKELGSQILKEHPVENTQLQNEKLYLYYLQNGRDMYVDQELDINRLSDYDVDHIVPQSFLKDDSIDNKVLTRSDKARGKSDNVPSEEVVKKMKNYWRQLLNAKLITQRKFDNLTKAERGGLSELDKAGFIKRQLVETRQITKHVAQILDSRMNTKYDENDKLIREVKVITLKSKLVSDFRKDFQFYKVREINNYHHAHDAYLNAVVGTALIKKYPKLESEFVYGDYKVYDVRKMIAKSEQEIGKATAKYFFYSNIMNFFKTEITLANGEIRKRPLIETNGETGEIVWDKGRDFATVRKVLSMPQVNIVKKTEVQTGGFSKESILPKRNSDKLIARKKDWDPKKYGGFDSPTVAYSVLVVAKVEKGKSKKLKSVKELLGITIMERSSFEKNPIDFLEAKGYKEVKKDLIIKLPKYSLFELENGRKRMLASAGELQKGNELALPSKYVNFLYLASHYEKLKGSPEDNEQKQLFVEQHKHYLDEIIEQISEFSKRVILADANLDKVLSAYNKHRDKPIREQAENIIHLFTLTNLGAPAAFKYFDTTIDRKRYTSTKEVLDATLIHQSITGLYETRIDLSQLGGDGGPAPEAAAKGGSGGTAPLEEEYRLFLEAPIQNVTLLEQWKREIPKVWAEINPPGLASTQAPIHVQLLSTALPVRVRQYPITLEAKRSLRETIRKFRAAGILRPVHSPWNTPLLPVRKSGTSEYRMVQDLREVNKRVETIHPTVPNPYTLLSLLPPDRIWYSVLDLKDAFFCIPLAPESQLIFAFEWADAEEGESGQLTWTRLPQGFKNSPTLFNEALNRDLQGFRLDHPSVSLLQYVDDLLIAADTQAACLSATRDLLMTLAELGYRVSGKKAQLCQEEVTYLGFKIHKGSRSLSNSRTQAILQIPVPKTKRQVREFLGKIGYCRLFIPGFAELAQPLYAATRPGNDPLVWGEKEEEAFQSLKLALTQPPALALPSLDKPFQLFVEETSGAAKGVLTQALGPWKRPVAYLSKRLDPVAAGWPRCLRAIAAAALLTREASKLTFGQDIEITSSHNLESLLRSPPDKWLTNARITQYQVLLLDPPRVRFKQTAALNPATLLPETDDTLPIHHCLDTLDSLTSTRPDLTDQPLAQAEATLFTDGSSYIRDGKRYAGAAVVTLDSVIWAEPLPIGTSAQKAELIALTKALEWSKDKSVNIYTDSRYAFATLHVHGMIYRERGWLTAGGKAIKNAPEILALLTAVWLPKRVAVMHCKGHQKDDAPTSTGNRRADEVAREVAIRPLSTQATISAGKRTADGSEFEKRTADGSEFESPKKKAKVE

SEQ ID NO: 1378 - protein, 2092 aa, synthetic construct
MPAAKRVKLDGGDKKYSIGLDIGTNSVGWAVITDEYKVPSKKFKVLGNTDRHSIKKNLIGALLFDSGETAEATRLKRTARRRYTRRKNRICYLQEIFSNEMAKVDDSFFHRLEESFLVEEDKKHERHPIFGNIVDEVAYHEKYPTIYHLRKKLVDSTDKADLRLIYLALAHMIKFRGHFLIEGDLNPDNSDVDKLFIQLVQTYNQLFEENPINASGVDAKAILSARLSKSRRLENLIAQLPGEKKNGLFGNLIALSLGLTPNFKSNFDLAEDAKLQLSKDTYDDDLDNLLAQIGDQYADLFLAAKNLSDAILLSDILRVNTEITKAPLSASMIKRYDEHHQDLTLLKALVRQQLPEKYKEIFFDQSKNGYAGYIDGGASQEEFYKFIKPILEKMDGTEELLVKLNREDLLRKQRTFDNGSIPHQIHLGELHAILRRQEDFYPFLKDNREKIEKILTFRIPYYVGPLARGNSRFAWMTRKSEETITPWNFEEVVDKGASAQSFIERMTNFDKNLPNEKVLPKHSLLYEYFTVYNELTKVKYVTEGMRKPAFLSGEQKKAIVDLLFKTNRKVTVKQLKEDYFKKIECFDSVEISGVEDRFNASLGTYHDLLKIIKDKDFLDNEENEDILEDIVLTLTLFEDREMIEERLKTYAHLFDDKVMKQLKRRRYTGWGRLSRKLINGIRDKQSGKTILDFLKSDGFANRNFMQLIHDDSLTFKEDIQKAQVSGQGDSLHEHIANLAGSPAIKKGILQTVKVVDELVKVMGRHKPENIVIEMARENQTTQKGQKNSRERMKRIEEGIKELGSQILKEHPVENTQLQNEKLYLYYLQNGRDMYVDQELDINRLSDYDVDHIVPQSFLKDDSIDNKVLTRSDKARGKSDNVPSEEVVKKMKNYWRQLLNAKLITQRKFDNLTKAERGGLSELDKAGFIKRQLVETRQITKHVAQILDSRMNTKYDENDKLIREVKVITLKSKLVSDFRKDFQFYKVREINNYHHAHDAYLNAVVGTALIKKYPKLESEFVYGDYKVYDVRKMIAKSEQEIGKATAKYFFYSNIMNFFKTEITLANGEIRKRPLIETNGETGEIVWDKGRDFATVRKVLSMPQVNIVKKTEVQTGGFSKESILPKRNSDKLIARKKDWDPKKYGGFDSPTVAYSVLVVAKVEKGKSKKLKSVKELLGITIMERSSFEKNPIDFLEAKGYKEVKKDLIIKLPKYSLFELENGRKRMLASAGELQKGNELALPSKYVNFLYLASHYEKLKGSPEDNEQKQLFVEQHKHYLDEIIEQISEFSKRVILADANLDKVLSAYNKHRDKPIREQAENIIHLFTLTNLGAPAAFKYFDTTIDRKRYTSTKEVLDATLIHQSITGLYETRIDLSQLGGDGGPAPAPGGTAPLEEEYRLFLEAPIQNVTLLEQWKREIPKVWAEINPPGLASTQAPIHVQLLSTALPVRVRQYPITLEAKRSLRETIRKFRAAGILRPVHSPWNTPLLPVRKSGTSEYRMVQDLREVNKRVETIHPTVPNPYTLLSLLPPDRIWYSVLDLKDAFFCIPLAPESQLIFAFEWADAEEGESGQLTWTRLPQGFKNSPTLFNEALNRDLQGFRLDHPSVSLLQYVDDLLIAADTQAACLSATRDLLMTLAELGYRVSGKKAQLCQEEVTYLGFKIHKGSRSLSNSRTQAILQIPVPKTKRQVREFLGKIGYCRLFIPGFAELAQPLYAATRPGNDPLVWGEKEEEAFQSLKLALTQPPALALPSLDKPFQLFVEETSGAAKGVLTQALGPWKRPVAYLSKRLDPVAAGWPRCLRAIAAAALLTREASKLTFGQDIEITSSHNLESLLRSPPDKWLTNARITQYQVLLLDPPRVRFKQTAALNPATLLPETDDTLPIHHCLDTLDSLTSTRPDLTDQPLAQAEATLFTDGSSYIRDGKRYAGAAVVTLDSVIWAEPLPIGTSAQKAELIALTKALEWSKDKSVNIYTDSRYAFATLHVHGMIYRERGWLTAGGKAIKNAPEILALLTAVWLPKRVAVMHCKGHQKDDAPTSTGNRRADEVAREVAIRPLSTQATISAGKRTADGSEFEKRTADGSEFESPKKKAKVE

SEQ ID NO: 1379 - protein, 2098 aa, synthetic construct
MPAAKRVKLDGGDKKYSIGLDIGTNSVGWAVITDEYKVPSKKFKVLGNTDRHSIKKNLIGALLFDSGETAEATRLKRTARRRYTRRKNRICYLQEIFSNEMAKVDDSFFHRLEESFLVEEDKKHERHPIFGNIVDEVAYHEKYPTIYHLRKKLVDSTDKADLRLIYLALAHMIKFRGHFLIEGDLNPDNSDVDKLFIQLVQTYNQLFEENPINASGVDAKAILSARLSKSRRLENLIAQLPGEKKNGLFGNLIALSLGLTPNFKSNFDLAEDAKLQLSKDTYDDDLDNLLAQIGDQYADLFLAAKNLSDAILLSDILRVNTEITKAPLSASMIKRYDEHHQDLTLLKALVRQQLPEKYKEIFFDQSKNGYAGYIDGGASQEEFYKFIKPILEKMDGTEELLVKLNREDLLRKQRTFDNGSIPHQIHLGELHAILRRQEDFYPFLKDNREKIEKILTFRIPYYVGPLARGNSRFAWMTRKSEETITPWNFEEVVDKGASAQSFIERMTNFDKNLPNEKVLPKHSLLYEYFTVYNELTKVKYVTEGMRKPAFLSGEQKKAIVDLLFKTNRKVTVKQLKEDYFKKIECFDSVEISGVEDRFNASLGTYHDLLKIIKDKDFLDNEENEDILEDIVLTLTLFEDREMIEERLKTYAHLFDDKVMKQLKRRRYTGWGRLSRKLINGIRDKQSGKTILDFLKSDGFANRNFMQLIHDDSLTFKEDIQKAQVSGQGDSLHEHIANLAGSPAIKKGILQTVKVVDELVKVMGRHKPENIVIEMARENQTTQKGQKNSRERMKRIEEGIKELGSQILKEHPVENTQLQNEKLYLYYLQNGRDMYVDQELDINRLSDYDVDHIVPQSFLKDDSIDNKVLTRSDKARGKSDNVPSEEVVKKMKNYWRQLLNAKLITQRKFDNLTKAERGGLSELDKAGFIKRQLVETRQITKHVAQILDSRMNTKYDENDKLIREVKVITLKSKLVSDFRKDFQFYKVREINNYHHAHDAYLNAVVGTALIKKYPKLESEFVYGDYKVYDVRKMIAKSEQEIGKATAKYFFYSNIMNFFKTEITLANGEIRKRPLIETNGETGEIVWDKGRDFATVRKVLSMPQVNIVKKTEVQTGGFSKESILPKRNSDKLIARKKDWDPKKYGGFDSPTVAYSVLVVAKVEKGKSKKLKSVKELLGITIMERSSFEKNPIDFLEAKGYKEVKKDLIIKLPKYSLFELENGRKRMLASAGELQKGNELALPSKYVNFLYLASHYEKLKGSPEDNEQKQLFVEQHKHYLDEIIEQISEFSKRVILADANLDKVLSAYNKHRDKPIREQAENIIHLFTLTNLGAPAAFKYFDTTIDRKRYTSTKEVLDATLIHQSITGLYETRIDLSQLGGDGGGGGEAAAKGGSGGTAPLEEEYRLFLEAPIQNVTLLEQWKREIPKVWAEINPPGLASTQAPIHVQLLSTALPVRVRQYPITLEAKRSLRETIRKFRAAGILRPVHSPWNTPLLPVRKSGTSEYRMVQDLREVNKRVETIHPTVPNPYTLLSLLPPDRIWYSVLDLKDAFFCIPLAPESQLIFAFEWADAEEGESGQLTWTRLPQGFKNSPTLFNEALNRDLQGFRLDHPSVSLLQYVDDLLIAADTQAACLSATRDLLMTLAELGYRVSGKKAQLCQEEVTYLGFKIHKGSRSLSNSRTQAILQIPVPKTKRQVREFLGKIGYCRLFIPGFAELAQPLYAATRPGNDPLVWGEKEEEAFQSLKLALTQPPALALPSLDKPFQLFVEETSGAAKGVLTQALGPWKRPVAYLSKRLDPVAAGWPRCLRAIAAAALLTREASKLTFGQDIEITSSHNLESLLRSPPDKWLTNARITQYQVLLLDPPRVRFKQTAALNPATLLPETDDTLPIHHCLDTLDSLTSTRPDLTDQPLAQAEATLFTDGSSYIRDGKRYAGAAVVTLDSVIWAEPLPIGTSAQKAELIALTKALEWSKDKSVNIYTDSRYAFATLHVHGMIYRERGWLTAGGKAIKNAPEILALLTAVWLPKRVAVMHCKGHQKDDAPTSTGNRRADEVAREVAIRPLSTQATISAGKRTADGSEFEKRTADGSEFESPKKKAKVE

SEQ ID NO: 1380 - protein, 2092 aa, synthetic construct
MPAAKRVKLDGGDKKYSIGLDIGTNSVGWAVITDEYKVPSKKFKVLGNTDRHSIKKNLIGALLFDSGETAEATRLKRTARRRYTRRKNRICYLQEIFSNEMAKVDDSFFHRLEESFLVEEDKKHERHPIFGNIVDEVAYHEKYPTIYHLRKKLVDSTDKADLRLIYLALAHMIKFRGHFLIEGDLNPDNSDVDKLFIQLVQTYNQLFEENPINASGVDAKAILSARLSKSRRLENLIAQLPGEKKNGLFGNLIALSLGLTPNFKSNFDLAEDAKLQLSKDTYDDDLDNLLAQIGDQYADLFLAAKNLSDAILLSDILRVNTEITKAPLSASMIKRYDEHHQDLTLLKALVRQQLPEKYKEIFFDQSKNGYAGYIDGGASQEEFYKFIKPILEKMDGTEELLVKLNREDLLRKQRTFDNGSIPHQIHLGELHAILRRQEDFYPFLKDNREKIEKILTFRIPYYVGPLARGNSRFAWMTRKSEETITPWNFEEVVDKGASAQSFIERMTNFDKNLPNEKVLPKHSLLYEYFTVYNELTKVKYVTEGMRKPAFLSGEQKKAIVDLLFKTNRKVTVKQLKEDYFKKIECFDSVEISGVEDRFNASLGTYHDLLKIIKDKDFLDNEENEDILEDIVLTLTLFEDREMIEERLKTYAHLFDDKVMKQLKRRRYTGWGRLSRKLINGIRDKQSGKTILDFLKSDGFANRNFMQLIHDDSLTFKEDIQKAQVSGQGDSLHEHIANLAGSPAIKKGILQTVKVVDELVKVMGRHKPENIVIEMARENQTTQKGQKNSRERMKRIEEGIKELGSQILKEHPVENTQLQNEKLYLYYLQNGRDMYVDQELDINRLSDYDVDHIVPQSFLKDDSIDNKVLTRSDKARGKSDNVPSEEVVKKMKNYWRQLLNAKLITQRKFDNLTKAERGGLSELDKAGFIKRQLVETRQITKHVAQILDSRMNTKYDENDKLIREVKVITLKSKLVSDFRKDFQFYKVREINNYHHAHDAYLNAVVGTALIKKYPKLESEFVYGDYKVYDVRKMIAKSEQEIGKATAKYFFYSNIMNFFKTEITLANGEIRKRPLIETNGETGEIVWDKGRDFATVRKVLSMPQVNIVKKTEVQTGGFSKESILPKRNSDKLIARKKDWDPKKYGGFDSPTVAYSVLVVAKVEKGKSKKLKSVKELLGITIMERSSFEKNPIDFLEAKGYKEVKKDLIIKLPKYSLFELENGRKRMLASAGELQKGNELALPSKYVNFLYLASHYEKLKGSPEDNEQKQLFVEQHKHYLDEIIEQISEFSKRVILADANLDKVLSAYNKHRDKPIREQAENIIHLFTLTNLGAPAAFKYFDTTIDRKRYTSTKEVLDATLIHQSITGLYETRIDLSQLGGDGGEAAAKGGTAPLEEEYRLFLEAPIQNVTLLEQWKREIPKVWAEINPPGLASTQAPIHVQLLSTALPVRVRQYPITLEAKRSLRETIRKFRAAGILRPVHSPWNTPLLPVRKSGTSEYRMVQDLREVNKRVETIHPTVPNPYTLLSLLPPDRIWYSVLDLKDAFFCIPLAPESQLIFAFEWADAEEGESGQLTWTRLPQGFKNSPTLFNEALNRDLQGFRLDHPSVSLLQYVDDLLIAADTQAACLSATRDLLMTLAELGYRVSGKKAQLCQEEVTYLGFKIHKGSRSLSNSRTQAILQIPVPKTKRQVREFLGKIGYCRLFIPGFAELAQPLYAATRPGNDPLVWGEKEEEAFQSLKLALTQPPALALPSLDKPFQLFVEETSGAAKGVLTQALGPWKRPVAYLSKRLDPVAAGWPRCLRAIAAAALLTREASKLTFGQDIEITSSHNLESLLRSPPDKWLTNARITQYQVLLLDPPRVRFKQTAALNPATLLPETDDTLPIHHCLDTLDSLTSTRPDLTDQPLAQAEATLFTDGSSYIRDGKRYAGAAVVTLDSVIWAEPLPIGTSAQKAELIALTKALEWSKDKSVNIYTDSRYAFATLHVHGMIYRERGWLTAGGKAIKNAPEILALLTAVWLPKRVAVMHCKGHQKDDAPTSTGNRRADEVAREVAIRPLSTQATISAGKRTADGSEFEKRTADGSEFESPKKKAKVE

SEQ ID NO: 1381 - protein, 2098 aa, synthetic construct
MPAAKRVKLDGGDKKYSIGLDIGTNSVGWAVITDEYKVPSKKFKVLGNTDRHSIKKNLIGALLFDSGETAEATRLKRTARRRYTRRKNRICYLQEIFSNEMAKVDDSFFHRLEESFLVEEDKKHERHPIFGNIVDEVAYHEKYPTIYHLRKKLVDSTDKADLRLIYLALAHMIKFRGHFLIEGDLNPDNSDVDKLFIQLVQTYNQLFEENPINASGVDAKAILSARLSKSRRLENLIAQLPGEKKNGLFGNLIALSLGLTPNFKSNFDLAEDAKLQLSKDTYDDDLDNLLAQIGDQYADLFLAAKNLSDAILLSDILRVNTEITKAPLSASMIKRYDEHHQDLTLLKALVRQQLPEKYKEIFFDQSKNGYAGYIDGGASQEEFYKFIKPILEKMDGTEELLVKLNREDLLRKQRTFDNGSIPHQIHLGELHAILRRQEDFYPFLKDNREKIEKILTFRIPYYVGPLARGNSRFAWMTRKSEETITPWNFEEVVDKGASAQSFIERMTNFDKNLPNEKVLPKHSLLYEYFTVYNELTKVKYVTEGMRKPAFLSGEQKKAIVDLLFKTNRKVTVKQLKEDYFKKIECFDSVEISGVEDRFNASLGTYHDLLKIIKDKDFLDNEENEDILEDIVLTLTLFEDREMIEERLKTYAHLFDDKVMKQLKRRRYTGWGRLSRKLINGIRDKQSGKTILDFLKSDGFANRNFMQLIHDDSLTFKEDIQKAQVSGQGDSLHEHIANLAGSPAIKKGILQTVKVVDELVKVMGRHKPENIVIEMARENQTTQKGQKNSRERMKRIEEGIKELGSQILKEHPVENTQLQNEKLYLYYLQNGRDMYVDQELDINRLSDYDVDHIVPQSFLKDDSIDNKVLTRSDKARGKSDNVPSEEVVKKMKNYWRQLLNAKLITQRKFDNLTKAERGGLSELDKAGFIKRQLVETRQITKHVAQILDSRMNTKYDENDKLIREVKVITLKSKLVSDFRKDFQFYKVREINNYHHAHDAYLNAVVGTALIKKYPKLESEFVYGDYKVYDVRKMIAKSEQEIGKATAKYFFYSNIMNFFKTEITLANGEIRKRPLIETNGETGEIVWDKGRDFATVRKVLSMPQVNIVKKTEVQTGGFSKESILPKRNSDKLIARKKDWDPKKYGGFDSPTVAYSVLVVAKVEKGKSKKLKSVKELLGITIMERSSFEKNPIDFLEAKGYKEVKKDLIIKLPKYSLFELENGRKRMLASAGELQKGNELALPSKYVNFLYLASHYEKLKGSPEDNEQKQLFVEQHKHYLDEIIEQISEFSKRVILADANLDKVLSAYNKHRDKPIREQAENIIHLFTLTNLGAPAAFKYFDTTIDRKRYTSTKEVLDATLIHQSITGLYETRIDLSQLGGDGGGSSEAAAKPAPGGTAPLEEEYRLFLEAPIQNVTLLEQWKREIPKVWAEINPPGLASTQAPIHVQLLSTALPVRVRQYPITLEAKRSLRETIRKFRAAGILRPVHSPWNTPLLPVRKSGTSEYRMVQDLREVNKRVETIHPTVPNPYTLLSLLPPDRIWYSVLDLKDAFFCIPLAPESQLIFAFEWADAEEGESGQLTWTRLPQGFKNSPTLFNEALNRDLQGFRLDHPSVSLLQYVDDLLIAADTQAACLSATRDLLMTLAELGYRVSGKKAQLCQEEVTYLGFKIHKGSRSLSNSRTQAILQIPVPKTKRQVREFLGKIGYCRLFIPGFAELAQPLYAATRPGNDPLVWGEKEEEAFQSLKLALTQPPALALPSLDKPFQLFVEETSGAAKGVLTQALGPWKRPVAYLSKRLDPVAAGWPRCLRAIAAAALLTREASKLTFGQDIEITSSHNLESLLRSPPDKWLTNARITQYQVLLLDPPRVRFKQTAALNPATLLPETDDTLPIHHCLDTLDSLTSTRPDLTDQPLAQAEATLFTDGSSYIRDGKRYAGAAVVTLDSVIWAEPLPIGTSAQKAELIALTKALEWSKDKSVNIYTDSRYAFATLHVHGMIYRERGWLTAGGKAIKNAPEILALLTAVWLPKRVAVMHCKGHQKDDAPTSTGNRRADEVAREVAIRPLSTQATISAGKRTADGSEFEKRTADGSEFESPKKKAKVE

SEQ ID NO: 1382 - protein, 2105 aa, synthetic construct
MPAAKRVKLDGGDKKYSIGLDIGTNSVGWAVITDEYKVPSKKFKVLGNTDRHSIKKNLIGALLFDSGETAEATRLKRTARRRYTRRKNRICYLQEIFSNEMAKVDDSFFHRLEESFLVEEDKKHERHPIFGNIVDEVAYHEKYPTIYHLRKKLVDSTDKADLRLIYLALAHMIKFRGHFLIEGDLNPDNSDVDKLFIQLVQTYNQLFEENPINASGVDAKAILSARLSKSRRLENLIAQLPGEKKNGLFGNLIALSLGLTPNFKSNFDLAEDAKLQLSKDTYDDDLDNLLAQIGDQYADLFLAAKNLSDAILLSDILRVNTEITKAPLSASMIKRYDEHHQDLTLLKALVRQQLPEKYKEIFFDQSKNGYAGYIDGGASQEEFYKFIKPILEKMDGTEELLVKLNREDLLRKQRTFDNGSIPHQIHLGELHAILRRQEDFYPFLKDNREKIEKILTFRIPYYVGPLARGNSRFAWMTRKSEETITPWNFEEVVDKGASAQSFIERMTNFDKNLPNEKVLPKHSLLYEYFTVYNELTKVKYVTEGMRKPAFLSGEQKKAIVDLLFKTNRKVTVKQLKEDYFKKIECFDSVEISGVEDRFNASLGTYHDLLKIIKDKDFLDNEENEDILEDIVLTLTLFEDREMIEERLKTYAHLFDDKVMKQLKRRRYTGWGRLSRKLINGIRDKQSGKTILDFLKSDGFANRNFMQLIHDDSLTFKEDIQKAQVSGQGDSLHEHIANLAGSPAIKKGILQTVKVVDELVKVMGRHKPENIVIEMARENQTTQKGQKNSRERMKRIEEGIKELGSQILKEHPVENTQLQNEKLYLYYLQNGRDMYVDQELDINRLSDYDVDHIVPQSFLKDDSIDNKVLTRSDKARGKSDNVPSEEVVKKMKNYWRQLLNAKLITQRKFDNLTKAERGGLSELDKAGFIKRQLVETRQITKHVAQILDSRMNTKYDENDKLIREVKVITLKSKLVSDFRKDFQFYKVREINNYHHAHDAYLNAVVGTALIKKYPKLESEFVYGDYKVYDVRKMIAKSEQEIGKATAKYFFYSNIMNFFKTEITLANGEIRKRPLIETNGETGEIVWDKGRDFATVRKVLSMPQVNIVKKTEVQTGGFSKESILPKRNSDKLIARKKDWDPKKYGGFDSPTVAYSVLVVAKVEKGKSKKLKSVKELLGITIMERSSFEKNPIDFLEAKGYKEVKKDLIIKLPKYSLFELENGRKRMLASAGELQKGNELALPSKYVNFLYLASHYEKLKGSPEDNEQKQLFVEQHKHYLDEIIEQISEFSKRVILADANLDKVLSAYNKHRDKPIREQAENIIHLFTLTNLGAPAAFKYFDTTIDRKRYTSTKEVLDATLIHQSITGLYETRIDLSQLGGDGGGSSGSSGSSGSSGSSGSSGGTAPLEEEYRLFLEAPIQNVTLLEQWKREIPKVWAEINPPGLASTQAPIHVQLLSTALPVRVRQYPITLEAKRSLRETIRKFRAAGILRPVHSPWNTPLLPVRKSGTSEYRMVQDLREVNKRVETIHPTVPNPYTLLSLLPPDRIWYSVLDLKDAFFCIPLAPESQLIFAFEWADAEEGESGQLTWTRLPQGFKNSPTLFNEALNRDLQGFRLDHPSVSLLQYVDDLLIAADTQAACLSATRDLLMTLAELGYRVSGKKAQLCQEEVTYLGFKIHKGSRSLSNSRTQAILQIPVPKTKRQVREFLGKIGYCRLFIPGFAELAQPLYAATRPGNDPLVWGEKEEEAFQSLKLALTQPPALALPSLDKPFQLFVEETSGAAKGVLTQALGPWKRPVAYLSKRLDPVAAGWPRCLRAIAAAALLTREASKLTFGQDIEITSSHNLESLLRSPPDKWLTNARITQYQVLLLDPPRVRFKQTAALNPATLLPETDDTLPIHHCLDTLDSLTSTRPDLTDQPLAQAEATLFTDGSSYIRDGKRYAGAAVVTLDSVIWAEPLPIGTSAQKAELIALTKALEWSKDKSVNIYTDSRYAFATLHVHGMIYRERGWLTAGGKAIKNAPEILALLTAVWLPKRVAVMHCKGHQKDDAPTSTGNRRADEVAREVAIRPLSTQATISAGKRTADGSEFEKRTADGSEFESPKKKAKVE

SEQ ID NO: 1383 - protein, 2096 aa, synthetic construct
MPAAKRVKLDGGDKKYSIGLDIGTNSVGWAVITDEYKVPSKKFKVLGNTDRHSIKKNLIGALLFDSGETAEATRLKRTARRRYTRRKNRICYLQEIFSNEMAKVDDSFFHRLEESFLVEEDKKHERHPIFGNIVDEVAYHEKYPTIYHLRKKLVDSTDKADLRLIYLALAHMIKFRGHFLIEGDLNPDNSDVDKLFIQLVQTYNQLFEENPINASGVDAKAILSARLSKSRRLENLIAQLPGEKKNGLFGNLIALSLGLTPNFKSNFDLAEDAKLQLSKDTYDDDLDNLLAQIGDQYADLFLAAKNLSDAILLSDILRVNTEITKAPLSASMIKRYDEHHQDLTLLKALVRQQLPEKYKEIFFDQSKNGYAGYIDGGASQEEFYKFIKPILEKMDGTEELLVKLNREDLLRKQRTFDNGSIPHQIHLGELHAILRRQEDFYPFLKDNREKIEKILTFRIPYYVGPLARGNSRFAWMTRKSEETITPWNFEEVVDKGASAQSFIERMTNFDKNLPNEKVLPKHSLLYEYFTVYNELTKVKYVTEGMRKPAFLSGEQKKAIVDLLFKTNRKVTVKQLKEDYFKKIECFDSVEISGVEDRFNASLGTYHDLLKIIKDKDFLDNEENEDILEDIVLTLTLFEDREMIEERLKTYAHLFDDKVMKQLKRRRYTGWGRLSRKLINGIRDKQSGKTILDFLKSDGFANRNFMQLIHDDSLTFKEDIQKAQVSGQGDSLHEHIANLAGSPAIKKGILQTVKVVDELVKVMGRHKPENIVIEMARENQTTQKGQKNSRERMKRIEEGIKELGSQILKEHPVENTQLQNEKLYLYYLQNGRDMYVDQELDINRLSDYDVDHIVPQSFLKDDSIDNKVLTRSDKARGKSDNVPSEEVVKKMKNYWRQLLNAKLITQRKFDNLTKAERGGLSELDKAGFIKRQLVETRQITKHVAQILDSRMNTKYDENDKLIREVKVITLKSKLVSDFRKDFQFYKVREINNYHHAHDAYLNAVVGTALIKKYPKLESEFVYGDYKVYDVRKMIAKSEQEIGKATAKYFFYSNIMNFFKTEITLANGEIRKRPLIETNGETGEIVWDKGRDFATVRKVLSMPQVNIVKKTEVQTGGFSKESILPKRNSDKLIARKKDWDPKKYGGFDSPTVAYSVLVVAKVEKGKSKKLKSVKELLGITIMERSSFEKNPIDFLEAKGYKEVKKDLIIKLPKYSLFELENGRKRMLASAGELQKGNELALPSKYVNFLYLASHYEKLKGSPEDNEQKQLFVEQHKHYLDEIIEQISEFSKRVILADANLDKVLSAYNKHRDKPIREQAENIIHLFTLTNLGAPAAFKYFDTTIDRKRYTSTKEVLDATLIHQSITGLYETRIDLSQLGGDGGGGSPAPGGGGGTAPLEEEYRLFLEAPIQNVTLLEQWKREIPKVWAEINPPGLASTQAPIHVQLLSTALPVRVRQYPITLEAKRSLRETIRKFRAAGILRPVHSPWNTPLLPVRKSGTSEYRMVQDLREVNKRVETIHPTVPNPYTLLSLLPPDRIWYSVLDLKDAFFCIPLAPESQLIFAFEWADAEEGESGQLTWTRLPQGFKNSPTLFNEALNRDLQGFRLDHPSVSLLQYVDDLLIAADTQAACLSATRDLLMTLAELGYRVSGKKAQLCQEEVTYLGFKIHKGSRSLSNSRTQAILQIPVPKTKRQVREFLGKIGYCRLFIPGFAELAQPLYAATRPGNDPLVWGEKEEEAFQSLKLALTQPPALALPSLDKPFQLFVEETSGAAKGVLTQALGPWKRPVAYLSKRLDPVAAGWPRCLRAIAAAALLTREASKLTFGQDIEITSSHNLESLLRSPPDKWLTNARITQYQVLLLDPPRVRFKQTAALNPATLLPETDDTLPIHHCLDTLDSLTSTRPDLTDQPLAQAEATLFTDGSSYIRDGKRYAGAAVVTLDSVIWAEPLPIGTSAQKAELIALTKALEWSKDKSVNIYTDSRYAFATLHVHGMIYRERGWLTAGGKAIKNAPEILALLTAVWLPKRVAVMHCKGHQKDDAPTSTGNRRADEVAREVAIRPLSTQATISAGKRTADGSEFEKRTADGSEFESPKKKAKVE

SEQ ID NO: 1384 - protein, 2098 aa, synthetic construct
MPAAKRVKLDGGDKKYSIGLDIGTNSVGWAVITDEYKVPSKKFKVLGNTDRHSIKKNLIGALLFDSGETAEATRLKRTARRRYTRRKNRICYLQEIFSNEMAKVDDSFFHRLEESFLVEEDKKHERHPIFGNIVDEVAYHEKYPTIYHLRKKLVDSTDKADLRLIYLALAHMIKFRGHFLIEGDLNPDNSDVDKLFIQLVQTYNQLFEENPINASGVDAKAILSARLSKSRRLENLIAQLPGEKKNGLFGNLIALSLGLTPNFKSNFDLAEDAKLQLSKDTYDDDLDNLLAQIGDQYADLFLAAKNLSDAILLSDILRVNTEITKAPLSASMIKRYDEHHQDLTLLKALVRQQLPEKYKEIFFDQSKNGYAGYIDGGASQEEFYKFIKPILEKMDGTEELLVKLNREDLLRKQRTFDNGSIPHQIHLGELHAILRRQEDFYPFLKDNREKIEKILTFRIPYYVGPLARGNSRFAWMTRKSEETITPWNFEEVVDKGASAQSFIERMTNFDKNLPNEKVLPKHSLLYEYFTVYNELTKVKYVTEGMRKPAFLSGEQKKAIVDLLFKTNRKVTVKQLKEDYFKKIECFDSVEISGVEDRFNASLGTYHDLLKIIKDKDFLDNEENEDILEDIVLTLTLFEDREMIEERLKTYAHLFDDKVMKQLKRRRYTGWGRLSRKLINGIRDKQSGKTILDFLKSDGFANRNFMQLIHDDSLTFKEDIQKAQVSGQGDSLHEHIANLAGSPAIKKGILQTVKVVDELVKVMGRHKPENIVIEMARENQTTQKGQKNSRERMKRIEEGIKELGSQILKEHPVENTQLQNEKLYLYYLQNGRDMYVDQELDINRLSDYDVDHIVPQSFLKDDSIDNKVLTRSDKARGKSDNVPSEEVVKKMKNYWRQLLNAKLITQRKFDNLTKAERGGLSELDKAGFIKRQLVETRQITKHVAQILDSRMNTKYDENDKLIREVKVITLKSKLVSDFRKDFQFYKVREINNYHHAHDAYLNAVVGTALIKKYPKLESEFVYGDYKVYDVRKMIAKSEQEIGKATAKYFFYSNIMNFFKTEITLANGEIRKRPLIETNGETGEIVWDKGRDFATVRKVLSMPQVNIVKKTEVQTGGFSKESILPKRNSDKLIARKKDWDPKKYGGFDSPTVAYSVLVVAKVEKGKSKKLKSVKELLGITIMERSSFEKNPIDFLEAKGYKEVKKDLIIKLPKYSLFELENGRKRMLASAGELQKGNELALPSKYVNFLYLASHYEKLKGSPEDNEQKQLFVEQHKHYLDEIIEQISEFSKRVILADANLDKVLSAYNKHRDKPIREQAENIIHLFTLTNLGAPAAFKYFDTTIDRKRYTSTKEVLDATLIHQSITGLYETRIDLSQLGGDGGGGGEAAAKPAPGGTAPLEEEYRLFLEAPIQNVTLLEQWKREIPKVWAEINPPGLASTQAPIHVQLLSTALPVRVRQYPITLEAKRSLRETIRKFRAAGILRPVHSPWNTPLLPVRKSGTSEYRMVQDLREVNKRVETIHPTVPNPYTLLSLLPPDRIWYSVLDLKDAFFCIPLAPESQLIFAFEWADAEEGESGQLTWTRLPQGFKNSPTLFNEALNRDLQGFRLDHPSVSLLQYVDDLLIAADTQAACLSATRDLLMTLAELGYRVSGKKAQLCQEEVTYLGFKIHKGSRSLSNSRTQAILQIPVPKTKRQVREFLGKIGYCRLFIPGFAELAQPLYAATRPGNDPLVWGEKEEEAFQSLKLALTQPPALALPSLDKPFQLFVEETSGAAKGVLTQALGPWKRPVAYLSKRLDPVAAGWPRCLRAIAAAALLTREASKLTFGQDIEITSSHNLESLLRSPPDKWLTNARITQYQVLLLDPPRVRFKQTAALNPATLLPETDDTLPIHHCLDTLDSLTSTRPDLTDQPLAQAEATLFTDGSSYIRDGKRYAGAAVVTLDSVIWAEPLPIGTSAQKAELIALTKALEWSKDKSVNIYTDSRYAFATLHVHGMIYRERGWLTAGGKAIKNAPEILALLTAVWLPKRVAVMHCKGHQKDDAPTSTGNRRADEVAREVAIRPLSTQATISAGKRTADGSEFEKRTADGSEFESPKKKAKVE

SEQ ID NO: 1385 - protein, 2096 aa, synthetic construct
MPAAKRVKLDGGDKKYSIGLDIGTNSVGWAVITDEYKVPSKKFKVLGNTDRHSIKKNLIGALLFDSGETAEATRLKRTARRRYTRRKNRICYLQEIFSNEMAKVDDSFFHRLEESFLVEEDKKHERHPIFGNIVDEVAYHEKYPTIYHLRKKLVDSTDKADLRLIYLALAHMIKFRGHFLIEGDLNPDNSDVDKLFIQLVQTYNQLFEENPINASGVDAKAILSARLSKSRRLENLIAQLPGEKKNGLFGNLIALSLGLTPNFKSNFDLAEDAKLQLSKDTYDDDLDNLLAQIGDQYADLFLAAKNLSDAILLSDILRVNTEITKAPLSASMIKRYDEHHQDLTLLKALVRQQLPEKYKEIFFDQSKNGYAGYIDGGASQEEFYKFIKPILEKMDGTEELLVKLNREDLLRKQRTFDNGSIPHQIHLGELHAILRRQEDFYPFLKDNREKIEKILTFRIPYYVGPLARGNSRFAWMTRKSEETITPWNFEEVVDKGASAQSFIERMTNFDKNLPNEKVLPKHSLLYEYFTVYNELTKVKYVTEGMRKPAFLSGEQKKAIVDLLFKTNRKVTVKQLKEDYFKKIECFDSVEISGVEDRFNASLGTYHDLLKIIKDKDFLDNEENEDILEDIVLTLTLFEDREMIEERLKTYAHLFDDKVMKQLKRRRYTGWGRLSRKLINGIRDKQSGKTILDFLKSDGFANRNFMQLIHDDSLTFKEDIQKAQVSGQGDSLHEHIANLAGSPAIKKGILQTVKVVDELVKVMGRHKPENIVIEMARENQTTQKGQKNSRERMKRIEEGIKELGSQILKEHPVENTQLQNEKLYLYYLQNGRDMYVDQELDINRLSDYDVDHIVPQSFLKDDSIDNKVLTRSDKARGKSDNVPSEEVVKKMKNYWRQLLNAKLITQRKFDNLTKAERGGLSELDKAGFIKRQLVETRQITKHVAQILDSRMNTKYDENDKLIREVKVITLKSKLVSDFRKDFQFYKVREINNYHHAHDAYLNAVVGTALIKKYPKLESEFVYGDYKVYDVRKMIAKSEQEIGKATAKYFFYSNIMNFFKTEITLANGEIRKRPLIETNGETGEIVWDKGRDFATVRKVLSMPQVNIVKKTEVQTGGFSKESILPKRNSDKLIARKKDWDPKKYGGFDSPTVAYSVLVVAKVEKGKSKKLKSVKELLGITIMERSSFEKNPIDFLEAKGYKEVKKDLIIKLPKYSLFELENGRKRMLASAGELQKGNELALPSKYVNFLYLASHYEKLKGSPEDNEQKQLFVEQHKHYLDEIIEQISEFSKRVILADANLDKVLSAYNKHRDKPIREQAENIIHLFTLTNLGAPAAFKYFDTTIDRKRYTSTKEVLDATLIHQSITGLYETRIDLSQLGGDGGPAPGGSGSSGGTAPLEEEYRLFLEAPIQNVTLLEQWKREIPKVWAEINPPGLASTQAPIHVQLLSTALPVRVRQYPITLEAKRSLRETIRKFRAAGILRPVHSPWNTPLLPVRKSGTSEYRMVQDLREVNKRVETIHPTVPNPYTLLSLLPPDRIWYSVLDLKDAFFCIPLAPESQLIFAFEWADAEEGESGQLTWTRLPQGFKNSPTLFNEALNRDLQGFRLDHPSVSLLQYVDDLLIAADTQAACLSATRDLLMTLAELGYRVSGKKAQLCQEEVTYLGFKIHKGSRSLSNSRTQAILQIPVPKTKRQVREFLGKIGYCRLFIPGFAELAQPLYAATRPGNDPLVWGEKEEEAFQSLKLALTQPPALALPSLDKPFQLFVEETSGAAKGVLTQALGPWKRPVAYLSKRLDPVAAGWPRCLRAIAAAALLTREASKLTFGQDIEITSSHNLESLLRSPPDKWLTNARITQYQVLLLDPPRVRFKQTAALNPATLLPETDDTLPIHHCLDTLDSLTSTRPDLTDQPLAQAEATLFTDGSSYIRDGKRYAGAAVVTLDSVIWAEPLPIGTSAQKAELIALTKALEWSKDKSVNIYTDSRYAFATLHVHGMIYRERGWLTAGGKAIKNAPEILALLTAVWLPKRVAVMHCKGHQKDDAPTSTGNRRADEVAREVAIRPLSTQATISAGKRTADGSEFEKRTADGSEFESPKKKAKVE

SEQ ID NO: 1386 - protein, 2099 aa, synthetic construct
MPAAKRVKLDGGDKKYSIGLDIGTNSVGWAVITDEYKVPSKKFKVLGNTDRHSIKKNLIGALLFDSGETAEATRLKRTARRRYTRRKNRICYLQEIFSNEMAKVDDSFFHRLEESFLVEEDKKHERHPIFGNIVDEVAYHEKYPTIYHLRKKLVDSTDKADLRLIYLALAHMIKFRGHFLIEGDLNPDNSDVDKLFIQLVQTYNQLFEENPINASGVDAKAILSARLSKSRRLENLIAQLPGEKKNGLFGNLIALSLGLTPNFKSNFDLAEDAKLQLSKDTYDDDLDNLLAQIGDQYADLFLAAKNLSDAILLSDILRVNTEITKAPLSASMIKRYDEHHQDLTLLKALVRQQLPEKYKEIFFDQSKNGYAGYIDGGASQEEFYKFIKPILEKMDGTEELLVKLNREDLLRKQRTFDNGSIPHQIHLGELHAILRRQEDFYPFLKDNREKIEKILTFRIPYYVGPLARGNSRFAWMTRKSEETITPWNFEEVVDKGASAQSFIERMTNFDKNLPNEKVLPKHSLLYEYFTVYNELTKVKYVTEGMRKPAFLSGEQKKAIVDLLFKTNRKVTVKQLKEDYFKKIECFDSVEISGVEDRFNASLGTYHDLLKIIKDKDFLDNEENEDILEDIVLTLTLFEDREMIEERLKTYAHLFDDKVMKQLKRRRYTGWGRLSRKLINGIRDKQSGKTILDFLKSDGFANRNFMQLIHDDSLTFKEDIQKAQVSGQGDSLHEHIANLAGSPAIKKGILQTVKVVDELVKVMGRHKPENIVIEMARENQTTQKGQKNSRERMKRIEEGIKELGSQILKEHPVENTQLQNEKLYLYYLQNGRDMYVDQELDINRLSDYDVDHIVPQSFLKDDSIDNKVLTRSDKARGKSDNVPSEEVVKKMKNYWRQLLNAKLITQRKFDNLTKAERGGLSELDKAGFIKRQLVETRQITKHVAQILDSRMNTKYDENDKLIREVKVITLKSKLVSDFRKDFQFYKVREINNYHHAHDAYLNAVVGTALIKKYPKLESEFVYGDYKVYDVRKMIAKSEQEIGKATAKYFFYSNIMNFFKTEITLANGEIRKRPLIETNGETGEIVWDKGRDFATVRKVLSMPQVNIVKKTEVQTGGFSKESILPKRNSDKLIARKKDWDPKKYGGFDSPTVAYSVLVVAKVEKGKSKKLKSVKELLGITIMERSSFEKNPIDFLEAKGYKEVKKDLIIKLPKYSLFELENGRKRMLASAGELQKGNELALPSKYVNFLYLASHYEKLKGSPEDNEQKQLFVEQHKHYLDEIIEQISEFSKRVILADANLDKVLSAYNKHRDKPIREQAENIIHLFTLTNLGAPAAFKYFDTTIDRKRYTSTKEVLDATLIHQSITGLYETRIDLSQLGGDGGGSSGSSGSSGSSGGTAPLEEEYRLFLEAPIQNVTLLEQWKREIPKVWAEINPPGLASTQAPIHVQLLSTALPVRVRQYPITLEAKRSLRETIRKFRAAGILRPVHSPWNTPLLPVRKSGTSEYRMVQDLREVNKRVETIHPTVPNPYTLLSLLPPDRIWYSVLDLKDAFFCIPLAPESQLIFAFEWADAEEGESGQLTWTRLPQGFKNSPTLFNEALNRDLQGFRLDHPSVSLLQYVDDLLIAADTQAACLSATRDLLMTLAELGYRVSGKKAQLCQEEVTYLGFKIHKGSRSLSNSRTQAILQIPVPKTKRQVREFLGKIGYCRLFIPGFAELAQPLYAATRPGNDPLVWGEKEEEAFQSLKLALTQPPALALPSLDKPFQLFVEETSGAAKGVLTQALGPWKRPVAYLSKRLDPVAAGWPRCLRAIAAAALLTREASKLTFGQDIEITSSHNLESLLRSPPDKWLTNARITQYQVLLLDPPRVRFKQTAALNPATLLPETDDTLPIHHCLDTLDSLTSTRPDLTDQPLAQAEATLFTDGSSYIRDGKRYAGAAVVTLDSVIWAEPLPIGTSAQKAELIALTKALEWSKDKSVNIYTDSRYAFATLHVHGMIYRERGWLTAGGKAIKNAPEILALLTAVWLPKRVAVMHCKGHQKDDAPTSTGNRRADEVAREVAIRPLSTQATISAGKRTADGSEFEKRTADGSEFESPKKKAKVE

SEQ ID NO: 1387 - protein, 2098 aa, synthetic construct
MPAAKRVKLDGGDKKYSIGLDIGTNSVGWAVITDEYKVPSKKFKVLGNTDRHSIKKNLIGALLFDSGETAEATRLKRTARRRYTRRKNRICYLQEIFSNEMAKVDDSFFHRLEESFLVEEDKKHERHPIFGNIVDEVAYHEKYPTIYHLRKKLVDSTDKADLRLIYLALAHMIKFRGHFLIEGDLNPDNSDVDKLFIQLVQTYNQLFEENPINASGVDAKAILSARLSKSRRLENLIAQLPGEKKNGLFGNLIALSLGLTPNFKSNFDLAEDAKLQLSKDTYDDDLDNLLAQIGDQYADLFLAAKNLSDAILLSDILRVNTEITKAPLSASMIKRYDEHHQDLTLLKALVRQQLPEKYKEIFFDQSKNGYAGYIDGGASQEEFYKFIKPILEKMDGTEELLVKLNREDLLRKQRTFDNGSIPHQIHLGELHAILRRQEDFYPFLKDNREKIEKILTFRIPYYVGPLARGNSRFAWMTRKSEETITPWNFEEVVDKGASAQSFIERMTNFDKNLPNEKVLPKHSLLYEYFTVYNELTKVKYVTEGMRKPAFLSGEQKKAIVDLLFKTNRKVTVKQLKEDYFKKIECFDSVEISGVEDRFNASLGTYHDLLKIIKDKDFLDNEENEDILEDIVLTLTLFEDREMIEERLKTYAHLFDDKVMKQLKRRRYTGWGRLSRKLINGIRDKQSGKTILDFLKSDGFANRNFMQLIHDDSLTFKEDIQKAQVSGQGDSLHEHIANLAGSPAIKKGILQTVKVVDELVKVMGRHKPENIVIEMARENQTTQKGQKNSRERMKRIEEGIKELGSQILKEHPVENTQLQNEKLYLYYLQNGRDMYVDQELDINRLSDYDVDHIVPQSFLKDDSIDNKVLTRSDKARGKSDNVPSEEVVKKMKNYWRQLLNAKLITQRKFDNLTKAERGGLSELDKAGFIKRQLVETRQITKHVAQILDSRMNTKYDENDKLIREVKVITLKSKLVSDFRKDFQFYKVREINNYHHAHDAYLNAVVGTALIKKYPKLESEFVYGDYKVYDVRKMIAKSEQEIGKATAKYFFYSNIMNFFKTEITLANGEIRKRPLIETNGETGEIVWDKGRDFATVRKVLSMPQVNIVKKTEVQTGGFSKESILPKRNSDKLIARKKDWDPKKYGGFDSPTVAYSVLVVAKVEKGKSKKLKSVKELLGITIMERSSFEKNPIDFLEAKGYKEVKKDLIIKLPKYSLFELENGRKRMLASAGELQKGNELALPSKYVNFLYLASHYEKLKGSPEDNEQKQLFVEQHKHYLDEIIEQISEFSKRVILADANLDKVLSAYNKHRDKPIREQAENIIHLFTLTNLGAPAAFKYFDTTIDRKRYTSTKEVLDATLIHQSITGLYETRIDLSQLGGDGGPAPEAAAKGGGGGTAPLEEEYRLFLEAPIQNVTLLEQWKREIPKVWAEINPPGLASTQAPIHVQLLSTALPVRVRQYPITLEAKRSLRETIRKFRAAGILRPVHSPWNTPLLPVRKSGTSEYRMVQDLREVNKRVETIHPTVPNPYTLLSLLPPDRIWYSVLDLKDAFFCIPLAPESQLIFAFEWADAEEGESGQLTWTRLPQGFKNSPTLFNEALNRDLQGFRLDHPSVSLLQYVDDLLIAADTQAACLSATRDLLMTLAELGYRVSGKKAQLCQEEVTYLGFKIHKGSRSLSNSRTQAILQIPVPKTKRQVREFLGKIGYCRLFIPGFAELAQPLYAATRPGNDPLVWGEKEEEAFQSLKLALTQPPALALPSLDKPFQLFVEETSGAAKGVLTQALGPWKRPVAYLSKRLDPVAAGWPRCLRAIAAAALLTREASKLTFGQDIEITSSHNLESLLRSPPDKWLTNARITQYQVLLLDPPRVRFKQTAALNPATLLPETDDTLPIHHCLDTLDSLTSTRPDLTDQPLAQAEATLFTDGSSYIRDGKRYAGAAVVTLDSVIWAEPLPIGTSAQKAELIALTKALEWSKDKSVNIYTDSRYAFATLHVHGMIYRERGWLTAGGKAIKNAPEILALLTAVWLPKRVAVMHCKGHQKDDAPTSTGNRRADEVAREVAIRPLSTQATISAGKRTADGSEFEKRTADGSEFESPKKKAKVE

SEQ ID NO: 1388 - protein, 2098 aa, synthetic construct
MPAAKRVKLDGGDKKYSIGLDIGTNSVGWAVITDEYKVPSKKFKVLGNTDRHSIKKNLIGALLFDSGETAEATRLKRTARRRYTRRKNRICYLQEIFSNEMAKVDDSFFHRLEESFLVEEDKKHERHPIFGNIVDEVAYHEKYPTIYHLRKKLVDSTDKADLRLIYLALAHMIKFRGHFLIEGDLNPDNSDVDKLFIQLVQTYNQLFEENPINASGVDAKAILSARLSKSRRLENLIAQLPGEKKNGLFGNLIALSLGLTPNFKSNFDLAEDAKLQLSKDTYDDDLDNLLAQIGDQYADLFLAAKNLSDAILLSDILRVNTEITKAPLSASMIKRYDEHHQDLTLLKALVRQQLPEKYKEIFFDQSKNGYAGYIDGGASQEEFYKFIKPILEKMDGTEELLVKLNREDLLRKQRTFDNGSIPHQIHLGELHAILRRQEDFYPFLKDNREKIEKILTFRIPYYVGPLARGNSRFAWMTRKSEETITPWNFEEVVDKGASAQSFIERMTNFDKNLPNEKVLPKHSLLYEYFTVYNELTKVKYVTEGMRKPAFLSGEQKKAIVDLLFKTNRKVTVKQLKEDYFKKIECFDSVEISGVEDRFNASLGTYHDLLKIIKDKDFLDNEENEDILEDIVLTLTLFEDREMIEERLKTYAHLFDDKVMKQLKRRRYTGWGRLSRKLINGIRDKQSGKTILDFLKSDGFANRNFMQLIHDDSLTFKEDIQKAQVSGQGDSLHEHIANLAGSPAIKKGILQTVKVVDELVKVMGRHKPENIVIEMARENQTTQKGQKNSRERMKRIEEGIKELGSQILKEHPVENTQLQNEKLYLYYLQNGRDMYVDQELDINRLSDYDVDHIVPQSFLKDDSIDNKVLTRSDKARGKSDNVPSEEVVKKMKNYWRQLLNAKLITQRKFDNLTKAERGGLSELDKAGFIKRQLVETRQITKHVAQILDSRMNTKYDENDKLIREVKVITLKSKLVSDFRKDFQFYKVREINNYHHAHDAYLNAVVGTALIKKYPKLESEFVYGDYKVYDVRKMIAKSEQEIGKATAKYFFYSNIMNFFKTEITLANGEIRKRPLIETNGETGEIVWDKGRDFATVRKVLSMPQVNIVKKTEVQTGGFSKESILPKRNSDKLIARKKDWDPKKYGGFDSPTVAYSVLVVAKVEKGKSKKLKSVKELLGITIMERSSFEKNPIDFLEAKGYKEVKKDLIIKLPKYSLFELENGRKRMLASAGELQKGNELALPSKYVNFLYLASHYEKLKGSPEDNEQKQLFVEQHKHYLDEIIEQISEFSKRVILADANLDKVLSAYNKHRDKPIREQAENIIHLFTLTNLGAPAAFKYFDTTIDRKRYTSTKEVLDATLIHQSITGLYETRIDLSQLGGDGGPAPEAAAKGSSGGTAPLEEEYRLFLEAPIQNVTLLEQWKREIPKVWAEINPPGLASTQAPIHVQLLSTALPVRVRQYPITLEAKRSLRETIRKFRAAGILRPVHSPWNTPLLPVRKSGTSEYRMVQDLREVNKRVETIHPTVPNPYTLLSLLPPDRIWYSVLDLKDAFFCIPLAPESQLIFAFEWADAEEGESGQLTWTRLPQGFKNSPTLFNEALNRDLQGFRLDHPSVSLLQYVDDLLIAADTQAACLSATRDLLMTLAELGYRVSGKKAQLCQEEVTYLGFKIHKGSRSLSNSRTQAILQIPVPKTKRQVREFLGKIGYCRLFIPGFAELAQPLYAATRPGNDPLVWGEKEEEAFQSLKLALTQPPALALPSLDKPFQLFVEETSGAAKGVLTQALGPWKRPVAYLSKRLDPVAAGWPRCLRAIAAAALLTREASKLTFGQDIEITSSHNLESLLRSPPDKWLTNARITQYQVLLLDPPRVRFKQTAALNPATLLPETDDTLPIHHCLDTLDSLTSTRPDLTDQPLAQAEATLFTDGSSYIRDGKRYAGAAVVTLDSVIWAEPLPIGTSAQKAELIALTKALEWSKDKSVNIYTDSRYAFATLHVHGMIYRERGWLTAGGKAIKNAPEILALLTAVWLPKRVAVMHCKGHQKDDAPTSTGNRRADEVAREVAIRPLSTQATISAGKRTADGSEFEKRTADGSEFESPKKKAKVE

SEQ ID NO: 1389 - protein, 2090 aa, synthetic construct
MPAAKRVKLDGGDKKYSIGLDIGTNSVGWAVITDEYKVPSKKFKVLGNTDRHSIKKNLIGALLFDSGETAEATRLKRTARRRYTRRKNRICYLQEIFSNEMAKVDDSFFHRLEESFLVEEDKKHERHPIFGNIVDEVAYHEKYPTIYHLRKKLVDSTDKADLRLIYLALAHMIKFRGHFLIEGDLNPDNSDVDKLFIQLVQTYNQLFEENPINASGVDAKAILSARLSKSRRLENLIAQLPGEKKNGLFGNLIALSLGLTPNFKSNFDLAEDAKLQLSKDTYDDDLDNLLAQIGDQYADLFLAAKNLSDAILLSDILRVNTEITKAPLSASMIKRYDEHHQDLTLLKALVRQQLPEKYKEIFFDQSKNGYAGYIDGGASQEEFYKFIKPILEKMDGTEELLVKLNREDLLRKQRTFDNGSIPHQIHLGELHAILRRQEDFYPFLKDNREKIEKILTFRIPYYVGPLARGNSRFAWMTRKSEETITPWNFEEVVDKGASAQSFIERMTNFDKNLPNEKVLPKHSLLYEYFTVYNELTKVKYVTEGMRKPAFLSGEQKKAIVDLLFKTNRKVTVKQLKEDYFKKIECFDSVEISGVEDRFNASLGTYHDLLKIIKDKDFLDNEENEDILEDIVLTLTLFEDREMIEERLKTYAHLFDDKVMKQLKRRRYTGWGRLSRKLINGIRDKQSGKTILDFLKSDGFANRNFMQLIHDDSLTFKEDIQKAQVSGQGDSLHEHIANLAGSPAIKKGILQTVKVVDELVKVMGRHKPENIVIEMARENQTTQKGQKNSRERMKRIEEGIKELGSQILKEHPVENTQLQNEKLYLYYLQNGRDMYVDQELDINRLSDYDVDHIVPQSFLKDDSIDNKVLTRSDKARGKSDNVPSEEVVKKMKNYWRQLLNAKLITQRKFDNLTKAERGGLSELDKAGFIKRQLVETRQITKHVAQILDSRMNTKYDENDKLIREVKVITLKSKLVSDFRKDFQFYKVREINNYHHAHDAYLNAVVGTALIKKYPKLESEFVYGDYKVYDVRKMIAKSEQEIGKATAKYFFYSNIMNFFKTEITLANGEIRKRPLIETNGETGEIVWDKGRDFATVRKVLSMPQVNIVKKTEVQTGGFSKESILPKRNSDKLIARKKDWDPKKYGGFDSPTVAYSVLVVAKVEKGKSKKLKSVKELLGITIMERSSFEKNPIDFLEAKGYKEVKKDLIIKLPKYSLFELENGRKRMLASAGELQKGNELALPSKYVNFLYLASHYEKLKGSPEDNEQKQLFVEQHKHYLDEIIEQISEFSKRVILADANLDKVLSAYNKHRDKPIREQAENIIHLFTLTNLGAPAAFKYFDTTIDRKRYTSTKEVLDATLIHQSITGLYETRIDLSQLGGDGGGGGGGTAPLEEEYRLFLEAPIQNVTLLEQWKREIPKVWAEINPPGLASTQAPIHVQLLSTALPVRVRQYPITLEAKRSLRETIRKFRAAGILRPVHSPWNTPLLPVRKSGTSEYRMVQDLREVNKRVETIHPTVPNPYTLLSLLPPDRIWYSVLDLKDAFFCIPLAPESQLIFAFEWADAEEGESGQLTWTRLPQGFKNSPTLFNEALNRDLQGFRLDHPSVSLLQYVDDLLIAADTQAACLSATRDLLMTLAELGYRVSGKKAQLCQEEVTYLGFKIHKGSRSLSNSRTQAILQIPVPKTKRQVREFLGKIGYCRLFIPGFAELAQPLYAATRPGNDPLVWGEKEEEAFQSLKLALTQPPALALPSLDKPFQLFVEETSGAAKGVLTQALGPWKRPVAYLSKRLDPVAAGWPRCLRAIAAAALLTREASKLTFGQDIEITSSHNLESLLRSPPDKWLTNARITQYQVLLLDPPRVRFKQTAALNPATLLPETDDTLPIHHCLDTLDSLTSTRPDLTDQPLAQAEATLFTDGSSYIRDGKRYAGAAVVTLDSVIWAEPLPIGTSAQKAELIALTKALEWSKDKSVNIYTDSRYAFATLHVHGMIYRERGWLTAGGKAIKNAPEILALLTAVWLPKRVAVMHCKGHQKDDAPTSTGNRRADEVAREVAIRPLSTQATISAGKRTADGSEFEKRTADGSEFESPKKKAKVE

SEQ ID NO: 1390 - protein, 2098 aa, synthetic construct
MPAAKRVKLDGGDKKYSIGLDIGTNSVGWAVITDEYKVPSKKFKVLGNTDRHSIKKNLIGALLFDSGETAEATRLKRTARRRYTRRKNRICYLQEIFSNEMAKVDDSFFHRLEESFLVEEDKKHERHPIFGNIVDEVAYHEKYPTIYHLRKKLVDSTDKADLRLIYLALAHMIKFRGHFLIEGDLNPDNSDVDKLFIQLVQTYNQLFEENPINASGVDAKAILSARLSKSRRLENLIAQLPGEKKNGLFGNLIALSLGLTPNFKSNFDLAEDAKLQLSKDTYDDDLDNLLAQIGDQYADLFLAAKNLSDAILLSDILRVNTEITKAPLSASMIKRYDEHHQDLTLLKALVRQQLPEKYKEIFFDQSKNGYAGYIDGGASQEEFYKFIKPILEKMDGTEELLVKLNREDLLRKQRTFDNGSIPHQIHLGELHAILRRQEDFYPFLKDNREKIEKILTFRIPYYVGPLARGNSRFAWMTRKSEETITPWNFEEVVDKGASAQSFIERMTNFDKNLPNEKVLPKHSLLYEYFTVYNELTKVKYVTEGMRKPAFLSGEQKKAIVDLLFKTNRKVTVKQLKEDYFKKIECFDSVEISGVEDRFNASLGTYHDLLKIIKDKDFLDNEENEDILEDIVLTLTLFEDREMIEERLKTYAHLFDDKVMKQLKRRRYTGWGRLSRKLINGIRDKQSGKTILDFLKSDGFANRNFMQLIHDDSLTFKEDIQKAQVSGQGDSLHEHIANLAGSPAIKKGILQTVKVVDELVKVMGRHKPENIVIEMARENQTTQKGQKNSRERMKRIEEGIKELGSQILKEHPVENTQLQNEKLYLYYLQNGRDMYVDQELDINRLSDYDVDHIVPQSFLKDDSIDNKVLTRSDKARGKSDNVPSEEVVKKMKNYWRQLLNAKLITQRKFDNLTKAERGGLSELDKAGFIKRQLVETRQITKHVAQILDSRMNTKYDENDKLIREVKVITLKSKLVSDFRKDFQFYKVREINNYHHAHDAYLNAVVGTALIKKYPKLESEFVYGDYKVYDVRKMIAKSEQEIGKATAKYFFYSNIMNFFKTEITLANGEIRKRPLIETNGETGEIVWDKGRDFATVRKVLSMPQVNIVKKTEVQTGGFSKESILPKRNSDKLIARKKDWDPKKYGGFDSPTVAYSVLVVAKVEKGKSKKLKSVKELLGITIMERSSFEKNPIDFLEAKGYKEVKKDLIIKLPKYSLFELENGRKRMLASAGELQKGNELALPSKYVNFLYLASHYEKLKGSPEDNEQKQLFVEQHKHYLDEIIEQISEFSKRVILADANLDKVLSAYNKHRDKPIREQAENIIHLFTLTNLGAPAAFKYFDTTIDRKRYTSTKEVLDATLIHQSITGLYETRIDLSQLGGDGGEAAAKGGGGGSGGTAPLEEEYRLFLEAPIQNVTLLEQWKREIPKVWAEINPPGLASTQAPIHVQLLSTALPVRVRQYPITLEAKRSLRETIRKFRAAGILRPVHSPWNTPLLPVRKSGTSEYRMVQDLREVNKRVETIHPTVPNPYTLLSLLPPDRIWYSVLDLKDAFFCIPLAPESQLIFAFEWADAEEGESGQLTWTRLPQGFKNSPTLFNEALNRDLQGFRLDHPSVSLLQYVDDLLIAADTQAACLSATRDLLMTLAELGYRVSGKKAQLCQEEVTYLGFKIHKGSRSLSNSRTQAILQIPVPKTKRQVREFLGKIGYCRLFIPGFAELAQPLYAATRPGNDPLVWGEKEEEAFQSLKLALTQPPALALPSLDKPFQLFVEETSGAAKGVLTQALGPWKRPVAYLSKRLDPVAAGWPRCLRAIAAAALLTREASKLTFGQDIEITSSHNLESLLRSPPDKWLTNARITQYQVLLLDPPRVRFKQTAALNPATLLPETDDTLPIHHCLDTLDSLTSTRPDLTDQPLAQAEATLFTDGSSYIRDGKRYAGAAVVTLDSVIWAEPLPIGTSAQKAELIALTKALEWSKDKSVNIYTDSRYAFATLHVHGMIYRERGWLTAGGKAIKNAPEILALLTAVWLPKRVAVMHCKGHQKDDAPTSTGNRRADEVAREVAIRPLSTQATISAGKRTADGSEFEKRTADGSEFESPKKKAKVE

SEQ ID NO: 1391 - protein, 2093 aa, synthetic construct
MPAAKRVKLDGGDKKYSIGLDIGTNSVGWAVITDEYKVPSKKFKVLGNTDRHSIKKNLIGALLFDSGETAEATRLKRTARRRYTRRKNRICYLQEIFSNEMAKVDDSFFHRLEESFLVEEDKKHERHPIFGNIVDEVAYHEKYPTIYHLRKKLVDSTDKADLRLIYLALAHMIKFRGHFLIEGDLNPDNSDVDKLFIQLVQTYNQLFEENPINASGVDAKAILSARLSKSRRLENLIAQLPGEKKNGLFGNLIALSLGLTPNFKSNFDLAEDAKLQLSKDTYDDDLDNLLAQIGDQYADLFLAAKNLSDAILLSDILRVNTEITKAPLSASMIKRYDEHHQDLTLLKALVRQQLPEKYKEIFFDQSKNGYAGYIDGGASQEEFYKFIKPILEKMDGTEELLVKLNREDLLRKQRTFDNGSIPHQIHLGELHAILRRQEDFYPFLKDNREKIEKILTFRIPYYVGPLARGNSRFAWMTRKSEETITPWNFEEVVDKGASAQSFIERMTNFDKNLPNEKVLPKHSLLYEYFTVYNELTKVKYVTEGMRKPAFLSGEQKKAIVDLLFKTNRKVTVKQLKEDYFKKIECFDSVEISGVEDRFNASLGTYHDLLKIIKDKDFLDNEENEDILEDIVLTLTLFEDREMIEERLKTYAHLFDDKVMKQLKRRRYTGWGRLSRKLINGIRDKQSGKTILDFLKSDGFANRNFMQLIHDDSLTFKEDIQKAQVSGQGDSLHEHIANLAGSPAIKKGILQTVKVVDELVKVMGRHKPENIVIEMARENQTTQKGQKNSRERMKRIEEGIKELGSQILKEHPVENTQLQNEKLYLYYLQNGRDMYVDQELDINRLSDYDVDHIVPQSFLKDDSIDNKVLTRSDKARGKSDNVPSEEVVKKMKNYWRQLLNAKLITQRKFDNLTKAERGGLSELDKAGFIKRQLVETRQITKHVAQILDSRMNTKYDENDKLIREVKVITLKSKLVSDFRKDFQFYKVREINNYHHAHDAYLNAVVGTALIKKYPKLESEFVYGDYKVYDVRKMIAKSEQEIGKATAKYFFYSNIMNFFKTEITLANGEIRKRPLIETNGETGEIVWDKGRDFATVRKVLSMPQVNIVKKTEVQTGGFSKESILPKRNSDKLIARKKDWDPKKYGGFDSPTVAYSVLVVAKVEKGKSKKLKSVKELLGITIMERSSFEKNPIDFLEAKGYKEVKKDLIIKLPKYSLFELENGRKRMLASAGELQKGNELALPSKYVNFLYLASHYEKLKGSPEDNEQKQLFVEQHKHYLDEIIEQISEFSKRVILADANLDKVLSAYNKHRDKPIREQAENIIHLFTLTNLGAPAAFKYFDTTIDRKRYTSTKEVLDATLIHQSITGLYETRIDLSQLGGDGGGGSGGGGGTAPLEEEYRLFLEAPIQNVTLLEQWKREIPKVWAEINPPGLASTQAPIHVQLLSTALPVRVRQYPITLEAKRSLRETIRKFRAAGILRPVHSPWNTPLLPVRKSGTSEYRMVQDLREVNKRVETIHPTVPNPYTLLSLLPPDRIWYSVLDLKDAFFCIPLAPESQLIFAFEWADAEEGESGQLTWTRLPQGFKNSPTLFNEALNRDLQGFRLDHPSVSLLQYVDDLLIAADTQAACLSATRDLLMTLAELGYRVSGKKAQLCQEEVTYLGFKIHKGSRSLSNSRTQAILQIPVPKTKRQVREFLGKIGYCRLFIPGFAELAQPLYAATRPGNDPLVWGEKEEEAFQSLKLALTQPPALALPSLDKPFQLFVEETSGAAKGVLTQALGPWKRPVAYLSKRLDPVAAGWPRCLRAIAAAALLTREASKLTFGQDIEITSSHNLESLLRSPPDKWLTNARITQYQVLLLDPPRVRFKQTAALNPATLLPETDDTLPIHHCLDTLDSLTSTRPDLTDQPLAQAEATLFTDGSSYIRDGKRYAGAAVVTLDSVIWAEPLPIGTSAQKAELIALTKALEWSKDKSVNIYTDSRYAFATLHVHGMIYRERGWLTAGGKAIKNAPEILALLTAVWLPKRVAVMHCKGHQKDDAPTSTGNRRADEVAREVAIRPLSTQATISAGKRTADGSEFEKRTADGSEFESPKKKAKVE

SEQ ID NO: 1392 - protein, 2093 aa, synthetic construct
MPAAKRVKLDGGDKKYSIGLDIGTNSVGWAVITDEYKVPSKKFKVLGNTDRHSIKKNLIGALLFDSGETAEATRLKRTARRRYTRRKNRICYLQEIFSNEMAKVDDSFFHRLEESFLVEEDKKHERHPIFGNIVDEVAYHEKYPTIYHLRKKLVDSTDKADLRLIYLALAHMIKFRGHFLIEGDLNPDNSDVDKLFIQLVQTYNQLFEENPINASGVDAKAILSARLSKSRRLENLIAQLPGEKKNGLFGNLIALSLGLTPNFKSNFDLAEDAKLQLSKDTYDDDLDNLLAQIGDQYADLFLAAKNLSDAILLSDILRVNTEITKAPLSASMIKRYDEHHQDLTLLKALVRQQLPEKYKEIFFDQSKNGYAGYIDGGASQEEFYKFIKPILEKMDGTEELLVKLNREDLLRKQRTFDNGSIPHQIHLGELHAILRRQEDFYPFLKDNREKIEKILTFRIPYYVGPLARGNSRFAWMTRKSEETITPWNFEEVVDKGASAQSFIERMTNFDKNLPNEKVLPKHSLLYEYFTVYNELTKVKYVTEGMRKPAFLSGEQKKAIVDLLFKTNRKVTVKQLKEDYFKKIECFDSVEISGVEDRFNASLGTYHDLLKIIKDKDFLDNEENEDILEDIVLTLTLFEDREMIEERLKTYAHLFDDKVMKQLKRRRYTGWGRLSRKLINGIRDKQSGKTILDFLKSDGFANRNFMQLIHDDSLTFKEDIQKAQVSGQGDSLHEHIANLAGSPAIKKGILQTVKVVDELVKVMGRHKPENIVIEMARENQTTQKGQKNSRERMKRIEEGIKELGSQILKEHPVENTQLQNEKLYLYYLQNGRDMYVDQELDINRLSDYDVDHIVPQSFLKDDSIDNKVLTRSDKARGKSDNVPSEEVVKKMKNYWRQLLNAKLITQRKFDNLTKAERGGLSELDKAGFIKRQLVETRQITKHVAQILDSRMNTKYDENDKLIREVKVITLKSKLVSDFRKDFQFYKVREINNYHHAHDAYLNAVVGTALIKKYPKLESEFVYGDYKVYDVRKMIAKSEQEIGKATAKYFFYSNIMNFFKTEITLANGEIRKRPLIETNGETGEIVWDKGRDFATVRKVLSMPQVNIVKKTEVQTGGFSKESILPKRNSDKLIARKKDWDPKKYGGFDSPTVAYSVLVVAKVEKGKSKKLKSVKELLGITIMERSSFEKNPIDFLEAKGYKEVKKDLIIKLPKYSLFELENGRKRMLASAGELQKGNELALPSKYVNFLYLASHYEKLKGSPEDNEQKQLFVEQHKHYLDEIIEQISEFSKRVILADANLDKVLSAYNKHRDKPIREQAENIIHLFTLTNLGAPAAFKYFDTTIDRKRYTSTKEVLDATLIHQSITGLYETRIDLSQLGGDGGGGSPAPGGTAPLEEEYRLFLEAPIQNVTLLEQWKREIPKVWAEINPPGLASTQAPIHVQLLSTALPVRVRQYPITLEAKRSLRETIRKFRAAGILRPVHSPWNTPLLPVRKSGTSEYRMVQDLREVNKRVETIHPTVPNPYTLLSLLPPDRIWYSVLDLKDAFFCIPLAPESQLIFAFEWADAEEGESGQLTWTRLPQGFKNSPTLFNEALNRDLQGFRLDHPSVSLLQYVDDLLIAADTQAACLSATRDLLMTLAELGYRVSGKKAQLCQEEVTYLGFKIHKGSRSLSNSRTQAILQIPVPKTKRQVREFLGKIGYCRLFIPGFAELAQPLYAATRPGNDPLVWGEKEEEAFQSLKLALTQPPALALPSLDKPFQLFVEETSGAAKGVLTQALGPWKRPVAYLSKRLDPVAAGWPRCLRAIAAAALLTREASKLTFGQDIEITSSHNLESLLRSPPDKWLTNARITQYQVLLLDPPRVRFKQTAALNPATLLPETDDTLPIHHCLDTLDSLTSTRPDLTDQPLAQAEATLFTDGSSYIRDGKRYAGAAVVTLDSVIWAEPLPIGTSAQKAELIALTKALEWSKDKSVNIYTDSRYAFATLHVHGMIYRERGWLTAGGKAIKNAPEILALLTAVWLPKRVAVMHCKGHQKDDAPTSTGNRRADEVAREVAIRPLSTQATISAGKRTADGSEFEKRTADGSEFESPKKKAKVE

SEQ ID NO: 1393 - protein, 2102 aa, synthetic construct
MPAAKRVKLDGGDKKYSIGLDIGTNSVGWAVITDEYKVPSKKFKVLGNTDRHSIKKNLIGALLFDSGETAEATRLKRTARRRYTRRKNRICYLQEIFSNEMAKVDDSFFHRLEESFLVEEDKKHERHPIFGNIVDEVAYHEKYPTIYHLRKKLVDSTDKADLRLIYLALAHMIKFRGHFLIEGDLNPDNSDVDKLFIQLVQTYNQLFEENPINASGVDAKAILSARLSKSRRLENLIAQLPGEKKNGLFGNLIALSLGLTPNFKSNFDLAEDAKLQLSKDTYDDDLDNLLAQIGDQYADLFLAAKNLSDAILLSDILRVNTEITKAPLSASMIKRYDEHHQDLTLLKALVRQQLPEKYKEIFFDQSKNGYAGYIDGGASQEEFYKFIKPILEKMDGTEELLVKLNREDLLRKQRTFDNGSIPHQIHLGELHAILRRQEDFYPFLKDNREKIEKILTFRIPYYVGPLARGNSRFAWMTRKSEETITPWNFEEVVDKGASAQSFIERMTNFDKNLPNEKVLPKHSLLYEYFTVYNELTKVKYVTEGMRKPAFLSGEQKKAIVDLLFKTNRKVTVKQLKEDYFKKIECFDSVEISGVEDRFNASLGTYHDLLKIIKDKDFLDNEENEDILEDIVLTLTLFEDREMIEERLKTYAHLFDDKVMKQLKRRRYTGWGRLSRKLINGIRDKQSGKTILDFLKSDGFANRNFMQLIHDDSLTFKEDIQKAQVSGQGDSLHEHIANLAGSPAIKKGILQTVKVVDELVKVMGRHKPENIVIEMARENQTTQKGQKNSRERMKRIEEGIKELGSQILKEHPVENTQLQNEKLYLYYLQNGRDMYVDQELDINRLSDYDVDHIVPQSFLKDDSIDNKVLTRSDKARGKSDNVPSEEVVKKMKNYWRQLLNAKLITQRKFDNLTKAERGGLSELDKAGFIKRQLVETRQITKHVAQILDSRMNTKYDENDKLIREVKVITLKSKLVSDFRKDFQFYKVREINNYHHAHDAYLNAVVGTALIKKYPKLESEFVYGDYKVYDVRKMIAKSEQEIGKATAKYFFYSNIMNFFKTEITLANGEIRKRPLIETNGETGEIVWDKGRDFATVRKVLSMPQVNIVKKTEVQTGGFSKESILPKRNSDKLIARKKDWDPKKYGGFDSPTVAYSVLVVAKVEKGKSKKLKSVKELLGITIMERSSFEKNPIDFLEAKGYKEVKKDLIIKLPKYSLFELENGRKRMLASAGELQKGNELALPSKYVNFLYLASHYEKLKGSPEDNEQKQLFVEQHKHYLDEIIEQISEFSKRVILADANLDKVLSAYNKHRDKPIREQAENIIHLFTLTNLGAPAAFKYFDTTIDRKRYTSTKEVLDATLIHQSITGLYETRIDLSQLGGDGGGGGGSEAAAKGGGGSGGTAPLEEEYRLFLEAPIQNVTLLEQWKREIPKVWAEINPPGLASTQAPIHVQLLSTALPVRVRQYPITLEAKRSLRETIRKFRAAGILRPVHSPWNTPLLPVRKSGTSEYRMVQDLREVNKRVETIHPTVPNPYTLLSLLPPDRIWYSVLDLKDAFFCIPLAPESQLIFAFEWADAEEGESGQLTWTRLPQGFKNSPTLFNEALNRDLQGFRLDHPSVSLLQYVDDLLIAADTQAACLSATRDLLMTLAELGYRVSGKKAQLCQEEVTYLGFKIHKGSRSLSNSRTQAILQIPVPKTKRQVREFLGKIGYCRLFIPGFAELAQPLYAATRPGNDPLVWGEKEEEAFQSLKLALTQPPALALPSLDKPFQLFVEETSGAAKGVLTQALGPWKRPVAYLSKRLDPVAAGWPRCLRAIAAAALLTREASKLTFGQDIEITSSHNLESLLRSPPDKWLTNARITQYQVLLLDPPRVRFKQTAALNPATLLPETDDTLPIHHCLDTLDSLTSTRPDLTDQPLAQAEATLFTDGSSYIRDGKRYAGAAVVTLDSVIWAEPLPIGTSAQKAELIALTKALEWSKDKSVNIYTDSRYAFATLHVHGMIYRERGWLTAGGKAIKNAPEILALLTAVWLPKRVAVMHCKGHQKDDAPTSTGNRRADEVAREVAIRPLSTQATISAGKRTADGSEFEKRTADGSEFESPKKKAKVE

SEQ ID NO: 1394 - protein, 2098 aa, synthetic construct
MPAAKRVKLDGGDKKYSIGLDIGTNSVGWAVITDEYKVPSKKFKVLGNTDRHSIKKNLIGALLFDSGETAEATRLKRTARRRYTRRKNRICYLQEIFSNEMAKVDDSFFHRLEESFLVEEDKKHERHPIFGNIVDEVAYHEKYPTIYHLRKKLVDSTDKADLRLIYLALAHMIKFRGHFLIEGDLNPDNSDVDKLFIQLVQTYNQLFEENPINASGVDAKAILSARLSKSRRLENLIAQLPGEKKNGLFGNLIALSLGLTPNFKSNFDLAEDAKLQLSKDTYDDDLDNLLAQIGDQYADLFLAAKNLSDAILLSDILRVNTEITKAPLSASMIKRYDEHHQDLTLLKALVRQQLPEKYKEIFFDQSKNGYAGYIDGGASQEEFYKFIKPILEKMDGTEELLVKLNREDLLRKQRTFDNGSIPHQIHLGELHAILRRQEDFYPFLKDNREKIEKILTFRIPYYVGPLARGNSRFAWMTRKSEETITPWNFEEVVDKGASAQSFIERMTNFDKNLPNEKVLPKHSLLYEYFTVYNELTKVKYVTEGMRKPAFLSGEQKKAIVDLLFKTNRKVTVKQLKEDYFKKIECFDSVEISGVEDRFNASLGTYHDLLKIIKDKDFLDNEENEDILEDIVLTLTLFEDREMIEERLKTYAHLFDDKVMKQLKRRRYTGWGRLSRKLINGIRDKQSGKTILDFLKSDGFANRNFMQLIHDDSLTFKEDIQKAQVSGQGDSLHEHIANLAGSPAIKKGILQTVKVVDELVKVMGRHKPENIVIEMARENQTTQKGQKNSRERMKRIEEGIKELGSQILKEHPVENTQLQNEKLYLYYLQNGRDMYVDQELDINRLSDYDVDHIVPQSFLKDDSIDNKVLTRSDKARGKSDNVPSEEVVKKMKNYWRQLLNAKLITQRKFDNLTKAERGGLSELDKAGFIKRQLVETRQITKHVAQILDSRMNTKYDENDKLIREVKVITLKSKLVSDFRKDFQFYKVREINNYHHAHDAYLNAVVGTALIKKYPKLESEFVYGDYKVYDVRKMIAKSEQEIGKATAKYFFYSNIMNFFKTEITLANGEIRKRPLIETNGETGEIVWDKGRDFATVRKVLSMPQVNIVKKTEVQTGGFSKESILPKRNSDKLIARKKDWDPKKYGGFDSPTVAYSVLVVAKVEKGKSKKLKSVKELLGITIMERSSFEKNPIDFLEAKGYKEVKKDLIIKLPKYSLFELENGRKRMLASAGELQKGNELALPSKYVNFLYLASHYEKLKGSPEDNEQKQLFVEQHKHYLDEIIEQISEFSKRVILADANLDKVLSAYNKHRDKPIREQAENIIHLFTLTNLGAPAAFKYFDTTIDRKRYTSTKEVLDATLIHQSITGLYETRIDLSQLGGDGGGSSEAAAKGGGGGTAPLEEEYRLFLEAPIQNVTLLEQWKREIPKVWAEINPPGLASTQAPIHVQLLSTALPVRVRQYPITLEAKRSLRETIRKFRAAGILRPVHSPWNTPLLPVRKSGTSEYRMVQDLREVNKRVETIHPTVPNPYTLLSLLPPDRIWYSVLDLKDAFFCIPLAPESQLIFAFEWADAEEGESGQLTWTRLPQGFKNSPTLFNEALNRDLQGFRLDHPSVSLLQYVDDLLIAADTQAACLSATRDLLMTLAELGYRVSGKKAQLCQEEVTYLGFKIHKGSRSLSNSRTQAILQIPVPKTKRQVREFLGKIGYCRLFIPGFAELAQPLYAATRPGNDPLVWGEKEEEAFQSLKLALTQPPALALPSLDKPFQLFVEETSGAAKGVLTQALGPWKRPVAYLSKRLDPVAAGWPRCLRAIAAAALLTREASKLTFGQDIEITSSHNLESLLRSPPDKWLTNARITQYQVLLLDPPRVRFKQTAALNPATLLPETDDTLPIHHCLDTLDSLTSTRPDLTDQPLAQAEATLFTDGSSYIRDGKRYAGAAVVTLDSVIWAEPLPIGTSAQKAELIALTKALEWSKDKSVNIYTDSRYAFATLHVHGMIYRERGWLTAGGKAIKNAPEILALLTAVWLPKRVAVMHCKGHQKDDAPTSTGNRRADEVAREVAIRPLSTQATISAGKRTADGSEFEKRTADGSEFESPKKKAKVE

SEQ ID NO: 1395 - protein, 2098 aa, synthetic construct
MPAAKRVKLDGGDKKYSIGLDIGTNSVGWAVITDEYKVPSKKFKVLGNTDRHSIKKNLIGALLFDSGETAEATRLKRTARRRYTRRKNRICYLQEIFSNEMAKVDDSFFHRLEESFLVEEDKKHERHPIFGNIVDEVAYHEKYPTIYHLRKKLVDSTDKADLRLIYLALAHMIKFRGHFLIEGDLNPDNSDVDKLFIQLVQTYNQLFEENPINASGVDAKAILSARLSKSRRLENLIAQLPGEKKNGLFGNLIALSLGLTPNFKSNFDLAEDAKLQLSKDTYDDDLDNLLAQIGDQYADLFLAAKNLSDAILLSDILRVNTEITKAPLSASMIKRYDEHHQDLTLLKALVRQQLPEKYKEIFFDQSKNGYAGYIDGGASQEEFYKFIKPILEKMDGTEELLVKLNREDLLRKQRTFDNGSIPHQIHLGELHAILRRQEDFYPFLKDNREKIEKILTFRIPYYVGPLARGNSRFAWMTRKSEETITPWNFEEVVDKGASAQSFIERMTNFDKNLPNEKVLPKHSLLYEYFTVYNELTKVKYVTEGMRKPAFLSGEQKKAIVDLLFKTNRKVTVKQLKEDYFKKIECFDSVEISGVEDRFNASLGTYHDLLKIIKDKDFLDNEENEDILEDIVLTLTLFEDREMIEERLKTYAHLFDDKVMKQLKRRRYTGWGRLSRKLINGIRDKQSGKTILDFLKSDGFANRNFMQLIHDDSLTFKEDIQKAQVSGQGDSLHEHIANLAGSPAIKKGILQTVKVVDELVKVMGRHKPENIVIEMARENQTTQKGQKNSRERMKRIEEGIKELGSQILKEHPVENTQLQNEKLYLYYLQNGRDMYVDQELDINRLSDYDVDHIVPQSFLKDDSIDNKVLTRSDKARGKSDNVPSEEVVKKMKNYWRQLLNAKLITQRKFDNLTKAERGGLSELDKAGFIKRQLVETRQITKHVAQILDSRMNTKYDENDKLIREVKVITLKSKLVSDFRKDFQFYKVREINNYHHAHDAYLNAVVGTALIKKYPKLESEFVYGDYKVYDVRKMIAKSEQEIGKATAKYFFYSNIMNFFKTEITLANGEIRKRPLIETNGETGEIVWDKGRDFATVRKVLSMPQVNIVKKTEVQTGGFSKESILPKRNSDKLIARKKDWDPKKYGGFDSPTVAYSVLVVAKVEKGKSKKLKSVKELLGITIMERSSFEKNPIDFLEAKGYKEVKKDLIIKLPKYSLFELENGRKRMLASAGELQKGNELALPSKYVNFLYLASHYEKLKGSPEDNEQKQLFVEQHKHYLDEIIEQISEFSKRVILADANLDKVLSAYNKHRDKPIREQAENIIHLFTLTNLGAPAAFKYFDTTIDRKRYTSTKEVLDATLIHQSITGLYETRIDLSQLGGDGGGGGEAAAKGSSGGTAPLEEEYRLFLEAPIQNVTLLEQWKREIPKVWAEINPPGLASTQAPIHVQLLSTALPVRVRQYPITLEAKRSLRETIRKFRAAGILRPVHSPWNTPLLPVRKSGTSEYRMVQDLREVNKRVETIHPTVPNPYTLLSLLPPDRIWYSVLDLKDAFFCIPLAPESQLIFAFEWADAEEGESGQLTWTRLPQGFKNSPTLFNEALNRDLQGFRLDHPSVSLLQYVDDLLIAADTQAACLSATRDLLMTLAELGYRVSGKKAQLCQEEVTYLGFKIHKGSRSLSNSRTQAILQIPVPKTKRQVREFLGKIGYCRLFIPGFAELAQPLYAATRPGNDPLVWGEKEEEAFQSLKLALTQPPALALPSLDKPFQLFVEETSGAAKGVLTQALGPWKRPVAYLSKRLDPVAAGWPRCLRAIAAAALLTREASKLTFGQDIEITSSHNLESLLRSPPDKWLTNARITQYQVLLLDPPRVRFKQTAALNPATLLPETDDTLPIHHCLDTLDSLTSTRPDLTDQPLAQAEATLFTDGSSYIRDGKRYAGAAVVTLDSVIWAEPLPIGTSAQKAELIALTKALEWSKDKSVNIYTDSRYAFATLHVHGMIYRERGWLTAGGKAIKNAPEILALLTAVWLPKRVAVMHCKGHQKDDAPTSTGNRRADEVAREVAIRPLSTQATISAGKRTADGSEFEKRTADGSEFESPKKKAKVE

SEQ ID NO: 1396 - protein, 2093 aa, synthetic construct
MPAAKRVKLDGGDKKYSIGLDIGTNSVGWAVITDEYKVPSKKFKVLGNTDRHSIKKNLIGALLFDSGETAEATRLKRTARRRYTRRKNRICYLQEIFSNEMAKVDDSFFHRLEESFLVEEDKKHERHPIFGNIVDEVAYHEKYPTIYHLRKKLVDSTDKADLRLIYLALAHMIKFRGHFLIEGDLNPDNSDVDKLFIQLVQTYNQLFEENPINASGVDAKAILSARLSKSRRLENLIAQLPGEKKNGLFGNLIALSLGLTPNFKSNFDLAEDAKLQLSKDTYDDDLDNLLAQIGDQYADLFLAAKNLSDAILLSDILRVNTEITKAPLSASMIKRYDEHHQDLTLLKALVRQQLPEKYKEIFFDQSKNGYAGYIDGGASQEEFYKFIKPILEKMDGTEELLVKLNREDLLRKQRTFDNGSIPHQIHLGELHAILRRQEDFYPFLKDNREKIEKILTFRIPYYVGPLARGNSRFAWMTRKSEETITPWNFEEVVDKGASAQSFIERMTNFDKNLPNEKVLPKHSLLYEYFTVYNELTKVKYVTEGMRKPAFLSGEQKKAIVDLLFKTNRKVTVKQLKEDYFKKIECFDSVEISGVEDRFNASLGTYHDLLKIIKDKDFLDNEENEDILEDIVLTLTLFEDREMIEERLKTYAHLFDDKVMKQLKRRRYTGWGRLSRKLINGIRDKQSGKTILDFLKSDGFANRNFMQLIHDDSLTFKEDIQKAQVSGQGDSLHEHIANLAGSPAIKKGILQTVKVVDELVKVMGRHKPENIVIEMARENQTTQKGQKNSRERMKRIEEGIKELGSQILKEHPVENTQLQNEKLYLYYLQNGRDMYVDQELDINRLSDYDVDHIVPQSFLKDDSIDNKVLTRSDKARGKSDNVPSEEVVKKMKNYWRQLLNAKLITQRKFDNLTKAERGGLSELDKAGFIKRQLVETRQITKHVAQILDSRMNTKYDENDKLIREVKVITLKSKLVSDFRKDFQFYKVREINNYHHAHDAYLNAVVGTALIKKYPKLESEFVYGDYKVYDVRKMIAKSEQEIGKATAKYFFYSNIMNFFKTEITLANGEIRKRPLIETNGETGEIVWDKGRDFATVRKVLSMPQVNIVKKTEVQTGGFSKESILPKRNSDKLIARKKDWDPKKYGGFDSPTVAYSVLVVAKVEKGKSKKLKSVKELLGITIMERSSFEKNPIDFLEAKGYKEVKKDLIIKLPKYSLFELENGRKRMLASAGELQKGNELALPSKYVNFLYLASHYEKLKGSPEDNEQKQLFVEQHKHYLDEIIEQISEFSKRVILADANLDKVLSAYNKHRDKPIREQAENIIHLFTLTNLGAPAAFKYFDTTIDRKRYTSTKEVLDATLIHQSITGLYETRIDLSQLGGDGGGGGGGGGGTAPLEEEYRLFLEAPIQNVTLLEQWKREIPKVWAEINPPGLASTQAPIHVQLLSTALPVRVRQYPITLEAKRSLRETIRKFRAAGILRPVHSPWNTPLLPVRKSGTSEYRMVQDLREVNKRVETIHPTVPNPYTLLSLLPPDRIWYSVLDLKDAFFCIPLAPESQLIFAFEWADAEEGESGQLTWTRLPQGFKNSPTLFNEALNRDLQGFRLDHPSVSLLQYVDDLLIAADTQAACLSATRDLLMTLAELGYRVSGKKAQLCQEEVTYLGFKIHKGSRSLSNSRTQAILQIPVPKTKRQVREFLGKIGYCRLFIPGFAELAQPLYAATRPGNDPLVWGEKEEEAFQSLKLALTQPPALALPSLDKPFQLFVEETSGAAKGVLTQALGPWKRPVAYLSKRLDPVAAGWPRCLRAIAAAALLTREASKLTFGQDIEITSSHNLESLLRSPPDKWLTNARITQYQVLLLDPPRVRFKQTAALNPATLLPETDDTLPIHHCLDTLDSLTSTRPDLTDQPLAQAEATLFTDGSSYIRDGKRYAGAAVVTLDSVIWAEPLPIGTSAQKAELIALTKALEWSKDKSVNIYTDSRYAFATLHVHGMIYRERGWLTAGGKAIKNAPEILALLTAVWLPKRVAVMHCKGHQKDDAPTSTGNRRADEVAREVAIRPLSTQATISAGKRTADGSEFEKRTADGSEFESPKKKAKVE

SEQ ID NO: 1397 - protein, 2093 aa, synthetic construct
MPAAKRVKLDGGDKKYSIGLDIGTNSVGWAVITDEYKVPSKKFKVLGNTDRHSIKKNLIGALLFDSGETAEATRLKRTARRRYTRRKNRICYLQEIFSNEMAKVDDSFFHRLEESFLVEEDKKHERHPIFGNIVDEVAYHEKYPTIYHLRKKLVDSTDKADLRLIYLALAHMIKFRGHFLIEGDLNPDNSDVDKLFIQLVQTYNQLFEENPINASGVDAKAILSARLSKSRRLENLIAQLPGEKKNGLFGNLIALSLGLTPNFKSNFDLAEDAKLQLSKDTYDDDLDNLLAQIGDQYADLFLAAKNLSDAILLSDILRVNTEITKAPLSASMIKRYDEHHQDLTLLKALVRQQLPEKYKEIFFDQSKNGYAGYIDGGASQEEFYKFIKPILEKMDGTEELLVKLNREDLLRKQRTFDNGSIPHQIHLGELHAILRRQEDFYPFLKDNREKIEKILTFRIPYYVGPLARGNSRFAWMTRKSEETITPWNFEEVVDKGASAQSFIERMTNFDKNLPNEKVLPKHSLLYEYFTVYNELTKVKYVTEGMRKPAFLSGEQKKAIVDLLFKTNRKVTVKQLKEDYFKKIECFDSVEISGVEDRFNASLGTYHDLLKIIKDKDFLDNEENEDILEDIVLTLTLFEDREMIEERLKTYAHLFDDKVMKQLKRRRYTGWGRLSRKLINGIRDKQSGKTILDFLKSDGFANRNFMQLIHDDSLTFKEDIQKAQVSGQGDSLHEHIANLAGSPAIKKGILQTVKVVDELVKVMGRHKPENIVIEMARENQTTQKGQKNSRERMKRIEEGIKELGSQILKEHPVENTQLQNEKLYLYYLQNGRDMYVDQELDINRLSDYDVDHIVPQSFLKDDSIDNKVLTRSDKARGKSDNVPSEEVVKKMKNYWRQLLNAKLITQRKFDNLTKAERGGLSELDKAGFIKRQLVETRQITKHVAQILDSRMNTKYDENDKLIREVKVITLKSKLVSDFRKDFQFYKVREINNYHHAHDAYLNAVVGTALIKKYPKLESEFVYGDYKVYDVRKMIAKSEQEIGKATAKYFFYSNIMNFFKTEITLANGEIRKRPLIETNGETGEIVWDKGRDFATVRKVLSMPQVNIVKKTEVQTGGFSKESILPKRNSDKLIARKKDWDPKKYGGFDSPTVAYSVLVVAKVEKGKSKKLKSVKELLGITIMERSSFEKNPIDFLEAKGYKEVKKDLIIKLPKYSLFELENGRKRMLASAGELQKGNELALPSKYVNFLYLASHYEKLKGSPEDNEQKQLFVEQHKHYLDEIIEQISEFSKRVILADANLDKVLSAYNKHRDKPIREQAENIIHLFTLTNLGAPAAFKYFDTTIDRKRYTSTKEVLDATLIHQSITGLYETRIDLSQLGGDGGGGGPAPGGTAPLEEEYRLFLEAPIQNVTLLEQWKREIPKVWAEINPPGLASTQAPIHVQLLSTALPVRVRQYPITLEAKRSLRETIRKFRAAGILRPVHSPWNTPLLPVRKSGTSEYRMVQDLREVNKRVETIHPTVPNPYTLLSLLPPDRIWYSVLDLKDAFFCIPLAPESQLIFAFEWADAEEGESGQLTWTRLPQGFKNSPTLFNEALNRDLQGFRLDHPSVSLLQYVDDLLIAADTQAACLSATRDLLMTLAELGYRVSGKKAQLCQEEVTYLGFKIHKGSRSLSNSRTQAILQIPVPKTKRQVREFLGKIGYCRLFIPGFAELAQPLYAATRPGNDPLVWGEKEEEAFQSLKLALTQPPALALPSLDKPFQLFVEETSGAAKGVLTQALGPWKRPVAYLSKRLDPVAAGWPRCLRAIAAAALLTREASKLTFGQDIEITSSHNLESLLRSPPDKWLTNARITQYQVLLLDPPRVRFKQTAALNPATLLPETDDTLPIHHCLDTLDSLTSTRPDLTDQPLAQAEATLFTDGSSYIRDGKRYAGAAVVTLDSVIWAEPLPIGTSAQKAELIALTKALEWSKDKSVNIYTDSRYAFATLHVHGMIYRERGWLTAGGKAIKNAPEILALLTAVWLPKRVAVMHCKGHQKDDAPTSTGNRRADEVAREVAIRPLSTQATISAGKRTADGSEFEKRTADGSEFESPKKKAKVE

SEQ ID NO: 1398 - protein, 2099 aa, synthetic construct
MPAAKRVKLDGGDKKYSIGLDIGTNSVGWAVITDEYKVPSKKFKVLGNTDRHSIKKNLIGALLFDSGETAEATRLKRTARRRYTRRKNRICYLQEIFSNEMAKVDDSFFHRLEESFLVEEDKKHERHPIFGNIVDEVAYHEKYPTIYHLRKKLVDSTDKADLRLIYLALAHMIKFRGHFLIEGDLNPDNSDVDKLFIQLVQTYNQLFEENPINASGVDAKAILSARLSKSRRLENLIAQLPGEKKNGLFGNLIALSLGLTPNFKSNFDLAEDAKLQLSKDTYDDDLDNLLAQIGDQYADLFLAAKNLSDAILLSDILRVNTEITKAPLSASMIKRYDEHHQDLTLLKALVRQQLPEKYKEIFFDQSKNGYAGYIDGGASQEEFYKFIKPILEKMDGTEELLVKLNREDLLRKQRTFDNGSIPHQIHLGELHAILRRQEDFYPFLKDNREKIEKILTFRIPYYVGPLARGNSRFAWMTRKSEETITPWNFEEVVDKGASAQSFIERMTNFDKNLPNEKVLPKHSLLYEYFTVYNELTKVKYVTEGMRKPAFLSGEQKKAIVDLLFKTNRKVTVKQLKEDYFKKIECFDSVEISGVEDRFNASLGTYHDLLKIIKDKDFLDNEENEDILEDIVLTLTLFEDREMIEERLKTYAHLFDDKVMKQLKRRRYTGWGRLSRKLINGIRDKQSGKTILDFLKSDGFANRNFMQLIHDDSLTFKEDIQKAQVSGQGDSLHEHIANLAGSPAIKKGILQTVKVVDELVKVMGRHKPENIVIEMARENQTTQKGQKNSRERMKRIEEGIKELGSQILKEHPVENTQLQNEKLYLYYLQNGRDMYVDQELDINRLSDYDVDHIVPQSFLKDDSIDNKVLTRSDKARGKSDNVPSEEVVKKMKNYWRQLLNAKLITQRKFDNLTKAERGGLSELDKAGFIKRQLVETRQITKHVAQILDSRMNTKYDENDKLIREVKVITLKSKLVSDFRKDFQFYKVREINNYHHAHDAYLNAVVGTALIKKYPKLESEFVYGDYKVYDVRKMIAKSEQEIGKATAKYFFYSNIMNFFKTEITLANGEIRKRPLIETNGETGEIVWDKGRDFATVRKVLSMPQVNIVKKTEVQTGGFSKESILPKRNSDKLIARKKDWDPKKYGGFDSPTVAYSVLVVAKVEKGKSKKLKSVKELLGITIMERSSFEKNPIDFLEAKGYKEVKKDLIIKLPKYSLFELENGRKRMLASAGELQKGNELALPSKYVNFLYLASHYEKLKGSPEDNEQKQLFVEQHKHYLDEIIEQISEFSKRVILADANLDKVLSAYNKHRDKPIREQAENIIHLFTLTNLGAPAAFKYFDTTIDRKRYTSTKEVLDATLIHQSITGLYETRIDLSQLGGDGGGGSGGSGGSGGSGGTAPLEEEYRLFLEAPIQNVTLLEQWKREIPKVWAEINPPGLASTQAPIHVQLLSTALPVRVRQYPITLEAKRSLRETIRKFRAAGILRPVHSPWNTPLLPVRKSGTSEYRMVQDLREVNKRVETIHPTVPNPYTLLSLLPPDRIWYSVLDLKDAFFCIPLAPESQLIFAFEWADAEEGESGQLTWTRLPQGFKNSPTLFNEALNRDLQGFRLDHPSVSLLQYVDDLLIAADTQAACLSATRDLLMTLAELGYRVSGKKAQLCQEEVTYLGFKIHKGSRSLSNSRTQAILQIPVPKTKRQVREFLGKIGYCRLFIPGFAELAQPLYAATRPGNDPLVWGEKEEEAFQSLKLALTQPPALALPSLDKPFQLFVEETSGAAKGVLTQALGPWKRPVAYLSKRLDPVAAGWPRCLRAIAAAALLTREASKLTFGQDIEITSSHNLESLLRSPPDKWLTNARITQYQVLLLDPPRVRFKQTAALNPATLLPETDDTLPIHHCLDTLDSLTSTRPDLTDQPLAQAEATLFTDGSSYIRDGKRYAGAAVVTLDSVIWAEPLPIGTSAQKAELIALTKALEWSKDKSVNIYTDSRYAFATLHVHGMIYRERGWLTAGGKAIKNAPEILALLTAVWLPKRVAVMHCKGHQKDDAPTSTGNRRADEVAREVAIRPLSTQATISAGKRTADGSEFEKRTADGSEFESPKKKAKVE

SEQ ID NO: 1399 - protein, 2102 aa, synthetic construct
MPAAKRVKLDGGDKKYSIGLDIGTNSVGWAVITDEYKVPSKKFKVLGNTDRHSIKKNLIGALLFDSGETAEATRLKRTARRRYTRRKNRICYLQEIFSNEMAKVDDSFFHRLEESFLVEEDKKHERHPIFGNIVDEVAYHEKYPTIYHLRKKLVDSTDKADLRLIYLALAHMIKFRGHFLIEGDLNPDNSDVDKLFIQLVQTYNQLFEENPINASGVDAKAILSARLSKSRRLENLIAQLPGEKKNGLFGNLIALSLGLTPNFKSNFDLAEDAKLQLSKDTYDDDLDNLLAQIGDQYADLFLAAKNLSDAILLSDILRVNTEITKAPLSASMIKRYDEHHQDLTLLKALVRQQLPEKYKEIFFDQSKNGYAGYIDGGASQEEFYKFIKPILEKMDGTEELLVKLNREDLLRKQRTFDNGSIPHQIHLGELHAILRRQEDFYPFLKDNREKIEKILTFRIPYYVGPLARGNSRFAWMTRKSEETITPWNFEEVVDKGASAQSFIERMTNFDKNLPNEKVLPKHSLLYEYFTVYNELTKVKYVTEGMRKPAFLSGEQKKAIVDLLFKTNRKVTVKQLKEDYFKKIECFDSVEISGVEDRFNASLGTYHDLLKIIKDKDFLDNEENEDILEDIVLTLTLFEDREMIEERLKTYAHLFDDKVMKQLKRRRYTGWGRLSRKLINGIRDKQSGKTILDFLKSDGFANRNFMQLIHDDSLTFKEDIQKAQVSGQGDSLHEHIANLAGSPAIKKGILQTVKVVDELVKVMGRHKPENIVIEMARENQTTQKGQKNSRERMKRIEEGIKELGSQILKEHPVENTQLQNEKLYLYYLQNGRDMYVDQELDINRLSDYDVDHIVPQSFLKDDSIDNKVLTRSDKARGKSDNVPSEEVVKKMKNYWRQLLNAKLITQRKFDNLTKAERGGLSELDKAGFIKRQLVETRQITKHVAQILDSRMNTKYDENDKLIREVKVITLKSKLVSDFRKDFQFYKVREINNYHHAHDAYLNAVVGTALIKKYPKLESEFVYGDYKVYDVRKMIAKSEQEIGKATAKYFFYSNIMNFFKTEITLANGEIRKRPLIETNGETGEIVWDKGRDFATVRKVLSMPQVNIVKKTEVQTGGFSKESILPKRNSDKLIARKKDWDPKKYGGFDSPTVAYSVLVVAKVEKGKSKKLKSVKELLGITIMERSSFEKNPIDFLEAKGYKEVKKDLIIKLPKYSLFELENGRKRMLASAGELQKGNELALPSKYVNFLYLASHYEKLKGSPEDNEQKQLFVEQHKHYLDEIIEQISEFSKRVILADANLDKVLSAYNKHRDKPIREQAENIIHLFTLTNLGAPAAFKYFDTTIDRKRYTSTKEVLDATLIHQSITGLYETRIDLSQLGGDGGEAAAKGGGGSEAAAKGGTAPLEEEYRLFLEAPIQNVTLLEQWKREIPKVWAEINPPGLASTQAPIHVQLLSTALPVRVRQYPITLEAKRSLRETIRKFRAAGILRPVHSPWNTPLLPVRKSGTSEYRMVQDLREVNKRVETIHPTVPNPYTLLSLLPPDRIWYSVLDLKDAFFCIPLAPESQLIFAFEWADAEEGESGQLTWTRLPQGFKNSPTLFNEALNRDLQGFRLDHPSVSLLQYVDDLLIAADTQAACLSATRDLLMTLAELGYRVSGKKAQLCQEEVTYLGFKIHKGSRSLSNSRTQAILQIPVPKTKRQVREFLGKIGYCRLFIPGFAELAQPLYAATRPGNDPLVWGEKEEEAFQSLKLALTQPPALALPSLDKPFQLFVEETSGAAKGVLTQALGPWKRPVAYLSKRLDPVAAGWPRCLRAIAAAALLTREASKLTFGQDIEITSSHNLESLLRSPPDKWLTNARITQYQVLLLDPPRVRFKQTAALNPATLLPETDDTLPIHHCLDTLDSLTSTRPDLTDQPLAQAEATLFTDGSSYIRDGKRYAGAAVVTLDSVIWAEPLPIGTSAQKAELIALTKALEWSKDKSVNIYTDSRYAFATLHVHGMIYRERGWLTAGGKAIKNAPEILALLTAVWLPKRVAVMHCKGHQKDDAPTSTGNRRADEVAREVAIRPLSTQATISAGKRTADGSEFEKRTADGSEFESPKKKAKVE

SEQ ID NO: 1400 - protein, 2112 aa, synthetic construct
MPAAKRVKLDGGDKKYSIGLDIGTNSVGWAVITDEYKVPSKKFKVLGNTDRHSIKKNLIGALLFDSGETAEATRLKRTARRRYTRRKNRICYLQEIFSNEMAKVDDSFFHRLEESFLVEEDKKHERHPIFGNIVDEVAYHEKYPTIYHLRKKLVDSTDKADLRLIYLALAHMIKFRGHFLIEGDLNPDNSDVDKLFIQLVQTYNQLFEENPINASGVDAKAILSARLSKSRRLENLIAQLPGEKKNGLFGNLIALSLGLTPNFKSNFDLAEDAKLQLSKDTYDDDLDNLLAQIGDQYADLFLAAKNLSDAILLSDILRVNTEITKAPLSASMIKRYDEHHQDLTLLKALVRQQLPEKYKEIFFDQSKNGYAGYIDGGASQEEFYKFIKPILEKMDGTEELLVKLNREDLLRKQRTFDNGSIPHQIHLGELHAILRRQEDFYPFLKDNREKIEKILTFRIPYYVGPLARGNSRFAWMTRKSEETITPWNFEEVVDKGASAQSFIERMTNFDKNLPNEKVLPKHSLLYEYFTVYNELTKVKYVTEGMRKPAFLSGEQKKAIVDLLFKTNRKVTVKQLKEDYFKKIECFDSVEISGVEDRFNASLGTYHDLLKIIKDKDFLDNEENEDILEDIVLTLTLFEDREMIEERLKTYAHLFDDKVMKQLKRRRYTGWGRLSRKLINGIRDKQSGKTILDFLKSDGFANRNFMQLIHDDSLTFKEDIQKAQVSGQGDSLHEHIANLAGSPAIKKGILQTVKVVDELVKVMGRHKPENIVIEMARENQTTQKGQKNSRERMKRIEEGIKELGSQILKEHPVENTQLQNEKLYLYYLQNGRDMYVDQELDINRLSDYDVDHIVPQSFLKDDSIDNKVLTRSDKARGKSDNVPSEEVVKKMKNYWRQLLNAKLITQRKFDNLTKAERGGLSELDKAGFIKRQLVETRQITKHVAQILDSRMNTKYDENDKLIREVKVITLKSKLVSDFRKDFQFYKVREINNYHHAHDAYLNAVVGTALIKKYPKLESEFVYGDYKVYDVRKMIAKSEQEIGKATAKYFFYSNIMNFFKTEITLANGEIRKRPLIETNGETGEIVWDKGRDFATVRKVLSMPQVNIVKKTEVQTGGFSKESILPKRNSDKLIARKKDWDPKKYGGFDSPTVAYSVLVVAKVEKGKSKKLKSVKELLGITIMERSSFEKNPIDFLEAKGYKEVKKDLIIKLPKYSLFELENGRKRMLASAGELQKGNELALPSKYVNFLYLASHYEKLKGSPEDNEQKQLFVEQHKHYLDEIIEQISEFSKRVILADANLDKVLSAYNKHRDKPIREQAENIIHLFTLTNLGAPAAFKYFDTTIDRKRYTSTKEVLDATLIHQSITGLYETRIDLSQLGGDGGEAAAKEAAAKEAAAKEAAAKEAAAKGGTAPLEEEYRLFLEAPIQNVTLLEQWKREIPKVWAEINPPGLASTQAPIHVQLLSTALPVRVRQYPITLEAKRSLRETIRKFRAAGILRPVHSPWNTPLLPVRKSGTSEYRMVQDLREVNKRVETIHPTVPNPYTLLSLLPPDRIWYSVLDLKDAFFCIPLAPESQLIFAFEWADAEEGESGQLTWTRLPQGFKNSPTLFNEALNRDLQGFRLDHPSVSLLQYVDDLLIAADTQAACLSATRDLLMTLAELGYRVSGKKAQLCQEEVTYLGFKIHKGSRSLSNSRTQAILQIPVPKTKRQVREFLGKIGYCRLFIPGFAELAQPLYAATRPGNDPLVWGEKEEEAFQSLKLALTQPPALALPSLDKPFQLFVEETSGAAKGVLTQALGPWKRPVAYLSKRLDPVAAGWPRCLRAIAAAALLTREASKLTFGQDIEITSSHNLESLLRSPPDKWLTNARITQYQVLLLDPPRVRFKQTAALNPATLLPETDDTLPIHHCLDTLDSLTSTRPDLTDQPLAQAEATLFTDGSSYIRDGKRYAGAAVVTLDSVIWAEPLPIGTSAQKAELIALTKALEWSKDKSVNIYTDSRYAFATLHVHGMIYRERGWLTAGGKAIKNAPEILALLTAVWLPKRVAVMHCKGHQKDDAPTSTGNRRADEVAREVAIRPLSTQATISAGKRTADGSEFEKRTADGSEFESPKKKAKVE

SEQ ID NO: 1401 - protein, 2096 aa, synthetic construct
MPAAKRVKLDGGDKKYSIGLDIGTNSVGWAVITDEYKVPSKKFKVLGNTDRHSIKKNLIGALLFDSGETAEATRLKRTARRRYTRRKNRICYLQEIFSNEMAKVDDSFFHRLEESFLVEEDKKHERHPIFGNIVDEVAYHEKYPTIYHLRKKLVDSTDKADLRLIYLALAHMIKFRGHFLIEGDLNPDNSDVDKLFIQLVQTYNQLFEENPINASGVDAKAILSARLSKSRRLENLIAQLPGEKKNGLFGNLIALSLGLTPNFKSNFDLAEDAKLQLSKDTYDDDLDNLLAQIGDQYADLFLAAKNLSDAILLSDILRVNTEITKAPLSASMIKRYDEHHQDLTLLKALVRQQLPEKYKEIFFDQSKNGYAGYIDGGASQEEFYKFIKPILEKMDGTEELLVKLNREDLLRKQRTFDNGSIPHQIHLGELHAILRRQEDFYPFLKDNREKIEKILTFRIPYYVGPLARGNSRFAWMTRKSEETITPWNFEEVVDKGASAQSFIERMTNFDKNLPNEKVLPKHSLLYEYFTVYNELTKVKYVTEGMRKPAFLSGEQKKAIVDLLFKTNRKVTVKQLKEDYFKKIECFDSVEISGVEDRFNASLGTYHDLLKIIKDKDFLDNEENEDILEDIVLTLTLFEDREMIEERLKTYAHLFDDKVMKQLKRRRYTGWGRLSRKLINGIRDKQSGKTILDFLKSDGFANRNFMQLIHDDSLTFKEDIQKAQVSGQGDSLHEHIANLAGSPAIKKGILQTVKVVDELVKVMGRHKPENIVIEMARENQTTQKGQKNSRERMKRIEEGIKELGSQILKEHPVENTQLQNEKLYLYYLQNGRDMYVDQELDINRLSDYDVDHIVPQSFLKDDSIDNKVLTRSDKARGKSDNVPSEEVVKKMKNYWRQLLNAKLITQRKFDNLTKAERGGLSELDKAGFIKRQLVETRQITKHVAQILDSRMNTKYDENDKLIREVKVITLKSKLVSDFRKDFQFYKVREINNYHHAHDAYLNAVVGTALIKKYPKLESEFVYGDYKVYDVRKMIAKSEQEIGKATAKYFFYSNIMNFFKTEITLANGEIRKRPLIETNGETGEIVWDKGRDFATVRKVLSMPQVNIVKKTEVQTGGFSKESILPKRNSDKLIARKKDWDPKKYGGFDSPTVAYSVLVVAKVEKGKSKKLKSVKELLGITIMERSSFEKNPIDFLEAKGYKEVKKDLIIKLPKYSLFELENGRKRMLASAGELQKGNELALPSKYVNFLYLASHYEKLKGSPEDNEQKQLFVEQHKHYLDEIIEQISEFSKRVILADANLDKVLSAYNKHRDKPIREQAENIIHLFTLTNLGAPAAFKYFDTTIDRKRYTSTKEVLDATLIHQSITGLYETRIDLSQLGGDGGPAPGSSGGSGGTAPLEEEYRLFLEAPIQNVTLLEQWKREIPKVWAEINPPGLASTQAPIHVQLLSTALPVRVRQYPITLEAKRSLRETIRKFRAAGILRPVHSPWNTPLLPVRKSGTSEYRMVQDLREVNKRVETIHPTVPNPYTLLSLLPPDRIWYSVLDLKDAFFCIPLAPESQLIFAFEWADAEEGESGQLTWTRLPQGFKNSPTLFNEALNRDLQGFRLDHPSVSLLQYVDDLLIAADTQAACLSATRDLLMTLAELGYRVSGKKAQLCQEEVTYLGFKIHKGSRSLSNSRTQAILQIPVPKTKRQVREFLGKIGYCRLFIPGFAELAQPLYAATRPGNDPLVWGEKEEEAFQSLKLALTQPPALALPSLDKPFQLFVEETSGAAKGVLTQALGPWKRPVAYLSKRLDPVAAGWPRCLRAIAAAALLTREASKLTFGQDIEITSSHNLESLLRSPPDKWLTNARITQYQVLLLDPPRVRFKQTAALNPATLLPETDDTLPIHHCLDTLDSLTSTRPDLTDQPLAQAEATLFTDGSSYIRDGKRYAGAAVVTLDSVIWAEPLPIGTSAQKAELIALTKALEWSKDKSVNIYTDSRYAFATLHVHGMIYRERGWLTAGGKAIKNAPEILALLTAVWLPKRVAVMHCKGHQKDDAPTSTGNRRADEVAREVAIRPLSTQATISAGKRTADGSEFEKRTADGSEFESPKKKAKVE

SEQ ID NO: 1402 - protein, 2096 aa, synthetic construct
MPAAKRVKLDGGDKKYSIGLDIGTNSVGWAVITDEYKVPSKKFKVLGNTDRHSIKKNLIGALLFDSGETAEATRLKRTARRRYTRRKNRICYLQEIFSNEMAKVDDSFFHRLEESFLVEEDKKHERHPIFGNIVDEVAYHEKYPTIYHLRKKLVDSTDKADLRLIYLALAHMIKFRGHFLIEGDLNPDNSDVDKLFIQLVQTYNQLFEENPINASGVDAKAILSARLSKSRRLENLIAQLPGEKKNGLFGNLIALSLGLTPNFKSNFDLAEDAKLQLSKDTYDDDLDNLLAQIGDQYADLFLAAKNLSDAILLSDILRVNTEITKAPLSASMIKRYDEHHQDLTLLKALVRQQLPEKYKEIFFDQSKNGYAGYIDGGASQEEFYKFIKPILEKMDGTEELLVKLNREDLLRKQRTFDNGSIPHQIHLGELHAILRRQEDFYPFLKDNREKIEKILTFRIPYYVGPLARGNSRFAWMTRKSEETITPWNFEEVVDKGASAQSFIERMTNFDKNLPNEKVLPKHSLLYEYFTVYNELTKVKYVTEGMRKPAFLSGEQKKAIVDLLFKTNRKVTVKQLKEDYFKKIECFDSVEISGVEDRFNASLGTYHDLLKIIKDKDFLDNEENEDILEDIVLTLTLFEDREMIEERLKTYAHLFDDKVMKQLKRRRYTGWGRLSRKLINGIRDKQSGKTILDFLKSDGFANRNFMQLIHDDSLTFKEDIQKAQVSGQGDSLHEHIANLAGSPAIKKGILQTVKVVDELVKVMGRHKPENIVIEMARENQTTQKGQKNSRERMKRIEEGIKELGSQILKEHPVENTQLQNEKLYLYYLQNGRDMYVDQELDINRLSDYDVDHIVPQSFLKDDSIDNKVLTRSDKARGKSDNVPSEEVVKKMKNYWRQLLNAKLITQRKFDNLTKAERGGLSELDKAGFIKRQLVETRQITKHVAQILDSRMNTKYDENDKLIREVKVITLKSKLVSDFRKDFQFYKVREINNYHHAHDAYLNAVVGTALIKKYPKLESEFVYGDYKVYDVRKMIAKSEQEIGKATAKYFFYSNIMNFFKTEITLANGEIRKRPLIETNGETGEIVWDKGRDFATVRKVLSMPQVNIVKKTEVQTGGFSKESILPKRNSDKLIARKKDWDPKKYGGFDSPTVAYSVLVVAKVEKGKSKKLKSVKELLGITIMERSSFEKNPIDFLEAKGYKEVKKDLIIKLPKYSLFELENGRKRMLASAGELQKGNELALPSKYVNFLYLASHYEKLKGSPEDNEQKQLFVEQHKHYLDEIIEQISEFSKRVILADANLDKVLSAYNKHRDKPIREQAENIIHLFTLTNLGAPAAFKYFDTTIDRKRYTSTKEVLDATLIHQSITGLYETRIDLSQLGGDGGGGGPAPGGSGGTAPLEEEYRLFLEAPIQNVTLLEQWKREIPKVWAEINPPGLASTQAPIHVQLLSTALPVRVRQYPITLEAKRSLRETIRKFRAAGILRPVHSPWNTPLLPVRKSGTSEYRMVQDLREVNKRVETIHPTVPNPYTLLSLLPPDRIWYSVLDLKDAFFCIPLAPESQLIFAFEWADAEEGESGQLTWTRLPQGFKNSPTLFNEALNRDLQGFRLDHPSVSLLQYVDDLLIAADTQAACLSATRDLLMTLAELGYRVSGKKAQLCQEEVTYLGFKIHKGSRSLSNSRTQAILQIPVPKTKRQVREFLGKIGYCRLFIPGFAELAQPLYAATRPGNDPLVWGEKEEEAFQSLKLALTQPPALALPSLDKPFQLFVEETSGAAKGVLTQALGPWKRPVAYLSKRLDPVAAGWPRCLRAIAAAALLTREASKLTFGQDIEITSSHNLESLLRSPPDKWLTNARITQYQVLLLDPPRVRFKQTAALNPATLLPETDDTLPIHHCLDTLDSLTSTRPDLTDQPLAQAEATLFTDGSSYIRDGKRYAGAAVVTLDSVIWAEPLPIGTSAQKAELIALTKALEWSKDKSVNIYTDSRYAFATLHVHGMIYRERGWLTAGGKAIKNAPEILALLTAVWLPKRVAVMHCKGHQKDDAPTSTGNRRADEVAREVAIRPLSTQATISAGKRTADGSEFEKRTADGSEFESPKKKAKVE

SEQ ID NO: 1403 - protein, 2096 aa, synthetic construct
MPAAKRVKLDGGDKKYSIGLDIGTNSVGWAVITDEYKVPSKKFKVLGNTDRHSIKKNLIGALLFDSGETAEATRLKRTARRRYTRRKNRICYLQEIFSNEMAKVDDSFFHRLEESFLVEEDKKHERHPIFGNIVDEVAYHEKYPTIYHLRKKLVDSTDKADLRLIYLALAHMIKFRGHFLIEGDLNPDNSDVDKLFIQLVQTYNQLFEENPINASGVDAKAILSARLSKSRRLENLIAQLPGEKKNGLFGNLIALSLGLTPNFKSNFDLAEDAKLQLSKDTYDDDLDNLLAQIGDQYADLFLAAKNLSDAILLSDILRVNTEITKAPLSASMIKRYDEHHQDLTLLKALVRQQLPEKYKEIFFDQSKNGYAGYIDGGASQEEFYKFIKPILEKMDGTEELLVKLNREDLLRKQRTFDNGSIPHQIHLGELHAILRRQEDFYPFLKDNREKIEKILTFRIPYYVGPLARGNSRFAWMTRKSEETITPWNFEEVVDKGASAQSFIERMTNFDKNLPNEKVLPKHSLLYEYFTVYNELTKVKYVTEGMRKPAFLSGEQKKAIVDLLFKTNRKVTVKQLKEDYFKKIECFDSVEISGVEDRFNASLGTYHDLLKIIKDKDFLDNEENEDILEDIVLTLTLFEDREMIEERLKTYAHLFDDKVMKQLKRRRYTGWGRLSRKLINGIRDKQSGKTILDFLKSDGFANRNFMQLIHDDSLTFKEDIQKAQVSGQGDSLHEHIANLAGSPAIKKGILQTVKVVDELVKVMGRHKPENIVIEMARENQTTQKGQKNSRERMKRIEEGIKELGSQILKEHPVENTQLQNEKLYLYYLQNGRDMYVDQELDINRLSDYDVDHIVPQSFLKDDSIDNKVLTRSDKARGKSDNVPSEEVVKKMKNYWRQLLNAKLITQRKFDNLTKAERGGLSELDKAGFIKRQLVETRQITKHVAQILDSRMNTKYDENDKLIREVKVITLKSKLVSDFRKDFQFYKVREINNYHHAHDAYLNAVVGTALIKKYPKLESEFVYGDYKVYDVRKMIAKSEQEIGKATAKYFFYSNIMNFFKTEITLANGEIRKRPLIETNGETGEIVWDKGRDFATVRKVLSMPQVNIVKKTEVQTGGFSKESILPKRNSDKLIARKKDWDPKKYGGFDSPTVAYSVLVVAKVEKGKSKKLKSVKELLGITIMERSSFEKNPIDFLEAKGYKEVKKDLIIKLPKYSLFELENGRKRMLASAGELQKGNELALPSKYVNFLYLASHYEKLKGSPEDNEQKQLFVEQHKHYLDEIIEQISEFSKRVILADANLDKVLSAYNKHRDKPIREQAENIIHLFTLTNLGAPAAFKYFDTTIDRKRYTSTKEVLDATLIHQSITGLYETRIDLSQLGGDGGPAPGGSGGGGGTAPLEEEYRLFLEAPIQNVTLLEQWKREIPKVWAEINPPGLASTQAPIHVQLLSTALPVRVRQYPITLEAKRSLRETIRKFRAAGILRPVHSPWNTPLLPVRKSGTSEYRMVQDLREVNKRVETIHPTVPNPYTLLSLLPPDRIWYSVLDLKDAFFCIPLAPESQLIFAFEWADAEEGESGQLTWTRLPQGFKNSPTLFNEALNRDLQGFRLDHPSVSLLQYVDDLLIAADTQAACLSATRDLLMTLAELGYRVSGKKAQLCQEEVTYLGFKIHKGSRSLSNSRTQAILQIPVPKTKRQVREFLGKIGYCRLFIPGFAELAQPLYAATRPGNDPLVWGEKEEEAFQSLKLALTQPPALALPSLDKPFQLFVEETSGAAKGVLTQALGPWKRPVAYLSKRLDPVAAGWPRCLRAIAAAALLTREASKLTFGQDIEITSSHNLESLLRSPPDKWLTNARITQYQVLLLDPPRVRFKQTAALNPATLLPETDDTLPIHHCLDTLDSLTSTRPDLTDQPLAQAEATLFTDGSSYIRDGKRYAGAAVVTLDSVIWAEPLPIGTSAQKAELIALTKALEWSKDKSVNIYTDSRYAFATLHVHGMIYRERGWLTAGGKAIKNAPEILALLTAVWLPKRVAVMHCKGHQKDDAPTSTGNRRADEVAREVAIRPLSTQATISAGKRTADGSEFEKRTADGSEFESPKKKAKVE

SEQ ID NO: 1404 - protein, 2098 aa, synthetic construct
MPAAKRVKLDGGDKKYSIGLDIGTNSVGWAVITDEYKVPSKKFKVLGNTDRHSIKKNLIGALLFDSGETAEATRLKRTARRRYTRRKNRICYLQEIFSNEMAKVDDSFFHRLEESFLVEEDKKHERHPIFGNIVDEVAYHEKYPTIYHLRKKLVDSTDKADLRLIYLALAHMIKFRGHFLIEGDLNPDNSDVDKLFIQLVQTYNQLFEENPINASGVDAKAILSARLSKSRRLENLIAQLPGEKKNGLFGNLIALSLGLTPNFKSNFDLAEDAKLQLSKDTYDDDLDNLLAQIGDQYADLFLAAKNLSDAILLSDILRVNTEITKAPLSASMIKRYDEHHQDLTLLKALVRQQLPEKYKEIFFDQSKNGYAGYIDGGASQEEFYKFIKPILEKMDGTEELLVKLNREDLLRKQRTFDNGSIPHQIHLGELHAILRRQEDFYPFLKDNREKIEKILTFRIPYYVGPLARGNSRFAWMTRKSEETITPWNFEEVVDKGASAQSFIERMTNFDKNLPNEKVLPKHSLLYEYFTVYNELTKVKYVTEGMRKPAFLSGEQKKAIVDLLFKTNRKVTVKQLKEDYFKKIECFDSVEISGVEDRFNASLGTYHDLLKIIKDKDFLDNEENEDILEDIVLTLTLFEDREMIEERLKTYAHLFDDKVMKQLKRRRYTGWGRLSRKLINGIRDKQSGKTILDFLKSDGFANRNFMQLIHDDSLTFKEDIQKAQVSGQGDSLHEHIANLAGSPAIKKGILQTVKVVDELVKVMGRHKPENIVIEMARENQTTQKGQKNSRERMKRIEEGIKELGSQILKEHPVENTQLQNEKLYLYYLQNGRDMYVDQELDINRLSDYDVDHIVPQSFLKDDSIDNKVLTRSDKARGKSDNVPSEEVVKKMKNYWRQLLNAKLITQRKFDNLTKAERGGLSELDKAGFIKRQLVETRQITKHVAQILDSRMNTKYDENDKLIREVKVITLKSKLVSDFRKDFQFYKVREINNYHHAHDAYLNAVVGTALIKKYPKLESEFVYGDYKVYDVRKMIAKSEQEIGKATAKYFFYSNIMNFFKTEITLANGEIRKRPLIETNGETGEIVWDKGRDFATVRKVLSMPQVNIVKKTEVQTGGFSKESILPKRNSDKLIARKKDWDPKKYGGFDSPTVAYSVLVVAKVEKGKSKKLKSVKELLGITIMERSSFEKNPIDFLEAKGYKEVKKDLIIKLPKYSLFELENGRKRMLASAGELQKGNELALPSKYVNFLYLASHYEKLKGSPEDNEQKQLFVEQHKHYLDEIIEQISEFSKRVILADANLDKVLSAYNKHRDKPIREQAENIIHLFTLTNLGAPAAFKYFDTTIDRKRYTSTKEVLDATLIHQSITGLYETRIDLSQLGGDGGGGGGSSEAAAKGGTAPLEEEYRLFLEAPIQNVTLLEQWKREIPKVWAEINPPGLASTQAPIHVQLLSTALPVRVRQYPITLEAKRSLRETIRKFRAAGILRPVHSPWNTPLLPVRKSGTSEYRMVQDLREVNKRVETIHPTVPNPYTLLSLLPPDRIWYSVLDLKDAFFCIPLAPESQLIFAFEWADAEEGESGQLTWTRLPQGFKNSPTLFNEALNRDLQGFRLDHPSVSLLQYVDDLLIAADTQAACLSATRDLLMTLAELGYRVSGKKAQLCQEEVTYLGFKIHKGSRSLSNSRTQAILQIPVPKTKRQVREFLGKIGYCRLFIPGFAELAQPLYAATRPGNDPLVWGEKEEEAFQSLKLALTQPPALALPSLDKPFQLFVEETSGAAKGVLTQALGPWKRPVAYLSKRLDPVAAGWPRCLRAIAAAALLTREASKLTFGQDIEITSSHNLESLLRSPPDKWLTNARITQYQVLLLDPPRVRFKQTAALNPATLLPETDDTLPIHHCLDTLDSLTSTRPDLTDQPLAQAEATLFTDGSSYIRDGKRYAGAAVVTLDSVIWAEPLPIGTSAQKAELIALTKALEWSKDKSVNIYTDSRYAFATLHVHGMIYRERGWLTAGGKAIKNAPEILALLTAVWLPKRVAVMHCKGHQKDDAPTSTGNRRADEVAREVAIRPLSTQATISAGKRTADGSEFEKRTADGSEFESPKKKAKVE

SEQ ID NO: 1405 - protein, 2095 aa, synthetic construct
MPAAKRVKLDGGDKKYSIGLDIGTNSVGWAVITDEYKVPSKKFKVLGNTDRHSIKKNLIGALLFDSGETAEATRLKRTARRRYTRRKNRICYLQEIFSNEMAKVDDSFFHRLEESFLVEEDKKHERHPIFGNIVDEVAYHEKYPTIYHLRKKLVDSTDKADLRLIYLALAHMIKFRGHFLIEGDLNPDNSDVDKLFIQLVQTYNQLFEENPINASGVDAKAILSARLSKSRRLENLIAQLPGEKKNGLFGNLIALSLGLTPNFKSNFDLAEDAKLQLSKDTYDDDLDNLLAQIGDQYADLFLAAKNLSDAILLSDILRVNTEITKAPLSASMIKRYDEHHQDLTLLKALVRQQLPEKYKEIFFDQSKNGYAGYIDGGASQEEFYKFIKPILEKMDGTEELLVKLNREDLLRKQRTFDNGSIPHQIHLGELHAILRRQEDFYPFLKDNREKIEKILTFRIPYYVGPLARGNSRFAWMTRKSEETITPWNFEEVVDKGASAQSFIERMTNFDKNLPNEKVLPKHSLLYEYFTVYNELTKVKYVTEGMRKPAFLSGEQKKAIVDLLFKTNRKVTVKQLKEDYFKKIECFDSVEISGVEDRFNASLGTYHDLLKIIKDKDFLDNEENEDILEDIVLTLTLFEDREMIEERLKTYAHLFDDKVMKQLKRRRYTGWGRLSRKLINGIRDKQSGKTILDFLKSDGFANRNFMQLIHDDSLTFKEDIQKAQVSGQGDSLHEHIANLAGSPAIKKGILQTVKVVDELVKVMGRHKPENIVIEMARENQTTQKGQKNSRERMKRIEEGIKELGSQILKEHPVENTQLQNEKLYLYYLQNGRDMYVDQELDINRLSDYDVDHIVPQSFLKDDSIDNKVLTRSDKARGKSDNVPSEEVVKKMKNYWRQLLNAKLITQRKFDNLTKAERGGLSELDKAGFIKRQLVETRQITKHVAQILDSRMNTKYDENDKLIREVKVITLKSKLVSDFRKDFQFYKVREINNYHHAHDAYLNAVVGTALIKKYPKLESEFVYGDYKVYDVRKMIAKSEQEIGKATAKYFFYSNIMNFFKTEITLANGEIRKRPLIETNGETGEIVWDKGRDFATVRKVLSMPQVNIVKKTEVQTGGFSKESILPKRNSDKLIARKKDWDPKKYGGFDSPTVAYSVLVVAKVEKGKSKKLKSVKELLGITIMERSSFEKNPIDFLEAKGYKEVKKDLIIKLPKYSLFELENGRKRMLASAGELQKGNELALPSKYVNFLYLASHYEKLKGSPEDNEQKQLFVEQHKHYLDEIIEQISEFSKRVILADANLDKVLSAYNKHRDKPIREQAENIIHLFTLTNLGAPAAFKYFDTTIDRKRYTSTKEVLDATLIHQSITGLYETRIDLSQLGGDGGGSSEAAAKGGTAPLEEEYRLFLEAPIQNVTLLEQWKREIPKVWAEINPPGLASTQAPIHVQLLSTALPVRVRQYPITLEAKRSLRETIRKFRAAGILRPVHSPWNTPLLPVRKSGTSEYRMVQDLREVNKRVETIHPTVPNPYTLLSLLPPDRIWYSVLDLKDAFFCIPLAPESQLIFAFEWADAEEGESGQLTWTRLPQGFKNSPTLFNEALNRDLQGFRLDHPSVSLLQYVDDLLIAADTQAACLSATRDLLMTLAELGYRVSGKKAQLCQEEVTYLGFKIHKGSRSLSNSRTQAILQIPVPKTKRQVREFLGKIGYCRLFIPGFAELAQPLYAATRPGNDPLVWGEKEEEAFQSLKLALTQPPALALPSLDKPFQLFVEETSGAAKGVLTQALGPWKRPVAYLSKRLDPVAAGWPRCLRAIAAAALLTREASKLTFGQDIEITSSHNLESLLRSPPDKWLTNARITQYQVLLLDPPRVRFKQTAALNPATLLPETDDTLPIHHCLDTLDSLTSTRPDLTDQPLAQAEATLFTDGSSYIRDGKRYAGAAVVTLDSVIWAEPLPIGTSAQKAELIALTKALEWSKDKSVNIYTDSRYAFATLHVHGMIYRERGWLTAGGKAIKNAPEILALLTAVWLPKRVAVMHCKGHQKDDAPTSTGNRRADEVAREVAIRPLSTQATISAGKRTADGSEFEKRTADGSEFESPKKKAKVE

SEQ ID NO: 1406 - protein, 2098 aa, synthetic construct
MPAAKRVKLDGGDKKYSIGLDIGTNSVGWAVITDEYKVPSKKFKVLGNTDRHSIKKNLIGALLFDSGETAEATRLKRTARRRYTRRKNRICYLQEIFSNEMAKVDDSFFHRLEESFLVEEDKKHERHPIFGNIVDEVAYHEKYPTIYHLRKKLVDSTDKADLRLIYLALAHMIKFRGHFLIEGDLNPDNSDVDKLFIQLVQTYNQLFEENPINASGVDAKAILSARLSKSRRLENLIAQLPGEKKNGLFGNLIALSLGLTPNFKSNFDLAEDAKLQLSKDTYDDDLDNLLAQIGDQYADLFLAAKNLSDAILLSDILRVNTEITKAPLSASMIKRYDEHHQDLTLLKALVRQQLPEKYKEIFFDQSKNGYAGYIDGGASQEEFYKFIKPILEKMDGTEELLVKLNREDLLRKQRTFDNGSIPHQIHLGELHAILRRQEDFYPFLKDNREKIEKILTFRIPYYVGPLARGNSRFAWMTRKSEETITPWNFEEVVDKGASAQSFIERMTNFDKNLPNEKVLPKHSLLYEYFTVYNELTKVKYVTEGMRKPAFLSGEQKKAIVDLLFKTNRKVTVKQLKEDYFKKIECFDSVEISGVEDRFNASLGTYHDLLKIIKDKDFLDNEENEDILEDIVLTLTLFEDREMIEERLKTYAHLFDDKVMKQLKRRRYTGWGRLSRKLINGIRDKQSGKTILDFLKSDGFANRNFMQLIHDDSLTFKEDIQKAQVSGQGDSLHEHIANLAGSPAIKKGILQTVKVVDELVKVMGRHKPENIVIEMARENQTTQKGQKNSRERMKRIEEGIKELGSQILKEHPVENTQLQNEKLYLYYLQNGRDMYVDQELDINRLSDYDVDHIVPQSFLKDDSIDNKVLTRSDKARGKSDNVPSEEVVKKMKNYWRQLLNAKLITQRKFDNLTKAERGGLSELDKAGFIKRQLVETRQITKHVAQILDSRMNTKYDENDKLIREVKVITLKSKLVSDFRKDFQFYKVREINNYHHAHDAYLNAVVGTALIKKYPKLESEFVYGDYKVYDVRKMIAKSEQEIGKATAKYFFYSNIMNFFKTEITLANGEIRKRPLIETNGETGEIVWDKGRDFATVRKVLSMPQVNIVKKTEVQTGGFSKESILPKRNSDKLIARKKDWDPKKYGGFDSPTVAYSVLVVAKVEKGKSKKLKSVKELLGITIMERSSFEKNPIDFLEAKGYKEVKKDLIIKLPKYSLFELENGRKRMLASAGELQKGNELALPSKYVNFLYLASHYEKLKGSPEDNEQKQLFVEQHKHYLDEIIEQISEFSKRVILADANLDKVLSAYNKHRDKPIREQAENIIHLFTLTNLGAPAAFKYFDTTIDRKRYTSTKEVLDATLIHQSITGLYETRIDLSQLGGDGGEAAAKGGSGSSGGTAPLEEEYRLFLEAPIQNVTLLEQWKREIPKVWAEINPPGLASTQAPIHVQLLSTALPVRVRQYPITLEAKRSLRETIRKFRAAGILRPVHSPWNTPLLPVRKSGTSEYRMVQDLREVNKRVETIHPTVPNPYTLLSLLPPDRIWYSVLDLKDAFFCIPLAPESQLIFAFEWADAEEGESGQLTWTRLPQGFKNSPTLFNEALNRDLQGFRLDHPSVSLLQYVDDLLIAADTQAACLSATRDLLMTLAELGYRVSGKKAQLCQEEVTYLGFKIHKGSRSLSNSRTQAILQIPVPKTKRQVREFLGKIGYCRLFIPGFAELAQPLYAATRPGNDPLVWGEKEEEAFQSLKLALTQPPALALPSLDKPFQLFVEETSGAAKGVLTQALGPWKRPVAYLSKRLDPVAAGWPRCLRAIAAAALLTREASKLTFGQDIEITSSHNLESLLRSPPDKWLTNARITQYQVLLLDPPRVRFKQTAALNPATLLPETDDTLPIHHCLDTLDSLTSTRPDLTDQPLAQAEATLFTDGSSYIRDGKRYAGAAVVTLDSVIWAEPLPIGTSAQKAELIALTKALEWSKDKSVNIYTDSRYAFATLHVHGMIYRERGWLTAGGKAIKNAPEILALLTAVWLPKRVAVMHCKGHQKDDAPTSTGNRRADEVAREVAIRPLSTQATISAGKRTADGSEFEKRTADGSEFESPKKKAKVE

SEQ ID NO: 1407 - protein, 2095 aa, synthetic construct
MPAAKRVKLDGGDKKYSIGLDIGTNSVGWAVITDEYKVPSKKFKVLGNTDRHSIKKNLIGALLFDSGETAEATRLKRTARRRYTRRKNRICYLQEIFSNEMAKVDDSFFHRLEESFLVEEDKKHERHPIFGNIVDEVAYHEKYPTIYHLRKKLVDSTDKADLRLIYLALAHMIKFRGHFLIEGDLNPDNSDVDKLFIQLVQTYNQLFEENPINASGVDAKAILSARLSKSRRLENLIAQLPGEKKNGLFGNLIALSLGLTPNFKSNFDLAEDAKLQLSKDTYDDDLDNLLAQIGDQYADLFLAAKNLSDAILLSDILRVNTEITKAPLSASMIKRYDEHHQDLTLLKALVRQQLPEKYKEIFFDQSKNGYAGYIDGGASQEEFYKFIKPILEKMDGTEELLVKLNREDLLRKQRTFDNGSIPHQIHLGELHAILRRQEDFYPFLKDNREKIEKILTFRIPYYVGPLARGNSRFAWMTRKSEETITPWNFEEVVDKGASAQSFIERMTNFDKNLPNEKVLPKHSLLYEYFTVYNELTKVKYVTEGMRKPAFLSGEQKKAIVDLLFKTNRKVTVKQLKEDYFKKIECFDSVEISGVEDRFNASLGTYHDLLKIIKDKDFLDNEENEDILEDIVLTLTLFEDREMIEERLKTYAHLFDDKVMKQLKRRRYTGWGRLSRKLINGIRDKQSGKTILDFLKSDGFANRNFMQLIHDDSLTFKEDIQKAQVSGQGDSLHEHIANLAGSPAIKKGILQTVKVVDELVKVMGRHKPENIVIEMARENQTTQKGQKNSRERMKRIEEGIKELGSQILKEHPVENTQLQNEKLYLYYLQNGRDMYVDQELDINRLSDYDVDHIVPQSFLKDDSIDNKVLTRSDKARGKSDNVPSEEVVKKMKNYWRQLLNAKLITQRKFDNLTKAERGGLSELDKAGFIKRQLVETRQITKHVAQILDSRMNTKYDENDKLIREVKVITLKSKLVSDFRKDFQFYKVREINNYHHAHDAYLNAVVGTALIKKYPKLESEFVYGDYKVYDVRKMIAKSEQEIGKATAKYFFYSNIMNFFKTEITLANGEIRKRPLIETNGETGEIVWDKGRDFATVRKVLSMPQVNIVKKTEVQTGGFSKESILPKRNSDKLIARKKDWDPKKYGGFDSPTVAYSVLVVAKVEKGKSKKLKSVKELLGITIMERSSFEKNPIDFLEAKGYKEVKKDLIIKLPKYSLFELENGRKRMLASAGELQKGNELALPSKYVNFLYLASHYEKLKGSPEDNEQKQLFVEQHKHYLDEIIEQISEFSKRVILADANLDKVLSAYNKHRDKPIREQAENIIHLFTLTNLGAPAAFKYFDTTIDRKRYTSTKEVLDATLIHQSITGLYETRIDLSQLGGDGGPAPEAAAKGGTAPLEEEYRLFLEAPIQNVTLLEQWKREIPKVWAEINPPGLASTQAPIHVQLLSTALPVRVRQYPITLEAKRSLRETIRKFRAAGILRPVHSPWNTPLLPVRKSGTSEYRMVQDLREVNKRVETIHPTVPNPYTLLSLLPPDRIWYSVLDLKDAFFCIPLAPESQLIFAFEWADAEEGESGQLTWTRLPQGFKNSPTLFNEALNRDLQGFRLDHPSVSLLQYVDDLLIAADTQAACLSATRDLLMTLAELGYRVSGKKAQLCQEEVTYLGFKIHKGSRSLSNSRTQAILQIPVPKTKRQVREFLGKIGYCRLFIPGFAELAQPLYAATRPGNDPLVWGEKEEEAFQSLKLALTQPPALALPSLDKPFQLFVEETSGAAKGVLTQALGPWKRPVAYLSKRLDPVAAGWPRCLRAIAAAALLTREASKLTFGQDIEITSSHNLESLLRSPPDKWLTNARITQYQVLLLDPPRVRFKQTAALNPATLLPETDDTLPIHHCLDTLDSLTSTRPDLTDQPLAQAEATLFTDGSSYIRDGKRYAGAAVVTLDSVIWAEPLPIGTSAQKAELIALTKALEWSKDKSVNIYTDSRYAFATLHVHGMIYRERGWLTAGGKAIKNAPEILALLTAVWLPKRVAVMHCKGHQKDDAPTSTGNRRADEVAREVAIRPLSTQATISAGKRTADGSEFEKRTADGSEFESPKKKAKVE

SEQ ID NO: 1408 - protein, 2099 aa, synthetic construct
MPAAKRVKLDGGDKKYSIGLDIGTNSVGWAVITDEYKVPSKKFKVLGNTDRHSIKKNLIGALLFDSGETAEATRLKRTARRRYTRRKNRICYLQEIFSNEMAKVDDSFFHRLEESFLVEEDKKHERHPIFGNIVDEVAYHEKYPTIYHLRKKLVDSTDKADLRLIYLALAHMIKFRGHFLIEGDLNPDNSDVDKLFIQLVQTYNQLFEENPINASGVDAKAILSARLSKSRRLENLIAQLPGEKKNGLFGNLIALSLGLTPNFKSNFDLAEDAKLQLSKDTYDDDLDNLLAQIGDQYADLFLAAKNLSDAILLSDILRVNTEITKAPLSASMIKRYDEHHQDLTLLKALVRQQLPEKYKEIFFDQSKNGYAGYIDGGASQEEFYKFIKPILEKMDGTEELLVKLNREDLLRKQRTFDNGSIPHQIHLGELHAILRRQEDFYPFLKDNREKIEKILTFRIPYYVGPLARGNSRFAWMTRKSEETITPWNFEEVVDKGASAQSFIERMTNFDKNLPNEKVLPKHSLLYEYFTVYNELTKVKYVTEGMRKPAFLSGEQKKAIVDLLFKTNRKVTVKQLKEDYFKKIECFDSVEISGVEDRFNASLGTYHDLLKIIKDKDFLDNEENEDILEDIVLTLTLFEDREMIEERLKTYAHLFDDKVMKQLKRRRYTGWGRLSRKLINGIRDKQSGKTILDFLKSDGFANRNFMQLIHDDSLTFKEDIQKAQVSGQGDSLHEHIANLAGSPAIKKGILQTVKVVDELVKVMGRHKPENIVIEMARENQTTQKGQKNSRERMKRIEEGIKELGSQILKEHPVENTQLQNEKLYLYYLQNGRDMYVDQELDINRLSDYDVDHIVPQSFLKDDSIDNKVLTRSDKARGKSDNVPSEEVVKKMKNYWRQLLNAKLITQRKFDNLTKAERGGLSELDKAGFIKRQLVETRQITKHVAQILDSRMNTKYDENDKLIREVKVITLKSKLVSDFRKDFQFYKVREINNYHHAHDAYLNAVVGTALIKKYPKLESEFVYGDYKVYDVRKMIAKSEQEIGKATAKYFFYSNIMNFFKTEITLANGEIRKRPLIETNGETGEIVWDKGRDFATVRKVLSMPQVNIVKKTEVQTGGFSKESILPKRNSDKLIARKKDWDPKKYGGFDSPTVAYSVLVVAKVEKGKSKKLKSVKELLGITIMERSSFEKNPIDFLEAKGYKEVKKDLIIKLPKYSLFELENGRKRMLASAGELQKGNELALPSKYVNFLYLASHYEKLKGSPEDNEQKQLFVEQHKHYLDEIIEQISEFSKRVILADANLDKVLSAYNKHRDKPIREQAENIIHLFTLTNLGAPAAFKYFDTTIDRKRYTSTKEVLDATLIHQSITGLYETRIDLSQLGGDGGGSAGSAAGSGEFGGTAPLEEEYRLFLEAPIQNVTLLEQWKREIPKVWAEINPPGLASTQAPIHVQLLSTALPVRVRQYPITLEAKRSLRETIRKFRAAGILRPVHSPWNTPLLPVRKSGTSEYRMVQDLREVNKRVETIHPTVPNPYTLLSLLPPDRIWYSVLDLKDAFFCIPLAPESQLIFAFEWADAEEGESGQLTWTRLPQGFKNSPTLFNEALNRDLQGFRLDHPSVSLLQYVDDLLIAADTQAACLSATRDLLMTLAELGYRVSGKKAQLCQEEVTYLGFKIHKGSRSLSNSRTQAILQIPVPKTKRQVREFLGKIGYCRLFIPGFAELAQPLYAATRPGNDPLVWGEKEEEAFQSLKLALTQPPALALPSLDKPFQLFVEETSGAAKGVLTQALGPWKRPVAYLSKRLDPVAAGWPRCLRAIAAAALLTREASKLTFGQDIEITSSHNLESLLRSPPDKWLTNARITQYQVLLLDPPRVRFKQTAALNPATLLPETDDTLPIHHCLDTLDSLTSTRPDLTDQPLAQAEATLFTDGSSYIRDGKRYAGAAVVTLDSVIWAEPLPIGTSAQKAELIALTKALEWSKDKSVNIYTDSRYAFATLHVHGMIYRERGWLTAGGKAIKNAPEILALLTAVWLPKRVAVMHCKGHQKDDAPTSTGNRRADEVAREVAIRPLSTQATISAGKRTADGSEFEKRTADGSEFESPKKKAKVE

SEQ ID NO: 1409 - protein, 2096 aa, synthetic construct
MPAAKRVKLDGGDKKYSIGLDIGTNSVGWAVITDEYKVPSKKFKVLGNTDRHSIKKNLIGALLFDSGETAEATRLKRTARRRYTRRKNRICYLQEIFSNEMAKVDDSFFHRLEESFLVEEDKKHERHPIFGNIVDEVAYHEKYPTIYHLRKKLVDSTDKADLRLIYLALAHMIKFRGHFLIEGDLNPDNSDVDKLFIQLVQTYNQLFEENPINASGVDAKAILSARLSKSRRLENLIAQLPGEKKNGLFGNLIALSLGLTPNFKSNFDLAEDAKLQLSKDTYDDDLDNLLAQIGDQYADLFLAAKNLSDAILLSDILRVNTEITKAPLSASMIKRYDEHHQDLTLLKALVRQQLPEKYKEIFFDQSKNGYAGYIDGGASQEEFYKFIKPILEKMDGTEELLVKLNREDLLRKQRTFDNGSIPHQIHLGELHAILRRQEDFYPFLKDNREKIEKILTFRIPYYVGPLARGNSRFAWMTRKSEETITPWNFEEVVDKGASAQSFIERMTNFDKNLPNEKVLPKHSLLYEYFTVYNELTKVKYVTEGMRKPAFLSGEQKKAIVDLLFKTNRKVTVKQLKEDYFKKIECFDSVEISGVEDRFNASLGTYHDLLKIIKDKDFLDNEENEDILEDIVLTLTLFEDREMIEERLKTYAHLFDDKVMKQLKRRRYTGWGRLSRKLINGIRDKQSGKTILDFLKSDGFANRNFMQLIHDDSLTFKEDIQKAQVSGQGDSLHEHIANLAGSPAIKKGILQTVKVVDELVKVMGRHKPENIVIEMARENQTTQKGQKNSRERMKRIEEGIKELGSQILKEHPVENTQLQNEKLYLYYLQNGRDMYVDQELDINRLSDYDVDHIVPQSFLKDDSIDNKVLTRSDKARGKSDNVPSEEVVKKMKNYWRQLLNAKLITQRKFDNLTKAERGGLSELDKAGFIKRQLVETRQITKHVAQILDSRMNTKYDENDKLIREVKVITLKSKLVSDFRKDFQFYKVREINNYHHAHDAYLNAVVGTALIKKYPKLESEFVYGDYKVYDVRKMIAKSEQEIGKATAKYFFYSNIMNFFKTEITLANGEIRKRPLIETNGETGEIVWDKGRDFATVRKVLSMPQVNIVKKTEVQTGGFSKESILPKRNSDKLIARKKDWDPKKYGGFDSPTVAYSVLVVAKVEKGKSKKLKSVKELLGITIMERSSFEKNPIDFLEAKGYKEVKKDLIIKLPKYSLFELENGRKRMLASAGELQKGNELALPSKYVNFLYLASHYEKLKGSPEDNEQKQLFVEQHKHYLDEIIEQISEFSKRVILADANLDKVLSAYNKHRDKPIREQAENIIHLFTLTNLGAPAAFKYFDTTIDRKRYTSTKEVLDATLIHQSITGLYETRIDLSQLGGDGGGGSPAPGSSGGTAPLEEEYRLFLEAPIQNVTLLEQWKREIPKVWAEINPPGLASTQAPIHVQLLSTALPVRVRQYPITLEAKRSLRETIRKFRAAGILRPVHSPWNTPLLPVRKSGTSEYRMVQDLREVNKRVETIHPTVPNPYTLLSLLPPDRIWYSVLDLKDAFFCIPLAPESQLIFAFEWADAEEGESGQLTWTRLPQGFKNSPTLFNEALNRDLQGFRLDHPSVSLLQYVDDLLIAADTQAACLSATRDLLMTLAELGYRVSGKKAQLCQEEVTYLGFKIHKGSRSLSNSRTQAILQIPVPKTKRQVREFLGKIGYCRLFIPGFAELAQPLYAATRPGNDPLVWGEKEEEAFQSLKLALTQPPALALPSLDKPFQLFVEETSGAAKGVLTQALGPWKRPVAYLSKRLDPVAAGWPRCLRAIAAAALLTREASKLTFGQDIEITSSHNLESLLRSPPDKWLTNARITQYQVLLLDPPRVRFKQTAALNPATLLPETDDTLPIHHCLDTLDSLTSTRPDLTDQPLAQAEATLFTDGSSYIRDGKRYAGAAVVTLDSVIWAEPLPIGTSAQKAELIALTKALEWSKDKSVNIYTDSRYAFATLHVHGMIYRERGWLTAGGKAIKNAPEILALLTAVWLPKRVAVMHCKGHQKDDAPTSTGNRRADEVAREVAIRPLSTQATISAGKRTADGSEFEKRTADGSEFESPKKKAKVE

SEQ ID NO: 1410 - protein, 2093 aa, synthetic construct
MPAAKRVKLDGGDKKYSIGLDIGTNSVGWAVITDEYKVPSKKFKVLGNTDRHSIKKNLIGALLFDSGETAEATRLKRTARRRYTRRKNRICYLQEIFSNEMAKVDDSFFHRLEESFLVEEDKKHERHPIFGNIVDEVAYHEKYPTIYHLRKKLVDSTDKADLRLIYLALAHMIKFRGHFLIEGDLNPDNSDVDKLFIQLVQTYNQLFEENPINASGVDAKAILSARLSKSRRLENLIAQLPGEKKNGLFGNLIALSLGLTPNFKSNFDLAEDAKLQLSKDTYDDDLDNLLAQIGDQYADLFLAAKNLSDAILLSDILRVNTEITKAPLSASMIKRYDEHHQDLTLLKALVRQQLPEKYKEIFFDQSKNGYAGYIDGGASQEEFYKFIKPILEKMDGTEELLVKLNREDLLRKQRTFDNGSIPHQIHLGELHAILRRQEDFYPFLKDNREKIEKILTFRIPYYVGPLARGNSRFAWMTRKSEETITPWNFEEVVDKGASAQSFIERMTNFDKNLPNEKVLPKHSLLYEYFTVYNELTKVKYVTEGMRKPAFLSGEQKKAIVDLLFKTNRKVTVKQLKEDYFKKIECFDSVEISGVEDRFNASLGTYHDLLKIIKDKDFLDNEENEDILEDIVLTLTLFEDREMIEERLKTYAHLFDDKVMKQLKRRRYTGWGRLSRKLINGIRDKQSGKTILDFLKSDGFANRNFMQLIHDDSLTFKEDIQKAQVSGQGDSLHEHIANLAGSPAIKKGILQTVKVVDELVKVMGRHKPENIVIEMARENQTTQKGQKNSRERMKRIEEGIKELGSQILKEHPVENTQLQNEKLYLYYLQNGRDMYVDQELDINRLSDYDVDHIVPQSFLKDDSIDNKVLTRSDKARGKSDNVPSEEVVKKMKNYWRQLLNAKLITQRKFDNLTKAERGGLSELDKAGFIKRQLVETRQITKHVAQILDSRMNTKYDENDKLIREVKVITLKSKLVSDFRKDFQFYKVREINNYHHAHDAYLNAVVGTALIKKYPKLESEFVYGDYKVYDVRKMIAKSEQEIGKATAKYFFYSNIMNFFKTEITLANGEIRKRPLIETNGETGEIVWDKGRDFATVRKVLSMPQVNIVKKTEVQTGGFSKESILPKRNSDKLIARKKDWDPKKYGGFDSPTVAYSVLVVAKVEKGKSKKLKSVKELLGITIMERSSFEKNPIDFLEAKGYKEVKKDLIIKLPKYSLFELENGRKRMLASAGELQKGNELALPSKYVNFLYLASHYEKLKGSPEDNEQKQLFVEQHKHYLDEIIEQISEFSKRVILADANLDKVLSAYNKHRDKPIREQAENIIHLFTLTNLGAPAAFKYFDTTIDRKRYTSTKEVLDATLIHQSITGLYETRIDLSQLGGDGGPAPGGGGGTAPLEEEYRLFLEAPIQNVTLLEQWKREIPKVWAEINPPGLASTQAPIHVQLLSTALPVRVRQYPITLEAKRSLRETIRKFRAAGILRPVHSPWNTPLLPVRKSGTSEYRMVQDLREVNKRVETIHPTVPNPYTLLSLLPPDRIWYSVLDLKDAFFCIPLAPESQLIFAFEWADAEEGESGQLTWTRLPQGFKNSPTLFNEALNRDLQGFRLDHPSVSLLQYVDDLLIAADTQAACLSATRDLLMTLAELGYRVSGKKAQLCQEEVTYLGFKIHKGSRSLSNSRTQAILQIPVPKTKRQVREFLGKIGYCRLFIPGFAELAQPLYAATRPGNDPLVWGEKEEEAFQSLKLALTQPPALALPSLDKPFQLFVEETSGAAKGVLTQALGPWKRPVAYLSKRLDPVAAGWPRCLRAIAAAALLTREASKLTFGQDIEITSSHNLESLLRSPPDKWLTNARITQYQVLLLDPPRVRFKQTAALNPATLLPETDDTLPIHHCLDTLDSLTSTRPDLTDQPLAQAEATLFTDGSSYIRDGKRYAGAAVVTLDSVIWAEPLPIGTSAQKAELIALTKALEWSKDKSVNIYTDSRYAFATLHVHGMIYRERGWLTAGGKAIKNAPEILALLTAVWLPKRVAVMHCKGHQKDDAPTSTGNRRADEVAREVAIRPLSTQATISAGKRTADGSEFEKRTADGSEFESPKKKAKVE

SEQ ID NO: 1411 - protein, 2096 aa, synthetic construct
MPAAKRVKLDGGDKKYSIGLDIGTNSVGWAVITDEYKVPSKKFKVLGNTDRHSIKKNLIGALLFDSGETAEATRLKRTARRRYTRRKNRICYLQEIFSNEMAKVDDSFFHRLEESFLVEEDKKHERHPIFGNIVDEVAYHEKYPTIYHLRKKLVDSTDKADLRLIYLALAHMIKFRGHFLIEGDLNPDNSDVDKLFIQLVQTYNQLFEENPINASGVDAKAILSARLSKSRRLENLIAQLPGEKKNGLFGNLIALSLGLTPNFKSNFDLAEDAKLQLSKDTYDDDLDNLLAQIGDQYADLFLAAKNLSDAILLSDILRVNTEITKAPLSASMIKRYDEHHQDLTLLKALVRQQLPEKYKEIFFDQSKNGYAGYIDGGASQEEFYKFIKPILEKMDGTEELLVKLNREDLLRKQRTFDNGSIPHQIHLGELHAILRRQEDFYPFLKDNREKIEKILTFRIPYYVGPLARGNSRFAWMTRKSEETITPWNFEEVVDKGASAQSFIERMTNFDKNLPNEKVLPKHSLLYEYFTVYNELTKVKYVTEGMRKPAFLSGEQKKAIVDLLFKTNRKVTVKQLKEDYFKKIECFDSVEISGVEDRFNASLGTYHDLLKIIKDKDFLDNEENEDILEDIVLTLTLFEDREMIEERLKTYAHLFDDKVMKQLKRRRYTGWGRLSRKLINGIRDKQSGKTILDFLKSDGFANRNFMQLIHDDSLTFKEDIQKAQVSGQGDSLHEHIANLAGSPAIKKGILQTVKVVDELVKVMGRHKPENIVIEMARENQTTQKGQKNSRERMKRIEEGIKELGSQILKEHPVENTQLQNEKLYLYYLQNGRDMYVDQELDINRLSDYDVDHIVPQSFLKDDSIDNKVLTRSDKARGKSDNVPSEEVVKKMKNYWRQLLNAKLITQRKFDNLTKAERGGLSELDKAGFIKRQLVETRQITKHVAQILDSRMNTKYDENDKLIREVKVITLKSKLVSDFRKDFQFYKVREINNYHHAHDAYLNAVVGTALIKKYPKLESEFVYGDYKVYDVRKMIAKSEQEIGKATAKYFFYSNIMNFFKTEITLANGEIRKRPLIETNGETGEIVWDKGRDFATVRKVLSMPQVNIVKKTEVQTGGFSKESILPKRNSDKLIARKKDWDPKKYGGFDSPTVAYSVLVVAKVEKGKSKKLKSVKELLGITIMERSSFEKNPIDFLEAKGYKEVKKDLIIKLPKYSLFELENGRKRMLASAGELQKGNELALPSKYVNFLYLASHYEKLKGSPEDNEQKQLFVEQHKHYLDEIIEQISEFSKRVILADANLDKVLSAYNKHRDKPIREQAENIIHLFTLTNLGAPAAFKYFDTTIDRKRYTSTKEVLDATLIHQSITGLYETRIDLSQLGGDGGGGGPAPGSSGGTAPLEEEYRLFLEAPIQNVTLLEQWKREIPKVWAEINPPGLASTQAPIHVQLLSTALPVRVRQYPITLEAKRSLRETIRKFRAAGILRPVHSPWNTPLLPVRKSGTSEYRMVQDLREVNKRVETIHPTVPNPYTLLSLLPPDRIWYSVLDLKDAFFCIPLAPESQLIFAFEWADAEEGESGQLTWTRLPQGFKNSPTLFNEALNRDLQGFRLDHPSVSLLQYVDDLLIAADTQAACLSATRDLLMTLAELGYRVSGKKAQLCQEEVTYLGFKIHKGSRSLSNSRTQAILQIPVPKTKRQVREFLGKIGYCRLFIPGFAELAQPLYAATRPGNDPLVWGEKEEEAFQSLKLALTQPPALALPSLDKPFQLFVEETSGAAKGVLTQALGPWKRPVAYLSKRLDPVAAGWPRCLRAIAAAALLTREASKLTFGQDIEITSSHNLESLLRSPPDKWLTNARITQYQVLLLDPPRVRFKQTAALNPATLLPETDDTLPIHHCLDTLDSLTSTRPDLTDQPLAQAEATLFTDGSSYIRDGKRYAGAAVVTLDSVIWAEPLPIGTSAQKAELIALTKALEWSKDKSVNIYTDSRYAFATLHVHGMIYRERGWLTAGGKAIKNAPEILALLTAVWLPKRVAVMHCKGHQKDDAPTSTGNRRADEVAREVAIRPLSTQATISAGKRTADGSEFEKRTADGSEFESPKKKAKVE

SEQ ID NO: 1412 - protein, 2093 aa, synthetic construct
MPAAKRVKLDGGDKKYSIGLDIGTNSVGWAVITDEYKVPSKKFKVLGNTDRHSIKKNLIGALLFDSGETAEATRLKRTARRRYTRRKNRICYLQEIFSNEMAKVDDSFFHRLEESFLVEEDKKHERHPIFGNIVDEVAYHEKYPTIYHLRKKLVDSTDKADLRLIYLALAHMIKFRGHFLIEGDLNPDNSDVDKLFIQLVQTYNQLFEENPINASGVDAKAILSARLSKSRRLENLIAQLPGEKKNGLFGNLIALSLGLTPNFKSNFDLAEDAKLQLSKDTYDDDLDNLLAQIGDQYADLFLAAKNLSDAILLSDILRVNTEITKAPLSASMIKRYDEHHQDLTLLKALVRQQLPEKYKEIFFDQSKNGYAGYIDGGASQEEFYKFIKPILEKMDGTEELLVKLNREDLLRKQRTFDNGSIPHQIHLGELHAILRRQEDFYPFLKDNREKIEKILTFRIPYYVGPLARGNSRFAWMTRKSEETITPWNFEEVVDKGASAQSFIERMTNFDKNLPNEKVLPKHSLLYEYFTVYNELTKVKYVTEGMRKPAFLSGEQKKAIVDLLFKTNRKVTVKQLKEDYFKKIECFDSVEISGVEDRFNASLGTYHDLLKIIKDKDFLDNEENEDILEDIVLTLTLFEDREMIEERLKTYAHLFDDKVMKQLKRRRYTGWGRLSRKLINGIRDKQSGKTILDFLKSDGFANRNFMQLIHDDSLTFKEDIQKAQVSGQGDSLHEHIANLAGSPAIKKGILQTVKVVDELVKVMGRHKPENIVIEMARENQTTQKGQKNSRERMKRIEEGIKELGSQILKEHPVENTQLQNEKLYLYYLQNGRDMYVDQELDINRLSDYDVDHIVPQSFLKDDSIDNKVLTRSDKARGKSDNVPSEEVVKKMKNYWRQLLNAKLITQRKFDNLTKAERGGLSELDKAGFIKRQLVETRQITKHVAQILDSRMNTKYDENDKLIREVKVITLKSKLVSDFRKDFQFYKVREINNYHHAHDAYLNAVVGTALIKKYPKLESEFVYGDYKVYDVRKMIAKSEQEIGKATAKYFFYSNIMNFFKTEITLANGEIRKRPLIETNGETGEIVWDKGRDFATVRKVLSMPQVNIVKKTEVQTGGFSKESILPKRNSDKLIARKKDWDPKKYGGFDSPTVAYSVLVVAKVEKGKSKKLKSVKELLGITIMERSSFEKNPIDFLEAKGYKEVKKDLIIKLPKYSLFELENGRKRMLASAGELQKGNELALPSKYVNFLYLASHYEKLKGSPEDNEQKQLFVEQHKHYLDEIIEQISEFSKRVILADANLDKVLSAYNKHRDKPIREQAENIIHLFTLTNLGAPAAFKYFDTTIDRKRYTSTKEVLDATLIHQSITGLYETRIDLSQLGGDGGGGSGSSGGTAPLEEEYRLFLEAPIQNVTLLEQWKREIPKVWAEINPPGLASTQAPIHVQLLSTALPVRVRQYPITLEAKRSLRETIRKFRAAGILRPVHSPWNTPLLPVRKSGTSEYRMVQDLREVNKRVETIHPTVPNPYTLLSLLPPDRIWYSVLDLKDAFFCIPLAPESQLIFAFEWADAEEGESGQLTWTRLPQGFKNSPTLFNEALNRDLQGFRLDHPSVSLLQYVDDLLIAADTQAACLSATRDLLMTLAELGYRVSGKKAQLCQEEVTYLGFKIHKGSRSLSNSRTQAILQIPVPKTKRQVREFLGKIGYCRLFIPGFAELAQPLYAATRPGNDPLVWGEKEEEAFQSLKLALTQPPALALPSLDKPFQLFVEETSGAAKGVLTQALGPWKRPVAYLSKRLDPVAAGWPRCLRAIAAAALLTREASKLTFGQDIEITSSHNLESLLRSPPDKWLTNARITQYQVLLLDPPRVRFKQTAALNPATLLPETDDTLPIHHCLDTLDSLTSTRPDLTDQPLAQAEATLFTDGSSYIRDGKRYAGAAVVTLDSVIWAEPLPIGTSAQKAELIALTKALEWSKDKSVNIYTDSRYAFATLHVHGMIYRERGWLTAGGKAIKNAPEILALLTAVWLPKRVAVMHCKGHQKDDAPTSTGNRRADEVAREVAIRPLSTQATISAGKRTADGSEFEKRTADGSEFESPKKKAKVE

SEQ ID NO: 1413 - protein, 2096 aa, synthetic construct
MPAAKRVKLDGGDKKYSIGLDIGTNSVGWAVITDEYKVPSKKFKVLGNTDRHSIKKNLIGALLFDSGETAEATRLKRTARRRYTRRKNRICYLQEIFSNEMAKVDDSFFHRLEESFLVEEDKKHERHPIFGNIVDEVAYHEKYPTIYHLRKKLVDSTDKADLRLIYLALAHMIKFRGHFLIEGDLNPDNSDVDKLFIQLVQTYNQLFEENPINASGVDAKAILSARLSKSRRLENLIAQLPGEKKNGLFGNLIALSLGLTPNFKSNFDLAEDAKLQLSKDTYDDDLDNLLAQIGDQYADLFLAAKNLSDAILLSDILRVNTEITKAPLSASMIKRYDEHHQDLTLLKALVRQQLPEKYKEIFFDQSKNGYAGYIDGGASQEEFYKFIKPILEKMDGTEELLVKLNREDLLRKQRTFDNGSIPHQIHLGELHAILRRQEDFYPFLKDNREKIEKILTFRIPYYVGPLARGNSRFAWMTRKSEETITPWNFEEVVDKGASAQSFIERMTNFDKNLPNEKVLPKHSLLYEYFTVYNELTKVKYVTEGMRKPAFLSGEQKKAIVDLLFKTNRKVTVKQLKEDYFKKIECFDSVEISGVEDRFNASLGTYHDLLKIIKDKDFLDNEENEDILEDIVLTLTLFEDREMIEERLKTYAHLFDDKVMKQLKRRRYTGWGRLSRKLINGIRDKQSGKTILDFLKSDGFANRNFMQLIHDDSLTFKEDIQKAQVSGQGDSLHEHIANLAGSPAIKKGILQTVKVVDELVKVMGRHKPENIVIEMARENQTTQKGQKNSRERMKRIEEGIKELGSQILKEHPVENTQLQNEKLYLYYLQNGRDMYVDQELDINRLSDYDVDHIVPQSFLKDDSIDNKVLTRSDKARGKSDNVPSEEVVKKMKNYWRQLLNAKLITQRKFDNLTKAERGGLSELDKAGFIKRQLVETRQITKHVAQILDSRMNTKYDENDKLIREVKVITLKSKLVSDFRKDFQFYKVREINNYHHAHDAYLNAVVGTALIKKYPKLESEFVYGDYKVYDVRKMIAKSEQEIGKATAKYFFYSNIMNFFKTEITLANGEIRKRPLIETNGETGEIVWDKGRDFATVRKVLSMPQVNIVKKTEVQTGGFSKESILPKRNSDKLIARKKDWDPKKYGGFDSPTVAYSVLVVAKVEKGKSKKLKSVKELLGITIMERSSFEKNPIDFLEAKGYKEVKKDLIIKLPKYSLFELENGRKRMLASAGELQKGNELALPSKYVNFLYLASHYEKLKGSPEDNEQKQLFVEQHKHYLDEIIEQISEFSKRVILADANLDKVLSAYNKHRDKPIREQAENIIHLFTLTNLGAPAAFKYFDTTIDRKRYTSTKEVLDATLIHQSITGLYETRIDLSQLGGDGGGSSGGGGGSGGTAPLEEEYRLFLEAPIQNVTLLEQWKREIPKVWAEINPPGLASTQAPIHVQLLSTALPVRVRQYPITLEAKRSLRETIRKFRAAGILRPVHSPWNTPLLPVRKSGTSEYRMVQDLREVNKRVETIHPTVPNPYTLLSLLPPDRIWYSVLDLKDAFFCIPLAPESQLIFAFEWADAEEGESGQLTWTRLPQGFKNSPTLFNEALNRDLQGFRLDHPSVSLLQYVDDLLIAADTQAACLSATRDLLMTLAELGYRVSGKKAQLCQEEVTYLGFKIHKGSRSLSNSRTQAILQIPVPKTKRQVREFLGKIGYCRLFIPGFAELAQPLYAATRPGNDPLVWGEKEEEAFQSLKLALTQPPALALPSLDKPFQLFVEETSGAAKGVLTQALGPWKRPVAYLSKRLDPVAAGWPRCLRAIAAAALLTREASKLTFGQDIEITSSHNLESLLRSPPDKWLTNARITQYQVLLLDPPRVRFKQTAALNPATLLPETDDTLPIHHCLDTLDSLTSTRPDLTDQPLAQAEATLFTDGSSYIRDGKRYAGAAVVTLDSVIWAEPLPIGTSAQKAELIALTKALEWSKDKSVNIYTDSRYAFATLHVHGMIYRERGWLTAGGKAIKNAPEILALLTAVWLPKRVAVMHCKGHQKDDAPTSTGNRRADEVAREVAIRPLSTQATISAGKRTADGSEFEKRTADGSEFESPKKKAKVE

SEQ ID NO: 1414 - protein, 2090 aa, synthetic construct
MPAAKRVKLDGGDKKYSIGLDIGTNSVGWAVITDEYKVPSKKFKVLGNTDRHSIKKNLIGALLFDSGETAEATRLKRTARRRYTRRKNRICYLQEIFSNEMAKVDDSFFHRLEESFLVEEDKKHERHPIFGNIVDEVAYHEKYPTIYHLRKKLVDSTDKADLRLIYLALAHMIKFRGHFLIEGDLNPDNSDVDKLFIQLVQTYNQLFEENPINASGVDAKAILSARLSKSRRLENLIAQLPGEKKNGLFGNLIALSLGLTPNFKSNFDLAEDAKLQLSKDTYDDDLDNLLAQIGDQYADLFLAAKNLSDAILLSDILRVNTEITKAPLSASMIKRYDEHHQDLTLLKALVRQQLPEKYKEIFFDQSKNGYAGYIDGGASQEEFYKFIKPILEKMDGTEELLVKLNREDLLRKQRTFDNGSIPHQIHLGELHAILRRQEDFYPFLKDNREKIEKILTFRIPYYVGPLARGNSRFAWMTRKSEETITPWNFEEVVDKGASAQSFIERMTNFDKNLPNEKVLPKHSLLYEYFTVYNELTKVKYVTEGMRKPAFLSGEQKKAIVDLLFKTNRKVTVKQLKEDYFKKIECFDSVEISGVEDRFNASLGTYHDLLKIIKDKDFLDNEENEDILEDIVLTLTLFEDREMIEERLKTYAHLFDDKVMKQLKRRRYTGWGRLSRKLINGIRDKQSGKTILDFLKSDGFANRNFMQLIHDDSLTFKEDIQKAQVSGQGDSLHEHIANLAGSPAIKKGILQTVKVVDELVKVMGRHKPENIVIEMARENQTTQKGQKNSRERMKRIEEGIKELGSQILKEHPVENTQLQNEKLYLYYLQNGRDMYVDQELDINRLSDYDVDHIVPQSFLKDDSIDNKVLTRSDKARGKSDNVPSEEVVKKMKNYWRQLLNAKLITQRKFDNLTKAERGGLSELDKAGFIKRQLVETRQITKHVAQILDSRMNTKYDENDKLIREVKVITLKSKLVSDFRKDFQFYKVREINNYHHAHDAYLNAVVGTALIKKYPKLESEFVYGDYKVYDVRKMIAKSEQEIGKATAKYFFYSNIMNFFKTEITLANGEIRKRPLIETNGETGEIVWDKGRDFATVRKVLSMPQVNIVKKTEVQTGGFSKESILPKRNSDKLIARKKDWDPKKYGGFDSPTVAYSVLVVAKVEKGKSKKLKSVKELLGITIMERSSFEKNPIDFLEAKGYKEVKKDLIIKLPKYSLFELENGRKRMLASAGELQKGNELALPSKYVNFLYLASHYEKLKGSPEDNEQKQLFVEQHKHYLDEIIEQISEFSKRVILADANLDKVLSAYNKHRDKPIREQAENIIHLFTLTNLGAPAAFKYFDTTIDRKRYTSTKEVLDATLIHQSITGLYETRIDLSQLGGDGGPAPGGTAPLEEEYRLFLEAPIQNVTLLEQWKREIPKVWAEINPPGLASTQAPIHVQLLSTALPVRVRQYPITLEAKRSLRETIRKFRAAGILRPVHSPWNTPLLPVRKSGTSEYRMVQDLREVNKRVETIHPTVPNPYTLLSLLPPDRIWYSVLDLKDAFFCIPLAPESQLIFAFEWADAEEGESGQLTWTRLPQGFKNSPTLFNEALNRDLQGFRLDHPSVSLLQYVDDLLIAADTQAACLSATRDLLMTLAELGYRVSGKKAQLCQEEVTYLGFKIHKGSRSLSNSRTQAILQIPVPKTKRQVREFLGKIGYCRLFIPGFAELAQPLYAATRPGNDPLVWGEKEEEAFQSLKLALTQPPALALPSLDKPFQLFVEETSGAAKGVLTQALGPWKRPVAYLSKRLDPVAAGWPRCLRAIAAAALLTREASKLTFGQDIEITSSHNLESLLRSPPDKWLTNARITQYQVLLLDPPRVRFKQTAALNPATLLPETDDTLPIHHCLDTLDSLTSTRPDLTDQPLAQAEATLFTDGSSYIRDGKRYAGAAVVTLDSVIWAEPLPIGTSAQKAELIALTKALEWSKDKSVNIYTDSRYAFATLHVHGMIYRERGWLTAGGKAIKNAPEILALLTAVWLPKRVAVMHCKGHQKDDAPTSTGNRRADEVAREVAIRPLSTQATISAGKRTADGSEFEKRTADGSEFESPKKKAKVE

SEQ ID NO: 1415 - protein, 2098 aa, synthetic construct
MPAAKRVKLDGGDKKYSIGLDIGTNSVGWAVITDEYKVPSKKFKVLGNTDRHSIKKNLIGALLFDSGETAEATRLKRTARRRYTRRKNRICYLQEIFSNEMAKVDDSFFHRLEESFLVEEDKKHERHPIFGNIVDEVAYHEKYPTIYHLRKKLVDSTDKADLRLIYLALAHMIKFRGHFLIEGDLNPDNSDVDKLFIQLVQTYNQLFEENPINASGVDAKAILSARLSKSRRLENLIAQLPGEKKNGLFGNLIALSLGLTPNFKSNFDLAEDAKLQLSKDTYDDDLDNLLAQIGDQYADLFLAAKNLSDAILLSDILRVNTEITKAPLSASMIKRYDEHHQDLTLLKALVRQQLPEKYKEIFFDQSKNGYAGYIDGGASQEEFYKFIKPILEKMDGTEELLVKLNREDLLRKQRTFDNGSIPHQIHLGELHAILRRQEDFYPFLKDNREKIEKILTFRIPYYVGPLARGNSRFAWMTRKSEETITPWNFEEVVDKGASAQSFIERMTNFDKNLPNEKVLPKHSLLYEYFTVYNELTKVKYVTEGMRKPAFLSGEQKKAIVDLLFKTNRKVTVKQLKEDYFKKIECFDSVEISGVEDRFNASLGTYHDLLKIIKDKDFLDNEENEDILEDIVLTLTLFEDREMIEERLKTYAHLFDDKVMKQLKRRRYTGWGRLSRKLINGIRDKQSGKTILDFLKSDGFANRNFMQLIHDDSLTFKEDIQKAQVSGQGDSLHEHIANLAGSPAIKKGILQTVKVVDELVKVMGRHKPENIVIEMARENQTTQKGQKNSRERMKRIEEGIKELGSQILKEHPVENTQLQNEKLYLYYLQNGRDMYVDQELDINRLSDYDVDHIVPQSFLKDDSIDNKVLTRSDKARGKSDNVPSEEVVKKMKNYWRQLLNAKLITQRKFDNLTKAERGGLSELDKAGFIKRQLVETRQITKHVAQILDSRMNTKYDENDKLIREVKVITLKSKLVSDFRKDFQFYKVREINNYHHAHDAYLNAVVGTALIKKYPKLESEFVYGDYKVYDVRKMIAKSEQEIGKATAKYFFYSNIMNFFKTEITLANGEIRKRPLIETNGETGEIVWDKGRDFATVRKVLSMPQVNIVKKTEVQTGGFSKESILPKRNSDKLIARKKDWDPKKYGGFDSPTVAYSVLVVAKVEKGKSKKLKSVKELLGITIMERSSFEKNPIDFLEAKGYKEVKKDLIIKLPKYSLFELENGRKRMLASAGELQKGNELALPSKYVNFLYLASHYEKLKGSPEDNEQKQLFVEQHKHYLDEIIEQISEFSKRVILADANLDKVLSAYNKHRDKPIREQAENIIHLFTLTNLGAPAAFKYFDTTIDRKRYTSTKEVLDATLIHQSITGLYETRIDLSQLGGDGGGGGPAPEAAAKGGTAPLEEEYRLFLEAPIQNVTLLEQWKREIPKVWAEINPPGLASTQAPIHVQLLSTALPVRVRQYPITLEAKRSLRETIRKFRAAGILRPVHSPWNTPLLPVRKSGTSEYRMVQDLREVNKRVETIHPTVPNPYTLLSLLPPDRIWYSVLDLKDAFFCIPLAPESQLIFAFEWADAEEGESGQLTWTRLPQGFKNSPTLFNEALNRDLQGFRLDHPSVSLLQYVDDLLIAADTQAACLSATRDLLMTLAELGYRVSGKKAQLCQEEVTYLGFKIHKGSRSLSNSRTQAILQIPVPKTKRQVREFLGKIGYCRLFIPGFAELAQPLYAATRPGNDPLVWGEKEEEAFQSLKLALTQPPALALPSLDKPFQLFVEETSGAAKGVLTQALGPWKRPVAYLSKRLDPVAAGWPRCLRAIAAAALLTREASKLTFGQDIEITSSHNLESLLRSPPDKWLTNARITQYQVLLLDPPRVRFKQTAALNPATLLPETDDTLPIHHCLDTLDSLTSTRPDLTDQPLAQAEATLFTDGSSYIRDGKRYAGAAVVTLDSVIWAEPLPIGTSAQKAELIALTKALEWSKDKSVNIYTDSRYAFATLHVHGMIYRERGWLTAGGKAIKNAPEILALLTAVWLPKRVAVMHCKGHQKDDAPTSTGNRRADEVAREVAIRPLSTQATISAGKRTADGSEFEKRTADGSEFESPKKKAKVE

SEQ ID NO: 1416 - protein, 2098 aa, synthetic construct
MPAAKRVKLDGGDKKYSIGLDIGTNSVGWAVITDEYKVPSKKFKVLGNTDRHSIKKNLIGALLFDSGETAEATRLKRTARRRYTRRKNRICYLQEIFSNEMAKVDDSFFHRLEESFLVEEDKKHERHPIFGNIVDEVAYHEKYPTIYHLRKKLVDSTDKADLRLIYLALAHMIKFRGHFLIEGDLNPDNSDVDKLFIQLVQTYNQLFEENPINASGVDAKAILSARLSKSRRLENLIAQLPGEKKNGLFGNLIALSLGLTPNFKSNFDLAEDAKLQLSKDTYDDDLDNLLAQIGDQYADLFLAAKNLSDAILLSDILRVNTEITKAPLSASMIKRYDEHHQDLTLLKALVRQQLPEKYKEIFFDQSKNGYAGYIDGGASQEEFYKFIKPILEKMDGTEELLVKLNREDLLRKQRTFDNGSIPHQIHLGELHAILRRQEDFYPFLKDNREKIEKILTFRIPYYVGPLARGNSRFAWMTRKSEETITPWNFEEVVDKGASAQSFIERMTNFDKNLPNEKVLPKHSLLYEYFTVYNELTKVKYVTEGMRKPAFLSGEQKKAIVDLLFKTNRKVTVKQLKEDYFKKIECFDSVEISGVEDRFNASLGTYHDLLKIIKDKDFLDNEENEDILEDIVLTLTLFEDREMIEERLKTYAHLFDDKVMKQLKRRRYTGWGRLSRKLINGIRDKQSGKTILDFLKSDGFANRNFMQLIHDDSLTFKEDIQKAQVSGQGDSLHEHIANLAGSPAIKKGILQTVKVVDELVKVMGRHKPENIVIEMARENQTTQKGQKNSRERMKRIEEGIKELGSQILKEHPVENTQLQNEKLYLYYLQNGRDMYVDQELDINRLSDYDVDHIVPQSFLKDDSIDNKVLTRSDKARGKSDNVPSEEVVKKMKNYWRQLLNAKLITQRKFDNLTKAERGGLSELDKAGFIKRQLVETRQITKHVAQILDSRMNTKYDENDKLIREVKVITLKSKLVSDFRKDFQFYKVREINNYHHAHDAYLNAVVGTALIKKYPKLESEFVYGDYKVYDVRKMIAKSEQEIGKATAKYFFYSNIMNFFKTEITLANGEIRKRPLIETNGETGEIVWDKGRDFATVRKVLSMPQVNIVKKTEVQTGGFSKESILPKRNSDKLIARKKDWDPKKYGGFDSPTVAYSVLVVAKVEKGKSKKLKSVKELLGITIMERSSFEKNPIDFLEAKGYKEVKKDLIIKLPKYSLFELENGRKRMLASAGELQKGNELALPSKYVNFLYLASHYEKLKGSPEDNEQKQLFVEQHKHYLDEIIEQISEFSKRVILADANLDKVLSAYNKHRDKPIREQAENIIHLFTLTNLGAPAAFKYFDTTIDRKRYTSTKEVLDATLIHQSITGLYETRIDLSQLGGDGGEAAAKGSSPAPGGTAPLEEEYRLFLEAPIQNVTLLEQWKREIPKVWAEINPPGLASTQAPIHVQLLSTALPVRVRQYPITLEAKRSLRETIRKFRAAGILRPVHSPWNTPLLPVRKSGTSEYRMVQDLREVNKRVETIHPTVPNPYTLLSLLPPDRIWYSVLDLKDAFFCIPLAPESQLIFAFEWADAEEGESGQLTWTRLPQGFKNSPTLFNEALNRDLQGFRLDHPSVSLLQYVDDLLIAADTQAACLSATRDLLMTLAELGYRVSGKKAQLCQEEVTYLGFKIHKGSRSLSNSRTQAILQIPVPKTKRQVREFLGKIGYCRLFIPGFAELAQPLYAATRPGNDPLVWGEKEEEAFQSLKLALTQPPALALPSLDKPFQLFVEETSGAAKGVLTQALGPWKRPVAYLSKRLDPVAAGWPRCLRAIAAAALLTREASKLTFGQDIEITSSHNLESLLRSPPDKWLTNARITQYQVLLLDPPRVRFKQTAALNPATLLPETDDTLPIHHCLDTLDSLTSTRPDLTDQPLAQAEATLFTDGSSYIRDGKRYAGAAVVTLDSVIWAEPLPIGTSAQKAELIALTKALEWSKDKSVNIYTDSRYAFATLHVHGMIYRERGWLTAGGKAIKNAPEILALLTAVWLPKRVAVMHCKGHQKDDAPTSTGNRRADEVAREVAIRPLSTQATISAGKRTADGSEFEKRTADGSEFESPKKKAKVE

SEQ ID NO: 1417 - protein, 2090 aa, synthetic construct
MPAAKRVKLDGGDKKYSIGLDIGTNSVGWAVITDEYKVPSKKFKVLGNTDRHSIKKNLIGALLFDSGETAEATRLKRTARRRYTRRKNRICYLQEIFSNEMAKVDDSFFHRLEESFLVEEDKKHERHPIFGNIVDEVAYHEKYPTIYHLRKKLVDSTDKADLRLIYLALAHMIKFRGHFLIEGDLNPDNSDVDKLFIQLVQTYNQLFEENPINASGVDAKAILSARLSKSRRLENLIAQLPGEKKNGLFGNLIALSLGLTPNFKSNFDLAEDAKLQLSKDTYDDDLDNLLAQIGDQYADLFLAAKNLSDAILLSDILRVNTEITKAPLSASMIKRYDEHHQDLTLLKALVRQQLPEKYKEIFFDQSKNGYAGYIDGGASQEEFYKFIKPILEKMDGTEELLVKLNREDLLRKQRTFDNGSIPHQIHLGELHAILRRQEDFYPFLKDNREKIEKILTFRIPYYVGPLARGNSRFAWMTRKSEETITPWNFEEVVDKGASAQSFIERMTNFDKNLPNEKVLPKHSLLYEYFTVYNELTKVKYVTEGMRKPAFLSGEQKKAIVDLLFKTNRKVTVKQLKEDYFKKIECFDSVEISGVEDRFNASLGTYHDLLKIIKDKDFLDNEENEDILEDIVLTLTLFEDREMIEERLKTYAHLFDDKVMKQLKRRRYTGWGRLSRKLINGIRDKQSGKTILDFLKSDGFANRNFMQLIHDDSLTFKEDIQKAQVSGQGDSLHEHIANLAGSPAIKKGILQTVKVVDELVKVMGRHKPENIVIEMARENQTTQKGQKNSRERMKRIEEGIKELGSQILKEHPVENTQLQNEKLYLYYLQNGRDMYVDQELDINRLSDYDVDHIVPQSFLKDDSIDNKVLTRSDKARGKSDNVPSEEVVKKMKNYWRQLLNAKLITQRKFDNLTKAERGGLSELDKAGFIKRQLVETRQITKHVAQILDSRMNTKYDENDKLIREVKVITLKSKLVSDFRKDFQFYKVREINNYHHAHDAYLNAVVGTALIKKYPKLESEFVYGDYKVYDVRKMIAKSEQEIGKATAKYFFYSNIMNFFKTEITLANGEIRKRPLIETNGETGEIVWDKGRDFATVRKVLSMPQVNIVKKTEVQTGGFSKESILPKRNSDKLIARKKDWDPKKYGGFDSPTVAYSVLVVAKVEKGKSKKLKSVKELLGITIMERSSFEKNPIDFLEAKGYKEVKKDLIIKLPKYSLFELENGRKRMLASAGELQKGNELALPSKYVNFLYLASHYEKLKGSPEDNEQKQLFVEQHKHYLDEIIEQISEFSKRVILADANLDKVLSAYNKHRDKPIREQAENIIHLFTLTNLGAPAAFKYFDTTIDRKRYTSTKEVLDATLIHQSITGLYETRIDLSQLGGDGGGSSGGTAPLEEEYRLFLEAPIQNVTLLEQWKREIPKVWAEINPPGLASTQAPIHVQLLSTALPVRVRQYPITLEAKRSLRETIRKFRAAGILRPVHSPWNTPLLPVRKSGTSEYRMVQDLREVNKRVETIHPTVPNPYTLLSLLPPDRIWYSVLDLKDAFFCIPLAPESQLIFAFEWADAEEGESGQLTWTRLPQGFKNSPTLFNEALNRDLQGFRLDHPSVSLLQYVDDLLIAADTQAACLSATRDLLMTLAELGYRVSGKKAQLCQEEVTYLGFKIHKGSRSLSNSRTQAILQIPVPKTKRQVREFLGKIGYCRLFIPGFAELAQPLYAATRPGNDPLVWGEKEEEAFQSLKLALTQPPALALPSLDKPFQLFVEETSGAAKGVLTQALGPWKRPVAYLSKRLDPVAAGWPRCLRAIAAAALLTREASKLTFGQDIEITSSHNLESLLRSPPDKWLTNARITQYQVLLLDPPRVRFKQTAALNPATLLPETDDTLPIHHCLDTLDSLTSTRPDLTDQPLAQAEATLFTDGSSYIRDGKRYAGAAVVTLDSVIWAEPLPIGTSAQKAELIALTKALEWSKDKSVNIYTDSRYAFATLHVHGMIYRERGWLTAGGKAIKNAPEILALLTAVWLPKRVAVMHCKGHQKDDAPTSTGNRRADEVAREVAIRPLSTQATISAGKRTADGSEFEKRTADGSEFESPKKKAKVE

SEQ ID NO: 1418 - protein, 2096 aa, synthetic construct
MPAAKRVKLDGGDKKYSIGLDIGTNSVGWAVITDEYKVPSKKFKVLGNTDRHSIKKNLIGALLFDSGETAEATRLKRTARRRYTRRKNRICYLQEIFSNEMAKVDDSFFHRLEESFLVEEDKKHERHPIFGNIVDEVAYHEKYPTIYHLRKKLVDSTDKADLRLIYLALAHMIKFRGHFLIEGDLNPDNSDVDKLFIQLVQTYNQLFEENPINASGVDAKAILSARLSKSRRLENLIAQLPGEKKNGLFGNLIALSLGLTPNFKSNFDLAEDAKLQLSKDTYDDDLDNLLAQIGDQYADLFLAAKNLSDAILLSDILRVNTEITKAPLSASMIKRYDEHHQDLTLLKALVRQQLPEKYKEIFFDQSKNGYAGYIDGGASQEEFYKFIKPILEKMDGTEELLVKLNREDLLRKQRTFDNGSIPHQIHLGELHAILRRQEDFYPFLKDNREKIEKILTFRIPYYVGPLARGNSRFAWMTRKSEETITPWNFEEVVDKGASAQSFIERMTNFDKNLPNEKVLPKHSLLYEYFTVYNELTKVKYVTEGMRKPAFLSGEQKKAIVDLLFKTNRKVTVKQLKEDYFKKIECFDSVEISGVEDRFNASLGTYHDLLKIIKDKDFLDNEENEDILEDIVLTLTLFEDREMIEERLKTYAHLFDDKVMKQLKRRRYTGWGRLSRKLINGIRDKQSGKTILDFLKSDGFANRNFMQLIHDDSLTFKEDIQKAQVSGQGDSLHEHIANLAGSPAIKKGILQTVKVVDELVKVMGRHKPENIVIEMARENQTTQKGQKNSRERMKRIEEGIKELGSQILKEHPVENTQLQNEKLYLYYLQNGRDMYVDQELDINRLSDYDVDHIVPQSFLKDDSIDNKVLTRSDKARGKSDNVPSEEVVKKMKNYWRQLLNAKLITQRKFDNLTKAERGGLSELDKAGFIKRQLVETRQITKHVAQILDSRMNTKYDENDKLIREVKVITLKSKLVSDFRKDFQFYKVREINNYHHAHDAYLNAVVGTALIKKYPKLESEFVYGDYKVYDVRKMIAKSEQEIGKATAKYFFYSNIMNFFKTEITLANGEIRKRPLIETNGETGEIVWDKGRDFATVRKVLSMPQVNIVKKTEVQTGGFSKESILPKRNSDKLIARKKDWDPKKYGGFDSPTVAYSVLVVAKVEKGKSKKLKSVKELLGITIMERSSFEKNPIDFLEAKGYKEVKKDLIIKLPKYSLFELENGRKRMLASAGELQKGNELALPSKYVNFLYLASHYEKLKGSPEDNEQKQLFVEQHKHYLDEIIEQISEFSKRVILADANLDKVLSAYNKHRDKPIREQAENIIHLFTLTNLGAPAAFKYFDTTIDRKRYTSTKEVLDATLIHQSITGLYETRIDLSQLGGDGGGGSGSSGGGGGTAPLEEEYRLFLEAPIQNVTLLEQWKREIPKVWAEINPPGLASTQAPIHVQLLSTALPVRVRQYPITLEAKRSLRETIRKFRAAGILRPVHSPWNTPLLPVRKSGTSEYRMVQDLREVNKRVETIHPTVPNPYTLLSLLPPDRIWYSVLDLKDAFFCIPLAPESQLIFAFEWADAEEGESGQLTWTRLPQGFKNSPTLFNEALNRDLQGFRLDHPSVSLLQYVDDLLIAADTQAACLSATRDLLMTLAELGYRVSGKKAQLCQEEVTYLGFKIHKGSRSLSNSRTQAILQIPVPKTKRQVREFLGKIGYCRLFIPGFAELAQPLYAATRPGNDPLVWGEKEEEAFQSLKLALTQPPALALPSLDKPFQLFVEETSGAAKGVLTQALGPWKRPVAYLSKRLDPVAAGWPRCLRAIAAAALLTREASKLTFGQDIEITSSHNLESLLRSPPDKWLTNARITQYQVLLLDPPRVRFKQTAALNPATLLPETDDTLPIHHCLDTLDSLTSTRPDLTDQPLAQAEATLFTDGSSYIRDGKRYAGAAVVTLDSVIWAEPLPIGTSAQKAELIALTKALEWSKDKSVNIYTDSRYAFATLHVHGMIYRERGWLTAGGKAIKNAPEILALLTAVWLPKRVAVMHCKGHQKDDAPTSTGNRRADEVAREVAIRPLSTQATISAGKRTADGSEFEKRTADGSEFESPKKKAKVE

SEQ ID NO: 1419 - protein, 2098 aa, synthetic construct
MPAAKRVKLDGGDKKYSIGLDIGTNSVGWAVITDEYKVPSKKFKVLGNTDRHSIKKNLIGALLFDSGETAEATRLKRTARRRYTRRKNRICYLQEIFSNEMAKVDDSFFHRLEESFLVEEDKKHERHPIFGNIVDEVAYHEKYPTIYHLRKKLVDSTDKADLRLIYLALAHMIKFRGHFLIEGDLNPDNSDVDKLFIQLVQTYNQLFEENPINASGVDAKAILSARLSKSRRLENLIAQLPGEKKNGLFGNLIALSLGLTPNFKSNFDLAEDAKLQLSKDTYDDDLDNLLAQIGDQYADLFLAAKNLSDAILLSDILRVNTEITKAPLSASMIKRYDEHHQDLTLLKALVRQQLPEKYKEIFFDQSKNGYAGYIDGGASQEEFYKFIKPILEKMDGTEELLVKLNREDLLRKQRTFDNGSIPHQIHLGELHAILRRQEDFYPFLKDNREKIEKILTFRIPYYVGPLARGNSRFAWMTRKSEETITPWNFEEVVDKGASAQSFIERMTNFDKNLPNEKVLPKHSLLYEYFTVYNELTKVKYVTEGMRKPAFLSGEQKKAIVDLLFKTNRKVTVKQLKEDYFKKIECFDSVEISGVEDRFNASLGTYHDLLKIIKDKDFLDNEENEDILEDIVLTLTLFEDREMIEERLKTYAHLFDDKVMKQLKRRRYTGWGRLSRKLINGIRDKQSGKTILDFLKSDGFANRNFMQLIHDDSLTFKEDIQKAQVSGQGDSLHEHIANLAGSPAIKKGILQTVKVVDELVKVMGRHKPENIVIEMARENQTTQKGQKNSRERMKRIEEGIKELGSQILKEHPVENTQLQNEKLYLYYLQNGRDMYVDQELDINRLSDYDVDHIVPQSFLKDDSIDNKVLTRSDKARGKSDNVPSEEVVKKMKNYWRQLLNAKLITQRKFDNLTKAERGGLSELDKAGFIKRQLVETRQITKHVAQILDSRMNTKYDENDKLIREVKVITLKSKLVSDFRKDFQFYKVREINNYHHAHDAYLNAVVGTALIKKYPKLESEFVYGDYKVYDVRKMIAKSEQEIGKATAKYFFYSNIMNFFKTEITLANGEIRKRPLIETNGETGEIVWDKGRDFATVRKVLSMPQVNIVKKTEVQTGGFSKESILPKRNSDKLIARKKDWDPKKYGGFDSPTVAYSVLVVAKVEKGKSKKLKSVKELLGITIMERSSFEKNPIDFLEAKGYKEVKKDLIIKLPKYSLFELENGRKRMLASAGELQKGNELALPSKYVNFLYLASHYEKLKGSPEDNEQKQLFVEQHKHYLDEIIEQISEFSKRVILADANLDKVLSAYNKHRDKPIREQAENIIHLFTLTNLGAPAAFKYFDTTIDRKRYTSTKEVLDATLIHQSITGLYETRIDLSQLGGDGGEAAAKGSSGGGGGTAPLEEEYRLFLEAPIQNVTLLEQWKREIPKVWAEINPPGLASTQAPIHVQLLSTALPVRVRQYPITLEAKRSLRETIRKFRAAGILRPVHSPWNTPLLPVRKSGTSEYRMVQDLREVNKRVETIHPTVPNPYTLLSLLPPDRIWYSVLDLKDAFFCIPLAPESQLIFAFEWADAEEGESGQLTWTRLPQGFKNSPTLFNEALNRDLQGFRLDHPSVSLLQYVDDLLIAADTQAACLSATRDLLMTLAELGYRVSGKKAQLCQEEVTYLGFKIHKGSRSLSNSRTQAILQIPVPKTKRQVREFLGKIGYCRLFIPGFAELAQPLYAATRPGNDPLVWGEKEEEAFQSLKLALTQPPALALPSLDKPFQLFVEETSGAAKGVLTQALGPWKRPVAYLSKRLDPVAAGWPRCLRAIAAAALLTREASKLTFGQDIEITSSHNLESLLRSPPDKWLTNARITQYQVLLLDPPRVRFKQTAALNPATLLPETDDTLPIHHCLDTLDSLTSTRPDLTDQPLAQAEATLFTDGSSYIRDGKRYAGAAVVTLDSVIWAEPLPIGTSAQKAELIALTKALEWSKDKSVNIYTDSRYAFATLHVHGMIYRERGWLTAGGKAIKNAPEILALLTAVWLPKRVAVMHCKGHQKDDAPTSTGNRRADEVAREVAIRPLSTQATISAGKRTADGSEFEKRTADGSEFESPKKKAKVE

SEQ ID NO: 1420 - protein, 2096 aa, synthetic construct
MPAAKRVKLDGGDKKYSIGLDIGTNSVGWAVITDEYKVPSKKFKVLGNTDRHSIKKNLIGALLFDSGETAEATRLKRTARRRYTRRKNRICYLQEIFSNEMAKVDDSFFHRLEESFLVEEDKKHERHPIFGNIVDEVAYHEKYPTIYHLRKKLVDSTDKADLRLIYLALAHMIKFRGHFLIEGDLNPDNSDVDKLFIQLVQTYNQLFEENPINASGVDAKAILSARLSKSRRLENLIAQLPGEKKNGLFGNLIALSLGLTPNFKSNFDLAEDAKLQLSKDTYDDDLDNLLAQIGDQYADLFLAAKNLSDAILLSDILRVNTEITKAPLSASMIKRYDEHHQDLTLLKALVRQQLPEKYKEIFFDQSKNGYAGYIDGGASQEEFYKFIKPILEKMDGTEELLVKLNREDLLRKQRTFDNGSIPHQIHLGELHAILRRQEDFYPFLKDNREKIEKILTFRIPYYVGPLARGNSRFAWMTRKSEETITPWNFEEVVDKGASAQSFIERMTNFDKNLPNEKVLPKHSLLYEYFTVYNELTKVKYVTEGMRKPAFLSGEQKKAIVDLLFKTNRKVTVKQLKEDYFKKIECFDSVEISGVEDRFNASLGTYHDLLKIIKDKDFLDNEENEDILEDIVLTLTLFEDREMIEERLKTYAHLFDDKVMKQLKRRRYTGWGRLSRKLINGIRDKQSGKTILDFLKSDGFANRNFMQLIHDDSLTFKEDIQKAQVSGQGDSLHEHIANLAGSPAIKKGILQTVKVVDELVKVMGRHKPENIVIEMARENQTTQKGQKNSRERMKRIEEGIKELGSQILKEHPVENTQLQNEKLYLYYLQNGRDMYVDQELDINRLSDYDVDHIVPQSFLKDDSIDNKVLTRSDKARGKSDNVPSEEVVKKMKNYWRQLLNAKLITQRKFDNLTKAERGGLSELDKAGFIKRQLVETRQITKHVAQILDSRMNTKYDENDKLIREVKVITLKSKLVSDFRKDFQFYKVREINNYHHAHDAYLNAVVGTALIKKYPKLESEFVYGDYKVYDVRKMIAKSEQEIGKATAKYFFYSNIMNFFKTEITLANGEIRKRPLIETNGETGEIVWDKGRDFATVRKVLSMPQVNIVKKTEVQTGGFSKESILPKRNSDKLIARKKDWDPKKYGGFDSPTVAYSVLVVAKVEKGKSKKLKSVKELLGITIMERSSFEKNPIDFLEAKGYKEVKKDLIIKLPKYSLFELENGRKRMLASAGELQKGNELALPSKYVNFLYLASHYEKLKGSPEDNEQKQLFVEQHKHYLDEIIEQISEFSKRVILADANLDKVLSAYNKHRDKPIREQAENIIHLFTLTNLGAPAAFKYFDTTIDRKRYTSTKEVLDATLIHQSITGLYETRIDLSQLGGDGGGGGGSSGGSGGTAPLEEEYRLFLEAPIQNVTLLEQWKREIPKVWAEINPPGLASTQAPIHVQLLSTALPVRVRQYPITLEAKRSLRETIRKFRAAGILRPVHSPWNTPLLPVRKSGTSEYRMVQDLREVNKRVETIHPTVPNPYTLLSLLPPDRIWYSVLDLKDAFFCIPLAPESQLIFAFEWADAEEGESGQLTWTRLPQGFKNSPTLFNEALNRDLQGFRLDHPSVSLLQYVDDLLIAADTQAACLSATRDLLMTLAELGYRVSGKKAQLCQEEVTYLGFKIHKGSRSLSNSRTQAILQIPVPKTKRQVREFLGKIGYCRLFIPGFAELAQPLYAATRPGNDPLVWGEKEEEAFQSLKLALTQPPALALPSLDKPFQLFVEETSGAAKGVLTQALGPWKRPVAYLSKRLDPVAAGWPRCLRAIAAAALLTREASKLTFGQDIEITSSHNLESLLRSPPDKWLTNARITQYQVLLLDPPRVRFKQTAALNPATLLPETDDTLPIHHCLDTLDSLTSTRPDLTDQPLAQAEATLFTDGSSYIRDGKRYAGAAVVTLDSVIWAEPLPIGTSAQKAELIALTKALEWSKDKSVNIYTDSRYAFATLHVHGMIYRERGWLTAGGKAIKNAPEILALLTAVWLPKRVAVMHCKGHQKDDAPTSTGNRRADEVAREVAIRPLSTQATISAGKRTADGSEFEKRTADGSEFESPKKKAKVE

SEQ ID NO: 1421 - protein, 2100 aa, synthetic construct
MPAAKRVKLDGGDKKYSIGLDIGTNSVGWAVITDEYKVPSKKFKVLGNTDRHSIKKNLIGALLFDSGETAEATRLKRTARRRYTRRKNRICYLQEIFSNEMAKVDDSFFHRLEESFLVEEDKKHERHPIFGNIVDEVAYHEKYPTIYHLRKKLVDSTDKADLRLIYLALAHMIKFRGHFLIEGDLNPDNSDVDKLFIQLVQTYNQLFEENPINASGVDAKAILSARLSKSRRLENLIAQLPGEKKNGLFGNLIALSLGLTPNFKSNFDLAEDAKLQLSKDTYDDDLDNLLAQIGDQYADLFLAAKNLSDAILLSDILRVNTEITKAPLSASMIKRYDEHHQDLTLLKALVRQQLPEKYKEIFFDQSKNGYAGYIDGGASQEEFYKFIKPILEKMDGTEELLVKLNREDLLRKQRTFDNGSIPHQIHLGELHAILRRQEDFYPFLKDNREKIEKILTFRIPYYVGPLARGNSRFAWMTRKSEETITPWNFEEVVDKGASAQSFIERMTNFDKNLPNEKVLPKHSLLYEYFTVYNELTKVKYVTEGMRKPAFLSGEQKKAIVDLLFKTNRKVTVKQLKEDYFKKIECFDSVEISGVEDRFNASLGTYHDLLKIIKDKDFLDNEENEDILEDIVLTLTLFEDREMIEERLKTYAHLFDDKVMKQLKRRRYTGWGRLSRKLINGIRDKQSGKTILDFLKSDGFANRNFMQLIHDDSLTFKEDIQKAQVSGQGDSLHEHIANLAGSPAIKKGILQTVKVVDELVKVMGRHKPENIVIEMARENQTTQKGQKNSRERMKRIEEGIKELGSQILKEHPVENTQLQNEKLYLYYLQNGRDMYVDQELDINRLSDYDVDHIVPQSFLKDDSIDNKVLTRSDKARGKSDNVPSEEVVKKMKNYWRQLLNAKLITQRKFDNLTKAERGGLSELDKAGFIKRQLVETRQITKHVAQILDSRMNTKYDENDKLIREVKVITLKSKLVSDFRKDFQFYKVREINNYHHAHDAYLNAVVGTALIKKYPKLESEFVYGDYKVYDVRKMIAKSEQEIGKATAKYFFYSNIMNFFKTEITLANGEIRKRPLIETNGETGEIVWDKGRDFATVRKVLSMPQVNIVKKTEVQTGGFSKESILPKRNSDKLIARKKDWDPKKYGGFDSPTVAYSVLVVAKVEKGKSKKLKSVKELLGITIMERSSFEKNPIDFLEAKGYKEVKKDLIIKLPKYSLFELENGRKRMLASAGELQKGNELALPSKYVNFLYLASHYEKLKGSPEDNEQKQLFVEQHKHYLDEIIEQISEFSKRVILADANLDKVLSAYNKHRDKPIREQAENIIHLFTLTNLGAPAAFKYFDTTIDRKRYTSTKEVLDATLIHQSITGLYETRIDLSQLGGDGGPAPAPAPAPAPAPGGTAPLEEEYRLFLEAPIQNVTLLEQWKREIPKVWAEINPPGLASTQAPIHVQLLSTALPVRVRQYPITLEAKRSLRETIRKFRAAGILRPVHSPWNTPLLPVRKSGTSEYRMVQDLREVNKRVETIHPTVPNPYTLLSLLPPDRIWYSVLDLKDAFFCIPLAPESQLIFAFEWADAEEGESGQLTWTRLPQGFKNSPTLFNEALNRDLQGFRLDHPSVSLLQYVDDLLIAADTQAACLSATRDLLMTLAELGYRVSGKKAQLCQEEVTYLGFKIHKGSRSLSNSRTQAILQIPVPKTKRQVREFLGKIGYCRLFIPGFAELAQPLYAATRPGNDPLVWGEKEEEAFQSLKLALTQPPALALPSLDKPFQLFVEETSGAAKGVLTQALGPWKRPVAYLSKRLDPVAAGWPRCLRAIAAAALLTREASKLTFGQDIEITSSHNLESLLRSPPDKWLTNARITQYQVLLLDPPRVRFKQTAALNPATLLPETDDTLPIHHCLDTLDSLTSTRPDLTDQPLAQAEATLFTDGSSYIRDGKRYAGAAVVTLDSVIWAEPLPIGTSAQKAELIALTKALEWSKDKSVNIYTDSRYAFATLHVHGMIYRERGWLTAGGKAIKNAPEILALLTAVWLPKRVAVMHCKGHQKDDAPTSTGNRRADEVAREVAIRPLSTQATISAGKRTADGSEFEKRTADGSEFESPKKKAKVE

SEQ ID NO: 1422 - protein, 2095 aa, synthetic construct
MPAAKRVKLDGGDKKYSIGLDIGTNSVGWAVITDEYKVPSKKFKVLGNTDRHSIKKNLIGALLFDSGETAEATRLKRTARRRYTRRKNRICYLQEIFSNEMAKVDDSFFHRLEESFLVEEDKKHERHPIFGNIVDEVAYHEKYPTIYHLRKKLVDSTDKADLRLIYLALAHMIKFRGHFLIEGDLNPDNSDVDKLFIQLVQTYNQLFEENPINASGVDAKAILSARLSKSRRLENLIAQLPGEKKNGLFGNLIALSLGLTPNFKSNFDLAEDAKLQLSKDTYDDDLDNLLAQIGDQYADLFLAAKNLSDAILLSDILRVNTEITKAPLSASMIKRYDEHHQDLTLLKALVRQQLPEKYKEIFFDQSKNGYAGYIDGGASQEEFYKFIKPILEKMDGTEELLVKLNREDLLRKQRTFDNGSIPHQIHLGELHAILRRQEDFYPFLKDNREKIEKILTFRIPYYVGPLARGNSRFAWMTRKSEETITPWNFEEVVDKGASAQSFIERMTNFDKNLPNEKVLPKHSLLYEYFTVYNELTKVKYVTEGMRKPAFLSGEQKKAIVDLLFKTNRKVTVKQLKEDYFKKIECFDSVEISGVEDRFNASLGTYHDLLKIIKDKDFLDNEENEDILEDIVLTLTLFEDREMIEERLKTYAHLFDDKVMKQLKRRRYTGWGRLSRKLINGIRDKQSGKTILDFLKSDGFANRNFMQLIHDDSLTFKEDIQKAQVSGQGDSLHEHIANLAGSPAIKKGILQTVKVVDELVKVMGRHKPENIVIEMARENQTTQKGQKNSRERMKRIEEGIKELGSQILKEHPVENTQLQNEKLYLYYLQNGRDMYVDQELDINRLSDYDVDHIVPQSFLKDDSIDNKVLTRSDKARGKSDNVPSEEVVKKMKNYWRQLLNAKLITQRKFDNLTKAERGGLSELDKAGFIKRQLVETRQITKHVAQILDSRMNTKYDENDKLIREVKVITLKSKLVSDFRKDFQFYKVREINNYHHAHDAYLNAVVGTALIKKYPKLESEFVYGDYKVYDVRKMIAKSEQEIGKATAKYFFYSNIMNFFKTEITLANGEIRKRPLIETNGETGEIVWDKGRDFATVRKVLSMPQVNIVKKTEVQTGGFSKESILPKRNSDKLIARKKDWDPKKYGGFDSPTVAYSVLVVAKVEKGKSKKLKSVKELLGITIMERSSFEKNPIDFLEAKGYKEVKKDLIIKLPKYSLFELENGRKRMLASAGELQKGNELALPSKYVNFLYLASHYEKLKGSPEDNEQKQLFVEQHKHYLDEIIEQISEFSKRVILADANLDKVLSAYNKHRDKPIREQAENIIHLFTLTNLGAPAAFKYFDTTIDRKRYTSTKEVLDATLIHQSITGLYETRIDLSQLGGDGGEAAAKGGGGGTAPLEEEYRLFLEAPIQNVTLLEQWKREIPKVWAEINPPGLASTQAPIHVQLLSTALPVRVRQYPITLEAKRSLRETIRKFRAAGILRPVHSPWNTPLLPVRKSGTSEYRMVQDLREVNKRVETIHPTVPNPYTLLSLLPPDRIWYSVLDLKDAFFCIPLAPESQLIFAFEWADAEEGESGQLTWTRLPQGFKNSPTLFNEALNRDLQGFRLDHPSVSLLQYVDDLLIAADTQAACLSATRDLLMTLAELGYRVSGKKAQLCQEEVTYLGFKIHKGSRSLSNSRTQAILQIPVPKTKRQVREFLGKIGYCRLFIPGFAELAQPLYAATRPGNDPLVWGEKEEEAFQSLKLALTQPPALALPSLDKPFQLFVEETSGAAKGVLTQALGPWKRPVAYLSKRLDPVAAGWPRCLRAIAAAALLTREASKLTFGQDIEITSSHNLESLLRSPPDKWLTNARITQYQVLLLDPPRVRFKQTAALNPATLLPETDDTLPIHHCLDTLDSLTSTRPDLTDQPLAQAEATLFTDGSSYIRDGKRYAGAAVVTLDSVIWAEPLPIGTSAQKAELIALTKALEWSKDKSVNIYTDSRYAFATLHVHGMIYRERGWLTAGGKAIKNAPEILALLTAVWLPKRVAVMHCKGHQKDDAPTSTGNRRADEVAREVAIRPLSTQATISAGKRTADGSEFEKRTADGSEFESPKKKAKVE

SEQ ID NO: 1423 - protein, 2097 aa, synthetic construct
MPAAKRVKLDGGDKKYSIGLDIGTNSVGWAVITDEYKVPSKKFKVLGNTDRHSIKKNLIGALLFDSGETAEATRLKRTARRRYTRRKNRICYLQEIFSNEMAKVDDSFFHRLEESFLVEEDKKHERHPIFGNIVDEVAYHEKYPTIYHLRKKLVDSTDKADLRLIYLALAHMIKFRGHFLIEGDLNPDNSDVDKLFIQLVQTYNQLFEENPINASGVDAKAILSARLSKSRRLENLIAQLPGEKKNGLFGNLIALSLGLTPNFKSNFDLAEDAKLQLSKDTYDDDLDNLLAQIGDQYADLFLAAKNLSDAILLSDILRVNTEITKAPLSASMIKRYDEHHQDLTLLKALVRQQLPEKYKEIFFDQSKNGYAGYIDGGASQEEFYKFIKPILEKMDGTEELLVKLNREDLLRKQRTFDNGSIPHQIHLGELHAILRRQEDFYPFLKDNREKIEKILTFRIPYYVGPLARGNSRFAWMTRKSEETITPWNFEEVVDKGASAQSFIERMTNFDKNLPNEKVLPKHSLLYEYFTVYNELTKVKYVTEGMRKPAFLSGEQKKAIVDLLFKTNRKVTVKQLKEDYFKKIECFDSVEISGVEDRFNASLGTYHDLLKIIKDKDFLDNEENEDILEDIVLTLTLFEDREMIEERLKTYAHLFDDKVMKQLKRRRYTGWGRLSRKLINGIRDKQSGKTILDFLKSDGFANRNFMQLIHDDSLTFKEDIQKAQVSGQGDSLHEHIANLAGSPAIKKGILQTVKVVDELVKVMGRHKPENIVIEMARENQTTQKGQKNSRERMKRIEEGIKELGSQILKEHPVENTQLQNEKLYLYYLQNGRDMYVDQELDINRLSDYDVDHIVPQSFLKDDSIDNKVLTRSDKARGKSDNVPSEEVVKKMKNYWRQLLNAKLITQRKFDNLTKAERGGLSELDKAGFIKRQLVETRQITKHVAQILDSRMNTKYDENDKLIREVKVITLKSKLVSDFRKDFQFYKVREINNYHHAHDAYLNAVVGTALIKKYPKLESEFVYGDYKVYDVRKMIAKSEQEIGKATAKYFFYSNIMNFFKTEITLANGEIRKRPLIETNGETGEIVWDKGRDFATVRKVLSMPQVNIVKKTEVQTGGFSKESILPKRNSDKLIARKKDWDPKKYGGFDSPTVAYSVLVVAKVEKGKSKKLKSVKELLGITIMERSSFEKNPIDFLEAKGYKEVKKDLIIKLPKYSLFELENGRKRMLASAGELQKGNELALPSKYVNFLYLASHYEKLKGSPEDNEQKQLFVEQHKHYLDEIIEQISEFSKRVILADANLDKVLSAYNKHRDKPIREQAENIIHLFTLTNLGAPAAFKYFDTTIDRKRYTSTKEVLDATLIHQSITGLYETRIDLSQLGGDGGGGGGSGGGGSGGTAPLEEEYRLFLEAPIQNVTLLEQWKREIPKVWAEINPPGLASTQAPIHVQLLSTALPVRVRQYPITLEAKRSLRETIRKFRAAGILRPVHSPWNTPLLPVRKSGTSEYRMVQDLREVNKRVETIHPTVPNPYTLLSLLPPDRIWYSVLDLKDAFFCIPLAPESQLIFAFEWADAEEGESGQLTWTRLPQGFKNSPTLFNEALNRDLQGFRLDHPSVSLLQYVDDLLIAADTQAACLSATRDLLMTLAELGYRVSGKKAQLCQEEVTYLGFKIHKGSRSLSNSRTQAILQIPVPKTKRQVREFLGKIGYCRLFIPGFAELAQPLYAATRPGNDPLVWGEKEEEAFQSLKLALTQPPALALPSLDKPFQLFVEETSGAAKGVLTQALGPWKRPVAYLSKRLDPVAAGWPRCLRAIAAAALLTREASKLTFGQDIEITSSHNLESLLRSPPDKWLTNARITQYQVLLLDPPRVRFKQTAALNPATLLPETDDTLPIHHCLDTLDSLTSTRPDLTDQPLAQAEATLFTDGSSYIRDGKRYAGAAVVTLDSVIWAEPLPIGTSAQKAELIALTKALEWSKDKSVNIYTDSRYAFATLHVHGMIYRERGWLTAGGKAIKNAPEILALLTAVWLPKRVAVMHCKGHQKDDAPTSTGNRRADEVAREVAIRPLSTQATISAGKRTADGSEFEKRTADGSEFESPKKKAKVE

SEQ ID NO: 1424 - protein, 2098 aa, synthetic construct
MPAAKRVKLDGGDKKYSIGLDIGTNSVGWAVITDEYKVPSKKFKVLGNTDRHSIKKNLIGALLFDSGETAEATRLKRTARRRYTRRKNRICYLQEIFSNEMAKVDDSFFHRLEESFLVEEDKKHERHPIFGNIVDEVAYHEKYPTIYHLRKKLVDSTDKADLRLIYLALAHMIKFRGHFLIEGDLNPDNSDVDKLFIQLVQTYNQLFEENPINASGVDAKAILSARLSKSRRLENLIAQLPGEKKNGLFGNLIALSLGLTPNFKSNFDLAEDAKLQLSKDTYDDDLDNLLAQIGDQYADLFLAAKNLSDAILLSDILRVNTEITKAPLSASMIKRYDEHHQDLTLLKALVRQQLPEKYKEIFFDQSKNGYAGYIDGGASQEEFYKFIKPILEKMDGTEELLVKLNREDLLRKQRTFDNGSIPHQIHLGELHAILRRQEDFYPFLKDNREKIEKILTFRIPYYVGPLARGNSRFAWMTRKSEETITPWNFEEVVDKGASAQSFIERMTNFDKNLPNEKVLPKHSLLYEYFTVYNELTKVKYVTEGMRKPAFLSGEQKKAIVDLLFKTNRKVTVKQLKEDYFKKIECFDSVEISGVEDRFNASLGTYHDLLKIIKDKDFLDNEENEDILEDIVLTLTLFEDREMIEERLKTYAHLFDDKVMKQLKRRRYTGWGRLSRKLINGIRDKQSGKTILDFLKSDGFANRNFMQLIHDDSLTFKEDIQKAQVSGQGDSLHEHIANLAGSPAIKKGILQTVKVVDELVKVMGRHKPENIVIEMARENQTTQKGQKNSRERMKRIEEGIKELGSQILKEHPVENTQLQNEKLYLYYLQNGRDMYVDQELDINRLSDYDVDHIVPQSFLKDDSIDNKVLTRSDKARGKSDNVPSEEVVKKMKNYWRQLLNAKLITQRKFDNLTKAERGGLSELDKAGFIKRQLVETRQITKHVAQILDSRMNTKYDENDKLIREVKVITLKSKLVSDFRKDFQFYKVREINNYHHAHDAYLNAVVGTALIKKYPKLESEFVYGDYKVYDVRKMIAKSEQEIGKATAKYFFYSNIMNFFKTEITLANGEIRKRPLIETNGETGEIVWDKGRDFATVRKVLSMPQVNIVKKTEVQTGGFSKESILPKRNSDKLIARKKDWDPKKYGGFDSPTVAYSVLVVAKVEKGKSKKLKSVKELLGITIMERSSFEKNPIDFLEAKGYKEVKKDLIIKLPKYSLFELENGRKRMLASAGELQKGNELALPSKYVNFLYLASHYEKLKGSPEDNEQKQLFVEQHKHYLDEIIEQISEFSKRVILADANLDKVLSAYNKHRDKPIREQAENIIHLFTLTNLGAPAAFKYFDTTIDRKRYTSTKEVLDATLIHQSITGLYETRIDLSQLGGDGGGSSGGGEAAAKGGTAPLEEEYRLFLEAPIQNVTLLEQWKREIPKVWAEINPPGLASTQAPIHVQLLSTALPVRVRQYPITLEAKRSLRETIRKFRAAGILRPVHSPWNTPLLPVRKSGTSEYRMVQDLREVNKRVETIHPTVPNPYTLLSLLPPDRIWYSVLDLKDAFFCIPLAPESQLIFAFEWADAEEGESGQLTWTRLPQGFKNSPTLFNEALNRDLQGFRLDHPSVSLLQYVDDLLIAADTQAACLSATRDLLMTLAELGYRVSGKKAQLCQEEVTYLGFKIHKGSRSLSNSRTQAILQIPVPKTKRQVREFLGKIGYCRLFIPGFAELAQPLYAATRPGNDPLVWGEKEEEAFQSLKLALTQPPALALPSLDKPFQLFVEETSGAAKGVLTQALGPWKRPVAYLSKRLDPVAAGWPRCLRAIAAAALLTREASKLTFGQDIEITSSHNLESLLRSPPDKWLTNARITQYQVLLLDPPRVRFKQTAALNPATLLPETDDTLPIHHCLDTLDSLTSTRPDLTDQPLAQAEATLFTDGSSYIRDGKRYAGAAVVTLDSVIWAEPLPIGTSAQKAELIALTKALEWSKDKSVNIYTDSRYAFATLHVHGMIYRERGWLTAGGKAIKNAPEILALLTAVWLPKRVAVMHCKGHQKDDAPTSTGNRRADEVAREVAIRPLSTQATISAGKRTADGSEFEKRTADGSEFESPKKKAKVE

SEQ ID NO: 1425 - protein, 2098 aa, synthetic construct
MPAAKRVKLDGGDKKYSIGLDIGTNSVGWAVITDEYKVPSKKFKVLGNTDRHSIKKNLIGALLFDSGETAEATRLKRTARRRYTRRKNRICYLQEIFSNEMAKVDDSFFHRLEESFLVEEDKKHERHPIFGNIVDEVAYHEKYPTIYHLRKKLVDSTDKADLRLIYLALAHMIKFRGHFLIEGDLNPDNSDVDKLFIQLVQTYNQLFEENPINASGVDAKAILSARLSKSRRLENLIAQLPGEKKNGLFGNLIALSLGLTPNFKSNFDLAEDAKLQLSKDTYDDDLDNLLAQIGDQYADLFLAAKNLSDAILLSDILRVNTEITKAPLSASMIKRYDEHHQDLTLLKALVRQQLPEKYKEIFFDQSKNGYAGYIDGGASQEEFYKFIKPILEKMDGTEELLVKLNREDLLRKQRTFDNGSIPHQIHLGELHAILRRQEDFYPFLKDNREKIEKILTFRIPYYVGPLARGNSRFAWMTRKSEETITPWNFEEVVDKGASAQSFIERMTNFDKNLPNEKVLPKHSLLYEYFTVYNELTKVKYVTEGMRKPAFLSGEQKKAIVDLLFKTNRKVTVKQLKEDYFKKIECFDSVEISGVEDRFNASLGTYHDLLKIIKDKDFLDNEENEDILEDIVLTLTLFEDREMIEERLKTYAHLFDDKVMKQLKRRRYTGWGRLSRKLINGIRDKQSGKTILDFLKSDGFANRNFMQLIHDDSLTFKEDIQKAQVSGQGDSLHEHIANLAGSPAIKKGILQTVKVVDELVKVMGRHKPENIVIEMARENQTTQKGQKNSRERMKRIEEGIKELGSQILKEHPVENTQLQNEKLYLYYLQNGRDMYVDQELDINRLSDYDVDHIVPQSFLKDDSIDNKVLTRSDKARGKSDNVPSEEVVKKMKNYWRQLLNAKLITQRKFDNLTKAERGGLSELDKAGFIKRQLVETRQITKHVAQILDSRMNTKYDENDKLIREVKVITLKSKLVSDFRKDFQFYKVREINNYHHAHDAYLNAVVGTALIKKYPKLESEFVYGDYKVYDVRKMIAKSEQEIGKATAKYFFYSNIMNFFKTEITLANGEIRKRPLIETNGETGEIVWDKGRDFATVRKVLSMPQVNIVKKTEVQTGGFSKESILPKRNSDKLIARKKDWDPKKYGGFDSPTVAYSVLVVAKVEKGKSKKLKSVKELLGITIMERSSFEKNPIDFLEAKGYKEVKKDLIIKLPKYSLFELENGRKRMLASAGELQKGNELALPSKYVNFLYLASHYEKLKGSPEDNEQKQLFVEQHKHYLDEIIEQISEFSKRVILADANLDKVLSAYNKHRDKPIREQAENIIHLFTLTNLGAPAAFKYFDTTIDRKRYTSTKEVLDATLIHQSITGLYETRIDLSQLGGDGGGGSEAAAKGGGGGTAPLEEEYRLFLEAPIQNVTLLEQWKREIPKVWAEINPPGLASTQAPIHVQLLSTALPVRVRQYPITLEAKRSLRETIRKFRAAGILRPVHSPWNTPLLPVRKSGTSEYRMVQDLREVNKRVETIHPTVPNPYTLLSLLPPDRIWYSVLDLKDAFFCIPLAPESQLIFAFEWADAEEGESGQLTWTRLPQGFKNSPTLFNEALNRDLQGFRLDHPSVSLLQYVDDLLIAADTQAACLSATRDLLMTLAELGYRVSGKKAQLCQEEVTYLGFKIHKGSRSLSNSRTQAILQIPVPKTKRQVREFLGKIGYCRLFIPGFAELAQPLYAATRPGNDPLVWGEKEEEAFQSLKLALTQPPALALPSLDKPFQLFVEETSGAAKGVLTQALGPWKRPVAYLSKRLDPVAAGWPRCLRAIAAAALLTREASKLTFGQDIEITSSHNLESLLRSPPDKWLTNARITQYQVLLLDPPRVRFKQTAALNPATLLPETDDTLPIHHCLDTLDSLTSTRPDLTDQPLAQAEATLFTDGSSYIRDGKRYAGAAVVTLDSVIWAEPLPIGTSAQKAELIALTKALEWSKDKSVNIYTDSRYAFATLHVHGMIYRERGWLTAGGKAIKNAPEILALLTAVWLPKRVAVMHCKGHQKDDAPTSTGNRRADEVAREVAIRPLSTQATISAGKRTADGSEFEKRTADGSEFESPKKKAKVE

SEQ ID NO: 1426 - protein, 2117 aa, synthetic construct
MPAAKRVKLDGGDKKYSIGLDIGTNSVGWAVITDEYKVPSKKFKVLGNTDRHSIKKNLIGALLFDSGETAEATRLKRTARRRYTRRKNRICYLQEIFSNEMAKVDDSFFHRLEESFLVEEDKKHERHPIFGNIVDEVAYHEKYPTIYHLRKKLVDSTDKADLRLIYLALAHMIKFRGHFLIEGDLNPDNSDVDKLFIQLVQTYNQLFEENPINASGVDAKAILSARLSKSRRLENLIAQLPGEKKNGLFGNLIALSLGLTPNFKSNFDLAEDAKLQLSKDTYDDDLDNLLAQIGDQYADLFLAAKNLSDAILLSDILRVNTEITKAPLSASMIKRYDEHHQDLTLLKALVRQQLPEKYKEIFFDQSKNGYAGYIDGGASQEEFYKFIKPILEKMDGTEELLVKLNREDLLRKQRTFDNGSIPHQIHLGELHAILRRQEDFYPFLKDNREKIEKILTFRIPYYVGPLARGNSRFAWMTRKSEETITPWNFEEVVDKGASAQSFIERMTNFDKNLPNEKVLPKHSLLYEYFTVYNELTKVKYVTEGMRKPAFLSGEQKKAIVDLLFKTNRKVTVKQLKEDYFKKIECFDSVEISGVEDRFNASLGTYHDLLKIIKDKDFLDNEENEDILEDIVLTLTLFEDREMIEERLKTYAHLFDDKVMKQLKRRRYTGWGRLSRKLINGIRDKQSGKTILDFLKSDGFANRNFMQLIHDDSLTFKEDIQKAQVSGQGDSLHEHIANLAGSPAIKKGILQTVKVVDELVKVMGRHKPENIVIEMARENQTTQKGQKNSRERMKRIEEGIKELGSQILKEHPVENTQLQNEKLYLYYLQNGRDMYVDQELDINRLSDYDVDHIVPQSFLKDDSIDNKVLTRSDKARGKSDNVPSEEVVKKMKNYWRQLLNAKLITQRKFDNLTKAERGGLSELDKAGFIKRQLVETRQITKHVAQILDSRMNTKYDENDKLIREVKVITLKSKLVSDFRKDFQFYKVREINNYHHAHDAYLNAVVGTALIKKYPKLESEFVYGDYKVYDVRKMIAKSEQEIGKATAKYFFYSNIMNFFKTEITLANGEIRKRPLIETNGETGEIVWDKGRDFATVRKVLSMPQVNIVKKTEVQTGGFSKESILPKRNSDKLIARKKDWDPKKYGGFDSPTVAYSVLVVAKVEKGKSKKLKSVKELLGITIMERSSFEKNPIDFLEAKGYKEVKKDLIIKLPKYSLFELENGRKRMLASAGELQKGNELALPSKYVNFLYLASHYEKLKGSPEDNEQKQLFVEQHKHYLDEIIEQISEFSKRVILADANLDKVLSAYNKHRDKPIREQAENIIHLFTLTNLGAPAAFKYFDTTIDRKRYTSTKEVLDATLIHQSITGLYETRIDLSQLGGDGGEAAAKEAAAKEAAAKEAAAKEAAAKEAAAKGGTAPLEEEYRLFLEAPIQNVTLLEQWKREIPKVWAEINPPGLASTQAPIHVQLLSTALPVRVRQYPITLEAKRSLRETIRKFRAAGILRPVHSPWNTPLLPVRKSGTSEYRMVQDLREVNKRVETIHPTVPNPYTLLSLLPPDRIWYSVLDLKDAFFCIPLAPESQLIFAFEWADAEEGESGQLTWTRLPQGFKNSPTLFNEALNRDLQGFRLDHPSVSLLQYVDDLLIAADTQAACLSATRDLLMTLAELGYRVSGKKAQLCQEEVTYLGFKIHKGSRSLSNSRTQAILQIPVPKTKRQVREFLGKIGYCRLFIPGFAELAQPLYAATRPGNDPLVWGEKEEEAFQSLKLALTQPPALALPSLDKPFQLFVEETSGAAKGVLTQALGPWKRPVAYLSKRLDPVAAGWPRCLRAIAAAALLTREASKLTFGQDIEITSSHNLESLLRSPPDKWLTNARITQYQVLLLDPPRVRFKQTAALNPATLLPETDDTLPIHHCLDTLDSLTSTRPDLTDQPLAQAEATLFTDGSSYIRDGKRYAGAAVVTLDSVIWAEPLPIGTSAQKAELIALTKALEWSKDKSVNIYTDSRYAFATLHVHGMIYRERGWLTAGGKAIKNAPEILALLTAVWLPKRVAVMHCKGHQKDDAPTSTGNRRADEVAREVAIRPLSTQATISAGKRTADGSEFEKRTADGSEFESPKKKAKVE

SEQ ID NO: 1427 - protein, 2098 aa, synthetic construct
MPAAKRVKLDGGDKKYSIGLDIGTNSVGWAVITDEYKVPSKKFKVLGNTDRHSIKKNLIGALLFDSGETAEATRLKRTARRRYTRRKNRICYLQEIFSNEMAKVDDSFFHRLEESFLVEEDKKHERHPIFGNIVDEVAYHEKYPTIYHLRKKLVDSTDKADLRLIYLALAHMIKFRGHFLIEGDLNPDNSDVDKLFIQLVQTYNQLFEENPINASGVDAKAILSARLSKSRRLENLIAQLPGEKKNGLFGNLIALSLGLTPNFKSNFDLAEDAKLQLSKDTYDDDLDNLLAQIGDQYADLFLAAKNLSDAILLSDILRVNTEITKAPLSASMIKRYDEHHQDLTLLKALVRQQLPEKYKEIFFDQSKNGYAGYIDGGASQEEFYKFIKPILEKMDGTEELLVKLNREDLLRKQRTFDNGSIPHQIHLGELHAILRRQEDFYPFLKDNREKIEKILTFRIPYYVGPLARGNSRFAWMTRKSEETITPWNFEEVVDKGASAQSFIERMTNFDKNLPNEKVLPKHSLLYEYFTVYNELTKVKYVTEGMRKPAFLSGEQKKAIVDLLFKTNRKVTVKQLKEDYFKKIECFDSVEISGVEDRFNASLGTYHDLLKIIKDKDFLDNEENEDILEDIVLTLTLFEDREMIEERLKTYAHLFDDKVMKQLKRRRYTGWGRLSRKLINGIRDKQSGKTILDFLKSDGFANRNFMQLIHDDSLTFKEDIQKAQVSGQGDSLHEHIANLAGSPAIKKGILQTVKVVDELVKVMGRHKPENIVIEMARENQTTQKGQKNSRERMKRIEEGIKELGSQILKEHPVENTQLQNEKLYLYYLQNGRDMYVDQELDINRLSDYDVDHIVPQSFLKDDSIDNKVLTRSDKARGKSDNVPSEEVVKKMKNYWRQLLNAKLITQRKFDNLTKAERGGLSELDKAGFIKRQLVETRQITKHVAQILDSRMNTKYDENDKLIREVKVITLKSKLVSDFRKDFQFYKVREINNYHHAHDAYLNAVVGTALIKKYPKLESEFVYGDYKVYDVRKMIAKSEQEIGKATAKYFFYSNIMNFFKTEITLANGEIRKRPLIETNGETGEIVWDKGRDFATVRKVLSMPQVNIVKKTEVQTGGFSKESILPKRNSDKLIARKKDWDPKKYGGFDSPTVAYSVLVVAKVEKGKSKKLKSVKELLGITIMERSSFEKNPIDFLEAKGYKEVKKDLIIKLPKYSLFELENGRKRMLASAGELQKGNELALPSKYVNFLYLASHYEKLKGSPEDNEQKQLFVEQHKHYLDEIIEQISEFSKRVILADANLDKVLSAYNKHRDKPIREQAENIIHLFTLTNLGAPAAFKYFDTTIDRKRYTSTKEVLDATLIHQSITGLYETRIDLSQLGGDGGGGGGGSEAAAKGGTAPLEEEYRLFLEAPIQNVTLLEQWKREIPKVWAEINPPGLASTQAPIHVQLLSTALPVRVRQYPITLEAKRSLRETIRKFRAAGILRPVHSPWNTPLLPVRKSGTSEYRMVQDLREVNKRVETIHPTVPNPYTLLSLLPPDRIWYSVLDLKDAFFCIPLAPESQLIFAFEWADAEEGESGQLTWTRLPQGFKNSPTLFNEALNRDLQGFRLDHPSVSLLQYVDDLLIAADTQAACLSATRDLLMTLAELGYRVSGKKAQLCQEEVTYLGFKIHKGSRSLSNSRTQAILQIPVPKTKRQVREFLGKIGYCRLFIPGFAELAQPLYAATRPGNDPLVWGEKEEEAFQSLKLALTQPPALALPSLDKPFQLFVEETSGAAKGVLTQALGPWKRPVAYLSKRLDPVAAGWPRCLRAIAAAALLTREASKLTFGQDIEITSSHNLESLLRSPPDKWLTNARITQYQVLLLDPPRVRFKQTAALNPATLLPETDDTLPIHHCLDTLDSLTSTRPDLTDQPLAQAEATLFTDGSSYIRDGKRYAGAAVVTLDSVIWAEPLPIGTSAQKAELIALTKALEWSKDKSVNIYTDSRYAFATLHVHGMIYRERGWLTAGGKAIKNAPEILALLTAVWLPKRVAVMHCKGHQKDDAPTSTGNRRADEVAREVAIRPLSTQATISAGKRTADGSEFEKRTADGSEFESPKKKAKVE

SEQ ID NO: 1428 - protein, 2095 aa, synthetic construct
MPAAKRVKLDGGDKKYSIGLDIGTNSVGWAVITDEYKVPSKKFKVLGNTDRHSIKKNLIGALLFDSGETAEATRLKRTARRRYTRRKNRICYLQEIFSNEMAKVDDSFFHRLEESFLVEEDKKHERHPIFGNIVDEVAYHEKYPTIYHLRKKLVDSTDKADLRLIYLALAHMIKFRGHFLIEGDLNPDNSDVDKLFIQLVQTYNQLFEENPINASGVDAKAILSARLSKSRRLENLIAQLPGEKKNGLFGNLIALSLGLTPNFKSNFDLAEDAKLQLSKDTYDDDLDNLLAQIGDQYADLFLAAKNLSDAILLSDILRVNTEITKAPLSASMIKRYDEHHQDLTLLKALVRQQLPEKYKEIFFDQSKNGYAGYIDGGASQEEFYKFIKPILEKMDGTEELLVKLNREDLLRKQRTFDNGSIPHQIHLGELHAILRRQEDFYPFLKDNREKIEKILTFRIPYYVGPLARGNSRFAWMTRKSEETITPWNFEEVVDKGASAQSFIERMTNFDKNLPNEKVLPKHSLLYEYFTVYNELTKVKYVTEGMRKPAFLSGEQKKAIVDLLFKTNRKVTVKQLKEDYFKKIECFDSVEISGVEDRFNASLGTYHDLLKIIKDKDFLDNEENEDILEDIVLTLTLFEDREMIEERLKTYAHLFDDKVMKQLKRRRYTGWGRLSRKLINGIRDKQSGKTILDFLKSDGFANRNFMQLIHDDSLTFKEDIQKAQVSGQGDSLHEHIANLAGSPAIKKGILQTVKVVDELVKVMGRHKPENIVIEMARENQTTQKGQKNSRERMKRIEEGIKELGSQILKEHPVENTQLQNEKLYLYYLQNGRDMYVDQELDINRLSDYDVDHIVPQSFLKDDSIDNKVLTRSDKARGKSDNVPSEEVVKKMKNYWRQLLNAKLITQRKFDNLTKAERGGLSELDKAGFIKRQLVETRQITKHVAQILDSRMNTKYDENDKLIREVKVITLKSKLVSDFRKDFQFYKVREINNYHHAHDAYLNAVVGTALIKKYPKLESEFVYGDYKVYDVRKMIAKSEQEIGKATAKYFFYSNIMNFFKTEITLANGEIRKRPLIETNGETGEIVWDKGRDFATVRKVLSMPQVNIVKKTEVQTGGFSKESILPKRNSDKLIARKKDWDPKKYGGFDSPTVAYSVLVVAKVEKGKSKKLKSVKELLGITIMERSSFEKNPIDFLEAKGYKEVKKDLIIKLPKYSLFELENGRKRMLASAGELQKGNELALPSKYVNFLYLASHYEKLKGSPEDNEQKQLFVEQHKHYLDEIIEQISEFSKRVILADANLDKVLSAYNKHRDKPIREQAENIIHLFTLTNLGAPAAFKYFDTTIDRKRYTSTKEVLDATLIHQSITGLYETRIDLSQLGGDGGEAAAKGGSGGTAPLEEEYRLFLEAPIQNVTLLEQWKREIPKVWAEINPPGLASTQAPIHVQLLSTALPVRVRQYPITLEAKRSLRETIRKFRAAGILRPVHSPWNTPLLPVRKSGTSEYRMVQDLREVNKRVETIHPTVPNPYTLLSLLPPDRIWYSVLDLKDAFFCIPLAPESQLIFAFEWADAEEGESGQLTWTRLPQGFKNSPTLFNEALNRDLQGFRLDHPSVSLLQYVDDLLIAADTQAACLSATRDLLMTLAELGYRVSGKKAQLCQEEVTYLGFKIHKGSRSLSNSRTQAILQIPVPKTKRQVREFLGKIGYCRLFIPGFAELAQPLYAATRPGNDPLVWGEKEEEAFQSLKLALTQPPALALPSLDKPFQLFVEETSGAAKGVLTQALGPWKRPVAYLSKRLDPVAAGWPRCLRAIAAAALLTREASKLTFGQDIEITSSHNLESLLRSPPDKWLTNARITQYQVLLLDPPRVRFKQTAALNPATLLPETDDTLPIHHCLDTLDSLTSTRPDLTDQPLAQAEATLFTDGSSYIRDGKRYAGAAVVTLDSVIWAEPLPIGTSAQKAELIALTKALEWSKDKSVNIYTDSRYAFATLHVHGMIYRERGWLTAGGKAIKNAPEILALLTAVWLPKRVAVMHCKGHQKDDAPTSTGNRRADEVAREVAIRPLSTQATISAGKRTADGSEFEKRTADGSEFESPKKKAKVE

SEQ ID NO: 1429 - protein, 2096 aa, synthetic construct
MPAAKRVKLDGGDKKYSIGLDIGTNSVGWAVITDEYKVPSKKFKVLGNTDRHSIKKNLIGALLFDSGETAEATRLKRTARRRYTRRKNRICYLQEIFSNEMAKVDDSFFHRLEESFLVEEDKKHERHPIFGNIVDEVAYHEKYPTIYHLRKKLVDSTDKADLRLIYLALAHMIKFRGHFLIEGDLNPDNSDVDKLFIQLVQTYNQLFEENPINASGVDAKAILSARLSKSRRLENLIAQLPGEKKNGLFGNLIALSLGLTPNFKSNFDLAEDAKLQLSKDTYDDDLDNLLAQIGDQYADLFLAAKNLSDAILLSDILRVNTEITKAPLSASMIKRYDEHHQDLTLLKALVRQQLPEKYKEIFFDQSKNGYAGYIDGGASQEEFYKFIKPILEKMDGTEELLVKLNREDLLRKQRTFDNGSIPHQIHLGELHAILRRQEDFYPFLKDNREKIEKILTFRIPYYVGPLARGNSRFAWMTRKSEETITPWNFEEVVDKGASAQSFIERMTNFDKNLPNEKVLPKHSLLYEYFTVYNELTKVKYVTEGMRKPAFLSGEQKKAIVDLLFKTNRKVTVKQLKEDYFKKIECFDSVEISGVEDRFNASLGTYHDLLKIIKDKDFLDNEENEDILEDIVLTLTLFEDREMIEERLKTYAHLFDDKVMKQLKRRRYTGWGRLSRKLINGIRDKQSGKTILDFLKSDGFANRNFMQLIHDDSLTFKEDIQKAQVSGQGDSLHEHIANLAGSPAIKKGILQTVKVVDELVKVMGRHKPENIVIEMARENQTTQKGQKNSRERMKRIEEGIKELGSQILKEHPVENTQLQNEKLYLYYLQNGRDMYVDQELDINRLSDYDVDHIVPQSFLKDDSIDNKVLTRSDKARGKSDNVPSEEVVKKMKNYWRQLLNAKLITQRKFDNLTKAERGGLSELDKAGFIKRQLVETRQITKHVAQILDSRMNTKYDENDKLIREVKVITLKSKLVSDFRKDFQFYKVREINNYHHAHDAYLNAVVGTALIKKYPKLESEFVYGDYKVYDVRKMIAKSEQEIGKATAKYFFYSNIMNFFKTEITLANGEIRKRPLIETNGETGEIVWDKGRDFATVRKVLSMPQVNIVKKTEVQTGGFSKESILPKRNSDKLIARKKDWDPKKYGGFDSPTVAYSVLVVAKVEKGKSKKLKSVKELLGITIMERSSFEKNPIDFLEAKGYKEVKKDLIIKLPKYSLFELENGRKRMLASAGELQKGNELALPSKYVNFLYLASHYEKLKGSPEDNEQKQLFVEQHKHYLDEIIEQISEFSKRVILADANLDKVLSAYNKHRDKPIREQAENIIHLFTLTNLGAPAAFKYFDTTIDRKRYTSTKEVLDATLIHQSITGLYETRIDLSQLGGDGGPAPAPAPAPGGTAPLEEEYRLFLEAPIQNVTLLEQWKREIPKVWAEINPPGLASTQAPIHVQLLSTALPVRVRQYPITLEAKRSLRETIRKFRAAGILRPVHSPWNTPLLPVRKSGTSEYRMVQDLREVNKRVETIHPTVPNPYTLLSLLPPDRIWYSVLDLKDAFFCIPLAPESQLIFAFEWADAEEGESGQLTWTRLPQGFKNSPTLFNEALNRDLQGFRLDHPSVSLLQYVDDLLIAADTQAACLSATRDLLMTLAELGYRVSGKKAQLCQEEVTYLGFKIHKGSRSLSNSRTQAILQIPVPKTKRQVREFLGKIGYCRLFIPGFAELAQPLYAATRPGNDPLVWGEKEEEAFQSLKLALTQPPALALPSLDKPFQLFVEETSGAAKGVLTQALGPWKRPVAYLSKRLDPVAAGWPRCLRAIAAAALLTREASKLTFGQDIEITSSHNLESLLRSPPDKWLTNARITQYQVLLLDPPRVRFKQTAALNPATLLPETDDTLPIHHCLDTLDSLTSTRPDLTDQPLAQAEATLFTDGSSYIRDGKRYAGAAVVTLDSVIWAEPLPIGTSAQKAELIALTKALEWSKDKSVNIYTDSRYAFATLHVHGMIYRERGWLTAGGKAIKNAPEILALLTAVWLPKRVAVMHCKGHQKDDAPTSTGNRRADEVAREVAIRPLSTQATISAGKRTADGSEFEKRTADGSEFESPKKKAKVE

SEQ ID NO: 1430 - protein, 2093 aa, synthetic construct
MPAAKRVKLDGGDKKYSIGLDIGTNSVGWAVITDEYKVPSKKFKVLGNTDRHSIKKNLIGALLFDSGETAEATRLKRTARRRYTRRKNRICYLQEIFSNEMAKVDDSFFHRLEESFLVEEDKKHERHPIFGNIVDEVAYHEKYPTIYHLRKKLVDSTDKADLRLIYLALAHMIKFRGHFLIEGDLNPDNSDVDKLFIQLVQTYNQLFEENPINASGVDAKAILSARLSKSRRLENLIAQLPGEKKNGLFGNLIALSLGLTPNFKSNFDLAEDAKLQLSKDTYDDDLDNLLAQIGDQYADLFLAAKNLSDAILLSDILRVNTEITKAPLSASMIKRYDEHHQDLTLLKALVRQQLPEKYKEIFFDQSKNGYAGYIDGGASQEEFYKFIKPILEKMDGTEELLVKLNREDLLRKQRTFDNGSIPHQIHLGELHAILRRQEDFYPFLKDNREKIEKILTFRIPYYVGPLARGNSRFAWMTRKSEETITPWNFEEVVDKGASAQSFIERMTNFDKNLPNEKVLPKHSLLYEYFTVYNELTKVKYVTEGMRKPAFLSGEQKKAIVDLLFKTNRKVTVKQLKEDYFKKIECFDSVEISGVEDRFNASLGTYHDLLKIIKDKDFLDNEENEDILEDIVLTLTLFEDREMIEERLKTYAHLFDDKVMKQLKRRRYTGWGRLSRKLINGIRDKQSGKTILDFLKSDGFANRNFMQLIHDDSLTFKEDIQKAQVSGQGDSLHEHIANLAGSPAIKKGILQTVKVVDELVKVMGRHKPENIVIEMARENQTTQKGQKNSRERMKRIEEGIKELGSQILKEHPVENTQLQNEKLYLYYLQNGRDMYVDQELDINRLSDYDVDHIVPQSFLKDDSIDNKVLTRSDKARGKSDNVPSEEVVKKMKNYWRQLLNAKLITQRKFDNLTKAERGGLSELDKAGFIKRQLVETRQITKHVAQILDSRMNTKYDENDKLIREVKVITLKSKLVSDFRKDFQFYKVREINNYHHAHDAYLNAVVGTALIKKYPKLESEFVYGDYKVYDVRKMIAKSEQEIGKATAKYFFYSNIMNFFKTEITLANGEIRKRPLIETNGETGEIVWDKGRDFATVRKVLSMPQVNIVKKTEVQTGGFSKESILPKRNSDKLIARKKDWDPKKYGGFDSPTVAYSVLVVAKVEKGKSKKLKSVKELLGITIMERSSFEKNPIDFLEAKGYKEVKKDLIIKLPKYSLFELENGRKRMLASAGELQKGNELALPSKYVNFLYLASHYEKLKGSPEDNEQKQLFVEQHKHYLDEIIEQISEFSKRVILADANLDKVLSAYNKHRDKPIREQAENIIHLFTLTNLGAPAAFKYFDTTIDRKRYTSTKEVLDATLIHQSITGLYETRIDLSQLGGDGGGSSGGGGGTAPLEEEYRLFLEAPIQNVTLLEQWKREIPKVWAEINPPGLASTQAPIHVQLLSTALPVRVRQYPITLEAKRSLRETIRKFRAAGILRPVHSPWNTPLLPVRKSGTSEYRMVQDLREVNKRVETIHPTVPNPYTLLSLLPPDRIWYSVLDLKDAFFCIPLAPESQLIFAFEWADAEEGESGQLTWTRLPQGFKNSPTLFNEALNRDLQGFRLDHPSVSLLQYVDDLLIAADTQAACLSATRDLLMTLAELGYRVSGKKAQLCQEEVTYLGFKIHKGSRSLSNSRTQAILQIPVPKTKRQVREFLGKIGYCRLFIPGFAELAQPLYAATRPGNDPLVWGEKEEEAFQSLKLALTQPPALALPSLDKPFQLFVEETSGAAKGVLTQALGPWKRPVAYLSKRLDPVAAGWPRCLRAIAAAALLTREASKLTFGQDIEITSSHNLESLLRSPPDKWLTNARITQYQVLLLDPPRVRFKQTAALNPATLLPETDDTLPIHHCLDTLDSLTSTRPDLTDQPLAQAEATLFTDGSSYIRDGKRYAGAAVVTLDSVIWAEPLPIGTSAQKAELIALTKALEWSKDKSVNIYTDSRYAFATLHVHGMIYRERGWLTAGGKAIKNAPEILALLTAVWLPKRVAVMHCKGHQKDDAPTSTGNRRADEVAREVAIRPLSTQATISAGKRTADGSEFEKRTADGSEFESPKKKAKVE

SEQ ID NO: 1431 - protein, 2098 aa, synthetic construct
MPAAKRVKLDGGDKKYSIGLDIGTNSVGWAVITDEYKVPSKKFKVLGNTDRHSIKKNLIGALLFDSGETAEATRLKRTARRRYTRRKNRICYLQEIFSNEMAKVDDSFFHRLEESFLVEEDKKHERHPIFGNIVDEVAYHEKYPTIYHLRKKLVDSTDKADLRLIYLALAHMIKFRGHFLIEGDLNPDNSDVDKLFIQLVQTYNQLFEENPINASGVDAKAILSARLSKSRRLENLIAQLPGEKKNGLFGNLIALSLGLTPNFKSNFDLAEDAKLQLSKDTYDDDLDNLLAQIGDQYADLFLAAKNLSDAILLSDILRVNTEITKAPLSASMIKRYDEHHQDLTLLKALVRQQLPEKYKEIFFDQSKNGYAGYIDGGASQEEFYKFIKPILEKMDGTEELLVKLNREDLLRKQRTFDNGSIPHQIHLGELHAILRRQEDFYPFLKDNREKIEKILTFRIPYYVGPLARGNSRFAWMTRKSEETITPWNFEEVVDKGASAQSFIERMTNFDKNLPNEKVLPKHSLLYEYFTVYNELTKVKYVTEGMRKPAFLSGEQKKAIVDLLFKTNRKVTVKQLKEDYFKKIECFDSVEISGVEDRFNASLGTYHDLLKIIKDKDFLDNEENEDILEDIVLTLTLFEDREMIEERLKTYAHLFDDKVMKQLKRRRYTGWGRLSRKLINGIRDKQSGKTILDFLKSDGFANRNFMQLIHDDSLTFKEDIQKAQVSGQGDSLHEHIANLAGSPAIKKGILQTVKVVDELVKVMGRHKPENIVIEMARENQTTQKGQKNSRERMKRIEEGIKELGSQILKEHPVENTQLQNEKLYLYYLQNGRDMYVDQELDINRLSDYDVDHIVPQSFLKDDSIDNKVLTRSDKARGKSDNVPSEEVVKKMKNYWRQLLNAKLITQRKFDNLTKAERGGLSELDKAGFIKRQLVETRQITKHVAQILDSRMNTKYDENDKLIREVKVITLKSKLVSDFRKDFQFYKVREINNYHHAHDAYLNAVVGTALIKKYPKLESEFVYGDYKVYDVRKMIAKSEQEIGKATAKYFFYSNIMNFFKTEITLANGEIRKRPLIETNGETGEIVWDKGRDFATVRKVLSMPQVNIVKKTEVQTGGFSKESILPKRNSDKLIARKKDWDPKKYGGFDSPTVAYSVLVVAKVEKGKSKKLKSVKELLGITIMERSSFEKNPIDFLEAKGYKEVKKDLIIKLPKYSLFELENGRKRMLASAGELQKGNELALPSKYVNFLYLASHYEKLKGSPEDNEQKQLFVEQHKHYLDEIIEQISEFSKRVILADANLDKVLSAYNKHRDKPIREQAENIIHLFTLTNLGAPAAFKYFDTTIDRKRYTSTKEVLDATLIHQSITGLYETRIDLSQLGGDGGEAAAKGGSPAPGGTAPLEEEYRLFLEAPIQNVTLLEQWKREIPKVWAEINPPGLASTQAPIHVQLLSTALPVRVRQYPITLEAKRSLRETIRKFRAAGILRPVHSPWNTPLLPVRKSGTSEYRMVQDLREVNKRVETIHPTVPNPYTLLSLLPPDRIWYSVLDLKDAFFCIPLAPESQLIFAFEWADAEEGESGQLTWTRLPQGFKNSPTLFNEALNRDLQGFRLDHPSVSLLQYVDDLLIAADTQAACLSATRDLLMTLAELGYRVSGKKAQLCQEEVTYLGFKIHKGSRSLSNSRTQAILQIPVPKTKRQVREFLGKIGYCRLFIPGFAELAQPLYAATRPGNDPLVWGEKEEEAFQSLKLALTQPPALALPSLDKPFQLFVEETSGAAKGVLTQALGPWKRPVAYLSKRLDPVAAGWPRCLRAIAAAALLTREASKLTFGQDIEITSSHNLESLLRSPPDKWLTNARITQYQVLLLDPPRVRFKQTAALNPATLLPETDDTLPIHHCLDTLDSLTSTRPDLTDQPLAQAEATLFTDGSSYIRDGKRYAGAAVVTLDSVIWAEPLPIGTSAQKAELIALTKALEWSKDKSVNIYTDSRYAFATLHVHGMIYRERGWLTAGGKAIKNAPEILALLTAVWLPKRVAVMHCKGHQKDDAPTSTGNRRADEVAREVAIRPLSTQATISAGKRTADGSEFEKRTADGSEFESPKKKAKVE

SEQ ID NO: 1432 - protein, 2096 aa, synthetic construct
MPAAKRVKLDGGDKKYSIGLDIGTNSVGWAVITDEYKVPSKKFKVLGNTDRHSIKKNLIGALLFDSGETAEATRLKRTARRRYTRRKNRICYLQEIFSNEMAKVDDSFFHRLEESFLVEEDKKHERHPIFGNIVDEVAYHEKYPTIYHLRKKLVDSTDKADLRLIYLALAHMIKFRGHFLIEGDLNPDNSDVDKLFIQLVQTYNQLFEENPINASGVDAKAILSARLSKSRRLENLIAQLPGEKKNGLFGNLIALSLGLTPNFKSNFDLAEDAKLQLSKDTYDDDLDNLLAQIGDQYADLFLAAKNLSDAILLSDILRVNTEITKAPLSASMIKRYDEHHQDLTLLKALVRQQLPEKYKEIFFDQSKNGYAGYIDGGASQEEFYKFIKPILEKMDGTEELLVKLNREDLLRKQRTFDNGSIPHQIHLGELHAILRRQEDFYPFLKDNREKIEKILTFRIPYYVGPLARGNSRFAWMTRKSEETITPWNFEEVVDKGASAQSFIERMTNFDKNLPNEKVLPKHSLLYEYFTVYNELTKVKYVTEGMRKPAFLSGEQKKAIVDLLFKTNRKVTVKQLKEDYFKKIECFDSVEISGVEDRFNASLGTYHDLLKIIKDKDFLDNEENEDILEDIVLTLTLFEDREMIEERLKTYAHLFDDKVMKQLKRRRYTGWGRLSRKLINGIRDKQSGKTILDFLKSDGFANRNFMQLIHDDSLTFKEDIQKAQVSGQGDSLHEHIANLAGSPAIKKGILQTVKVVDELVKVMGRHKPENIVIEMARENQTTQKGQKNSRERMKRIEEGIKELGSQILKEHPVENTQLQNEKLYLYYLQNGRDMYVDQELDINRLSDYDVDHIVPQSFLKDDSIDNKVLTRSDKARGKSDNVPSEEVVKKMKNYWRQLLNAKLITQRKFDNLTKAERGGLSELDKAGFIKRQLVETRQITKHVAQILDSRMNTKYDENDKLIREVKVITLKSKLVSDFRKDFQFYKVREINNYHHAHDAYLNAVVGTALIKKYPKLESEFVYGDYKVYDVRKMIAKSEQEIGKATAKYFFYSNIMNFFKTEITLANGEIRKRPLIETNGETGEIVWDKGRDFATVRKVLSMPQVNIVKKTEVQTGGFSKESILPKRNSDKLIARKKDWDPKKYGGFDSPTVAYSVLVVAKVEKGKSKKLKSVKELLGITIMERSSFEKNPIDFLEAKGYKEVKKDLIIKLPKYSLFELENGRKRMLASAGELQKGNELALPSKYVNFLYLASHYEKLKGSPEDNEQKQLFVEQHKHYLDEIIEQISEFSKRVILADANLDKVLSAYNKHRDKPIREQAENIIHLFTLTNLGAPAAFKYFDTTIDRKRYTSTKEVLDATLIHQSITGLYETRIDLSQLGGDGGGGGGGSPAPGGTAPLEEEYRLFLEAPIQNVTLLEQWKREIPKVWAEINPPGLASTQAPIHVQLLSTALPVRVRQYPITLEAKRSLRETIRKFRAAGILRPVHSPWNTPLLPVRKSGTSEYRMVQDLREVNKRVETIHPTVPNPYTLLSLLPPDRIWYSVLDLKDAFFCIPLAPESQLIFAFEWADAEEGESGQLTWTRLPQGFKNSPTLFNEALNRDLQGFRLDHPSVSLLQYVDDLLIAADTQAACLSATRDLLMTLAELGYRVSGKKAQLCQEEVTYLGFKIHKGSRSLSNSRTQAILQIPVPKTKRQVREFLGKIGYCRLFIPGFAELAQPLYAATRPGNDPLVWGEKEEEAFQSLKLALTQPPALALPSLDKPFQLFVEETSGAAKGVLTQALGPWKRPVAYLSKRLDPVAAGWPRCLRAIAAAALLTREASKLTFGQDIEITSSHNLESLLRSPPDKWLTNARITQYQVLLLDPPRVRFKQTAALNPATLLPETDDTLPIHHCLDTLDSLTSTRPDLTDQPLAQAEATLFTDGSSYIRDGKRYAGAAVVTLDSVIWAEPLPIGTSAQKAELIALTKALEWSKDKSVNIYTDSRYAFATLHVHGMIYRERGWLTAGGKAIKNAPEILALLTAVWLPKRVAVMHCKGHQKDDAPTSTGNRRADEVAREVAIRPLSTQATISAGKRTADGSEFEKRTADGSEFESPKKKAKVE

SEQ ID NO: 1433 - protein, 2098 aa, synthetic construct
MPAAKRVKLDGGDKKYSIGLDIGTNSVGWAVITDEYKVPSKKFKVLGNTDRHSIKKNLIGALLFDSGETAEATRLKRTARRRYTRRKNRICYLQEIFSNEMAKVDDSFFHRLEESFLVEEDKKHERHPIFGNIVDEVAYHEKYPTIYHLRKKLVDSTDKADLRLIYLALAHMIKFRGHFLIEGDLNPDNSDVDKLFIQLVQTYNQLFEENPINASGVDAKAILSARLSKSRRLENLIAQLPGEKKNGLFGNLIALSLGLTPNFKSNFDLAEDAKLQLSKDTYDDDLDNLLAQIGDQYADLFLAAKNLSDAILLSDILRVNTEITKAPLSASMIKRYDEHHQDLTLLKALVRQQLPEKYKEIFFDQSKNGYAGYIDGGASQEEFYKFIKPILEKMDGTEELLVKLNREDLLRKQRTFDNGSIPHQIHLGELHAILRRQEDFYPFLKDNREKIEKILTFRIPYYVGPLARGNSRFAWMTRKSEETITPWNFEEVVDKGASAQSFIERMTNFDKNLPNEKVLPKHSLLYEYFTVYNELTKVKYVTEGMRKPAFLSGEQKKAIVDLLFKTNRKVTVKQLKEDYFKKIECFDSVEISGVEDRFNASLGTYHDLLKIIKDKDFLDNEENEDILEDIVLTLTLFEDREMIEERLKTYAHLFDDKVMKQLKRRRYTGWGRLSRKLINGIRDKQSGKTILDFLKSDGFANRNFMQLIHDDSLTFKEDIQKAQVSGQGDSLHEHIANLAGSPAIKKGILQTVKVVDELVKVMGRHKPENIVIEMARENQTTQKGQKNSRERMKRIEEGIKELGSQILKEHPVENTQLQNEKLYLYYLQNGRDMYVDQELDINRLSDYDVDHIVPQSFLKDDSIDNKVLTRSDKARGKSDNVPSEEVVKKMKNYWRQLLNAKLITQRKFDNLTKAERGGLSELDKAGFIKRQLVETRQITKHVAQILDSRMNTKYDENDKLIREVKVITLKSKLVSDFRKDFQFYKVREINNYHHAHDAYLNAVVGTALIKKYPKLESEFVYGDYKVYDVRKMIAKSEQEIGKATAKYFFYSNIMNFFKTEITLANGEIRKRPLIETNGETGEIVWDKGRDFATVRKVLSMPQVNIVKKTEVQTGGFSKESILPKRNSDKLIARKKDWDPKKYGGFDSPTVAYSVLVVAKVEKGKSKKLKSVKELLGITIMERSSFEKNPIDFLEAKGYKEVKKDLIIKLPKYSLFELENGRKRMLASAGELQKGNELALPSKYVNFLYLASHYEKLKGSPEDNEQKQLFVEQHKHYLDEIIEQISEFSKRVILADANLDKVLSAYNKHRDKPIREQAENIIHLFTLTNLGAPAAFKYFDTTIDRKRYTSTKEVLDATLIHQSITGLYETRIDLSQLGGDGGGGSEAAAKPAPGGTAPLEEEYRLFLEAPIQNVTLLEQWKREIPKVWAEINPPGLASTQAPIHVQLLSTALPVRVRQYPITLEAKRSLRETIRKFRAAGILRPVHSPWNTPLLPVRKSGTSEYRMVQDLREVNKRVETIHPTVPNPYTLLSLLPPDRIWYSVLDLKDAFFCIPLAPESQLIFAFEWADAEEGESGQLTWTRLPQGFKNSPTLFNEALNRDLQGFRLDHPSVSLLQYVDDLLIAADTQAACLSATRDLLMTLAELGYRVSGKKAQLCQEEVTYLGFKIHKGSRSLSNSRTQAILQIPVPKTKRQVREFLGKIGYCRLFIPGFAELAQPLYAATRPGNDPLVWGEKEEEAFQSLKLALTQPPALALPSLDKPFQLFVEETSGAAKGVLTQALGPWKRPVAYLSKRLDPVAAGWPRCLRAIAAAALLTREASKLTFGQDIEITSSHNLESLLRSPPDKWLTNARITQYQVLLLDPPRVRFKQTAALNPATLLPETDDTLPIHHCLDTLDSLTSTRPDLTDQPLAQAEATLFTDGSSYIRDGKRYAGAAVVTLDSVIWAEPLPIGTSAQKAELIALTKALEWSKDKSVNIYTDSRYAFATLHVHGMIYRERGWLTAGGKAIKNAPEILALLTAVWLPKRVAVMHCKGHQKDDAPTSTGNRRADEVAREVAIRPLSTQATISAGKRTADGSEFEKRTADGSEFESPKKKAKVE

SEQ ID NO: 1434 - protein, 2093 aa, synthetic construct
MPAAKRVKLDGGDKKYSIGLDIGTNSVGWAVITDEYKVPSKKFKVLGNTDRHSIKKNLIGALLFDSGETAEATRLKRTARRRYTRRKNRICYLQEIFSNEMAKVDDSFFHRLEESFLVEEDKKHERHPIFGNIVDEVAYHEKYPTIYHLRKKLVDSTDKADLRLIYLALAHMIKFRGHFLIEGDLNPDNSDVDKLFIQLVQTYNQLFEENPINASGVDAKAILSARLSKSRRLENLIAQLPGEKKNGLFGNLIALSLGLTPNFKSNFDLAEDAKLQLSKDTYDDDLDNLLAQIGDQYADLFLAAKNLSDAILLSDILRVNTEITKAPLSASMIKRYDEHHQDLTLLKALVRQQLPEKYKEIFFDQSKNGYAGYIDGGASQEEFYKFIKPILEKMDGTEELLVKLNREDLLRKQRTFDNGSIPHQIHLGELHAILRRQEDFYPFLKDNREKIEKILTFRIPYYVGPLARGNSRFAWMTRKSEETITPWNFEEVVDKGASAQSFIERMTNFDKNLPNEKVLPKHSLLYEYFTVYNELTKVKYVTEGMRKPAFLSGEQKKAIVDLLFKTNRKVTVKQLKEDYFKKIECFDSVEISGVEDRFNASLGTYHDLLKIIKDKDFLDNEENEDILEDIVLTLTLFEDREMIEERLKTYAHLFDDKVMKQLKRRRYTGWGRLSRKLINGIRDKQSGKTILDFLKSDGFANRNFMQLIHDDSLTFKEDIQKAQVSGQGDSLHEHIANLAGSPAIKKGILQTVKVVDELVKVMGRHKPENIVIEMARENQTTQKGQKNSRERMKRIEEGIKELGSQILKEHPVENTQLQNEKLYLYYLQNGRDMYVDQELDINRLSDYDVDHIVPQSFLKDDSIDNKVLTRSDKARGKSDNVPSEEVVKKMKNYWRQLLNAKLITQRKFDNLTKAERGGLSELDKAGFIKRQLVETRQITKHVAQILDSRMNTKYDENDKLIREVKVITLKSKLVSDFRKDFQFYKVREINNYHHAHDAYLNAVVGTALIKKYPKLESEFVYGDYKVYDVRKMIAKSEQEIGKATAKYFFYSNIMNFFKTEITLANGEIRKRPLIETNGETGEIVWDKGRDFATVRKVLSMPQVNIVKKTEVQTGGFSKESILPKRNSDKLIARKKDWDPKKYGGFDSPTVAYSVLVVAKVEKGKSKKLKSVKELLGITIMERSSFEKNPIDFLEAKGYKEVKKDLIIKLPKYSLFELENGRKRMLASAGELQKGNELALPSKYVNFLYLASHYEKLKGSPEDNEQKQLFVEQHKHYLDEIIEQISEFSKRVILADANLDKVLSAYNKHRDKPIREQAENIIHLFTLTNLGAPAAFKYFDTTIDRKRYTSTKEVLDATLIHQSITGLYETRIDLSQLGGDGGGGSGGSGGTAPLEEEYRLFLEAPIQNVTLLEQWKREIPKVWAEINPPGLASTQAPIHVQLLSTALPVRVRQYPITLEAKRSLRETIRKFRAAGILRPVHSPWNTPLLPVRKSGTSEYRMVQDLREVNKRVETIHPTVPNPYTLLSLLPPDRIWYSVLDLKDAFFCIPLAPESQLIFAFEWADAEEGESGQLTWTRLPQGFKNSPTLFNEALNRDLQGFRLDHPSVSLLQYVDDLLIAADTQAACLSATRDLLMTLAELGYRVSGKKAQLCQEEVTYLGFKIHKGSRSLSNSRTQAILQIPVPKTKRQVREFLGKIGYCRLFIPGFAELAQPLYAATRPGNDPLVWGEKEEEAFQSLKLALTQPPALALPSLDKPFQLFVEETSGAAKGVLTQALGPWKRPVAYLSKRLDPVAAGWPRCLRAIAAAALLTREASKLTFGQDIEITSSHNLESLLRSPPDKWLTNARITQYQVLLLDPPRVRFKQTAALNPATLLPETDDTLPIHHCLDTLDSLTSTRPDLTDQPLAQAEATLFTDGSSYIRDGKRYAGAAVVTLDSVIWAEPLPIGTSAQKAELIALTKALEWSKDKSVNIYTDSRYAFATLHVHGMIYRERGWLTAGGKAIKNAPEILALLTAVWLPKRVAVMHCKGHQKDDAPTSTGNRRADEVAREVAIRPLSTQATISAGKRTADGSEFEKRTADGSEFESPKKKAKVE

SEQ ID NO: 1435 - protein, 2091 aa, synthetic construct
MPAAKRVKLDGGDKKYSIGLDIGTNSVGWAVITDEYKVPSKKFKVLGNTDRHSIKKNLIGALLFDSGETAEATRLKRTARRRYTRRKNRICYLQEIFSNEMAKVDDSFFHRLEESFLVEEDKKHERHPIFGNIVDEVAYHEKYPTIYHLRKKLVDSTDKADLRLIYLALAHMIKFRGHFLIEGDLNPDNSDVDKLFIQLVQTYNQLFEENPINASGVDAKAILSARLSKSRRLENLIAQLPGEKKNGLFGNLIALSLGLTPNFKSNFDLAEDAKLQLSKDTYDDDLDNLLAQIGDQYADLFLAAKNLSDAILLSDILRVNTEITKAPLSASMIKRYDEHHQDLTLLKALVRQQLPEKYKEIFFDQSKNGYAGYIDGGASQEEFYKFIKPILEKMDGTEELLVKLNREDLLRKQRTFDNGSIPHQIHLGELHAILRRQEDFYPFLKDNREKIEKILTFRIPYYVGPLARGNSRFAWMTRKSEETITPWNFEEVVDKGASAQSFIERMTNFDKNLPNEKVLPKHSLLYEYFTVYNELTKVKYVTEGMRKPAFLSGEQKKAIVDLLFKTNRKVTVKQLKEDYFKKIECFDSVEISGVEDRFNASLGTYHDLLKIIKDKDFLDNEENEDILEDIVLTLTLFEDREMIEERLKTYAHLFDDKVMKQLKRRRYTGWGRLSRKLINGIRDKQSGKTILDFLKSDGFANRNFMQLIHDDSLTFKEDIQKAQVSGQGDSLHEHIANLAGSPAIKKGILQTVKVVDELVKVMGRHKPENIVIEMARENQTTQKGQKNSRERMKRIEEGIKELGSQILKEHPVENTQLQNEKLYLYYLQNGRDMYVDQELDINRLSDYDVDHIVPQSFLKDDSIDNKVLTRSDKARGKSDNVPSEEVVKKMKNYWRQLLNAKLITQRKFDNLTKAERGGLSELDKAGFIKRQLVETRQITKHVAQILDSRMNTKYDENDKLIREVKVITLKSKLVSDFRKDFQFYKVREINNYHHAHDAYLNAVVGTALIKKYPKLESEFVYGDYKVYDVRKMIAKSEQEIGKATAKYFFYSNIMNFFKTEITLANGEIRKRPLIETNGETGEIVWDKGRDFATVRKVLSMPQVNIVKKTEVQTGGFSKESILPKRNSDKLIARKKDWDPKKYGGFDSPTVAYSVLVVAKVEKGKSKKLKSVKELLGITIMERSSFEKNPIDFLEAKGYKEVKKDLIIKLPKYSLFELENGRKRMLASAGELQKGNELALPSKYVNFLYLASHYEKLKGSPEDNEQKQLFVEQHKHYLDEIIEQISEFSKRVILADANLDKVLSAYNKHRDKPIREQAENIIHLFTLTNLGAPAAFKYFDTTIDRKRYTSTKEVLDATLIHQSITGLYETRIDLSQLGGDGGGGGGGGTAPLEEEYRLFLEAPIQNVTLLEQWKREIPKVWAEINPPGLASTQAPIHVQLLSTALPVRVRQYPITLEAKRSLRETIRKFRAAGILRPVHSPWNTPLLPVRKSGTSEYRMVQDLREVNKRVETIHPTVPNPYTLLSLLPPDRIWYSVLDLKDAFFCIPLAPESQLIFAFEWADAEEGESGQLTWTRLPQGFKNSPTLFNEALNRDLQGFRLDHPSVSLLQYVDDLLIAADTQAACLSATRDLLMTLAELGYRVSGKKAQLCQEEVTYLGFKIHKGSRSLSNSRTQAILQIPVPKTKRQVREFLGKIGYCRLFIPGFAELAQPLYAATRPGNDPLVWGEKEEEAFQSLKLALTQPPALALPSLDKPFQLFVEETSGAAKGVLTQALGPWKRPVAYLSKRLDPVAAGWPRCLRAIAAAALLTREASKLTFGQDIEITSSHNLESLLRSPPDKWLTNARITQYQVLLLDPPRVRFKQTAALNPATLLPETDDTLPIHHCLDTLDSLTSTRPDLTDQPLAQAEATLFTDGSSYIRDGKRYAGAAVVTLDSVIWAEPLPIGTSAQKAELIALTKALEWSKDKSVNIYTDSRYAFATLHVHGMIYRERGWLTAGGKAIKNAPEILALLTAVWLPKRVAVMHCKGHQKDDAPTSTGNRRADEVAREVAIRPLSTQATISAGKRTADGSEFEKRTADGSEFESPKKKAKVE

SEQ ID NO: 1436 - protein, 2096 aa, synthetic construct
MPAAKRVKLDGGDKKYSIGLDIGTNSVGWAVITDEYKVPSKKFKVLGNTDRHSIKKNLIGALLFDSGETAEATRLKRTARRRYTRRKNRICYLQEIFSNEMAKVDDSFFHRLEESFLVEEDKKHERHPIFGNIVDEVAYHEKYPTIYHLRKKLVDSTDKADLRLIYLALAHMIKFRGHFLIEGDLNPDNSDVDKLFIQLVQTYNQLFEENPINASGVDAKAILSARLSKSRRLENLIAQLPGEKKNGLFGNLIALSLGLTPNFKSNFDLAEDAKLQLSKDTYDDDLDNLLAQIGDQYADLFLAAKNLSDAILLSDILRVNTEITKAPLSASMIKRYDEHHQDLTLLKALVRQQLPEKYKEIFFDQSKNGYAGYIDGGASQEEFYKFIKPILEKMDGTEELLVKLNREDLLRKQRTFDNGSIPHQIHLGELHAILRRQEDFYPFLKDNREKIEKILTFRIPYYVGPLARGNSRFAWMTRKSEETITPWNFEEVVDKGASAQSFIERMTNFDKNLPNEKVLPKHSLLYEYFTVYNELTKVKYVTEGMRKPAFLSGEQKKAIVDLLFKTNRKVTVKQLKEDYFKKIECFDSVEISGVEDRFNASLGTYHDLLKIIKDKDFLDNEENEDILEDIVLTLTLFEDREMIEERLKTYAHLFDDKVMKQLKRRRYTGWGRLSRKLINGIRDKQSGKTILDFLKSDGFANRNFMQLIHDDSLTFKEDIQKAQVSGQGDSLHEHIANLAGSPAIKKGILQTVKVVDELVKVMGRHKPENIVIEMARENQTTQKGQKNSRERMKRIEEGIKELGSQILKEHPVENTQLQNEKLYLYYLQNGRDMYVDQELDINRLSDYDVDHIVPQSFLKDDSIDNKVLTRSDKARGKSDNVPSEEVVKKMKNYWRQLLNAKLITQRKFDNLTKAERGGLSELDKAGFIKRQLVETRQITKHVAQILDSRMNTKYDENDKLIREVKVITLKSKLVSDFRKDFQFYKVREINNYHHAHDAYLNAVVGTALIKKYPKLESEFVYGDYKVYDVRKMIAKSEQEIGKATAKYFFYSNIMNFFKTEITLANGEIRKRPLIETNGETGEIVWDKGRDFATVRKVLSMPQVNIVKKTEVQTGGFSKESILPKRNSDKLIARKKDWDPKKYGGFDSPTVAYSVLVVAKVEKGKSKKLKSVKELLGITIMERSSFEKNPIDFLEAKGYKEVKKDLIIKLPKYSLFELENGRKRMLASAGELQKGNELALPSKYVNFLYLASHYEKLKGSPEDNEQKQLFVEQHKHYLDEIIEQISEFSKRVILADANLDKVLSAYNKHRDKPIREQAENIIHLFTLTNLGAPAAFKYFDTTIDRKRYTSTKEVLDATLIHQSITGLYETRIDLSQLGGDGGPAPGGGGGSGGTAPLEEEYRLFLEAPIQNVTLLEQWKREIPKVWAEINPPGLASTQAPIHVQLLSTALPVRVRQYPITLEAKRSLRETIRKFRAAGILRPVHSPWNTPLLPVRKSGTSEYRMVQDLREVNKRVETIHPTVPNPYTLLSLLPPDRIWYSVLDLKDAFFCIPLAPESQLIFAFEWADAEEGESGQLTWTRLPQGFKNSPTLFNEALNRDLQGFRLDHPSVSLLQYVDDLLIAADTQAACLSATRDLLMTLAELGYRVSGKKAQLCQEEVTYLGFKIHKGSRSLSNSRTQAILQIPVPKTKRQVREFLGKIGYCRLFIPGFAELAQPLYAATRPGNDPLVWGEKEEEAFQSLKLALTQPPALALPSLDKPFQLFVEETSGAAKGVLTQALGPWKRPVAYLSKRLDPVAAGWPRCLRAIAAAALLTREASKLTFGQDIEITSSHNLESLLRSPPDKWLTNARITQYQVLLLDPPRVRFKQTAALNPATLLPETDDTLPIHHCLDTLDSLTSTRPDLTDQPLAQAEATLFTDGSSYIRDGKRYAGAAVVTLDSVIWAEPLPIGTSAQKAELIALTKALEWSKDKSVNIYTDSRYAFATLHVHGMIYRERGWLTAGGKAIKNAPEILALLTAVWLPKRVAVMHCKGHQKDDAPTSTGNRRADEVAREVAIRPLSTQATISAGKRTADGSEFEKRTADGSEFESPKKKAKVE

SEQ ID NO: 1437 - protein, 2096 aa, synthetic construct
MPAAKRVKLDGGDKKYSIGLDIGTNSVGWAVITDEYKVPSKKFKVLGNTDRHSIKKNLIGALLFDSGETAEATRLKRTARRRYTRRKNRICYLQEIFSNEMAKVDDSFFHRLEESFLVEEDKKHERHPIFGNIVDEVAYHEKYPTIYHLRKKLVDSTDKADLRLIYLALAHMIKFRGHFLIEGDLNPDNSDVDKLFIQLVQTYNQLFEENPINASGVDAKAILSARLSKSRRLENLIAQLPGEKKNGLFGNLIALSLGLTPNFKSNFDLAEDAKLQLSKDTYDDDLDNLLAQIGDQYADLFLAAKNLSDAILLSDILRVNTEITKAPLSASMIKRYDEHHQDLTLLKALVRQQLPEKYKEIFFDQSKNGYAGYIDGGASQEEFYKFIKPILEKMDGTEELLVKLNREDLLRKQRTFDNGSIPHQIHLGELHAILRRQEDFYPFLKDNREKIEKILTFRIPYYVGPLARGNSRFAWMTRKSEETITPWNFEEVVDKGASAQSFIERMTNFDKNLPNEKVLPKHSLLYEYFTVYNELTKVKYVTEGMRKPAFLSGEQKKAIVDLLFKTNRKVTVKQLKEDYFKKIECFDSVEISGVEDRFNASLGTYHDLLKIIKDKDFLDNEENEDILEDIVLTLTLFEDREMIEERLKTYAHLFDDKVMKQLKRRRYTGWGRLSRKLINGIRDKQSGKTILDFLKSDGFANRNFMQLIHDDSLTFKEDIQKAQVSGQGDSLHEHIANLAGSPAIKKGILQTVKVVDELVKVMGRHKPENIVIEMARENQTTQKGQKNSRERMKRIEEGIKELGSQILKEHPVENTQLQNEKLYLYYLQNGRDMYVDQELDINRLSDYDVDHIVPQSFLKDDSIDNKVLTRSDKARGKSDNVPSEEVVKKMKNYWRQLLNAKLITQRKFDNLTKAERGGLSELDKAGFIKRQLVETRQITKHVAQILDSRMNTKYDENDKLIREVKVITLKSKLVSDFRKDFQFYKVREINNYHHAHDAYLNAVVGTALIKKYPKLESEFVYGDYKVYDVRKMIAKSEQEIGKATAKYFFYSNIMNFFKTEITLANGEIRKRPLIETNGETGEIVWDKGRDFATVRKVLSMPQVNIVKKTEVQTGGFSKESILPKRNSDKLIARKKDWDPKKYGGFDSPTVAYSVLVVAKVEKGKSKKLKSVKELLGITIMERSSFEKNPIDFLEAKGYKEVKKDLIIKLPKYSLFELENGRKRMLASAGELQKGNELALPSKYVNFLYLASHYEKLKGSPEDNEQKQLFVEQHKHYLDEIIEQISEFSKRVILADANLDKVLSAYNKHRDKPIREQAENIIHLFTLTNLGAPAAFKYFDTTIDRKRYTSTKEVLDATLIHQSITGLYETRIDLSQLGGDGGGSSGGSGGGGGTAPLEEEYRLFLEAPIQNVTLLEQWKREIPKVWAEINPPGLASTQAPIHVQLLSTALPVRVRQYPITLEAKRSLRETIRKFRAAGILRPVHSPWNTPLLPVRKSGTSEYRMVQDLREVNKRVETIHPTVPNPYTLLSLLPPDRIWYSVLDLKDAFFCIPLAPESQLIFAFEWADAEEGESGQLTWTRLPQGFKNSPTLFNEALNRDLQGFRLDHPSVSLLQYVDDLLIAADTQAACLSATRDLLMTLAELGYRVSGKKAQLCQEEVTYLGFKIHKGSRSLSNSRTQAILQIPVPKTKRQVREFLGKIGYCRLFIPGFAELAQPLYAATRPGNDPLVWGEKEEEAFQSLKLALTQPPALALPSLDKPFQLFVEETSGAAKGVLTQALGPWKRPVAYLSKRLDPVAAGWPRCLRAIAAAALLTREASKLTFGQDIEITSSHNLESLLRSPPDKWLTNARITQYQVLLLDPPRVRFKQTAALNPATLLPETDDTLPIHHCLDTLDSLTSTRPDLTDQPLAQAEATLFTDGSSYIRDGKRYAGAAVVTLDSVIWAEPLPIGTSAQKAELIALTKALEWSKDKSVNIYTDSRYAFATLHVHGMIYRERGWLTAGGKAIKNAPEILALLTAVWLPKRVAVMHCKGHQKDDAPTSTGNRRADEVAREVAIRPLSTQATISAGKRTADGSEFEKRTADGSEFESPKKKAKVE

SEQ ID NO: 1438 - protein, 2092 aa, synthetic construct
MPAAKRVKLDGGDKKYSIGLDIGTNSVGWAVITDEYKVPSKKFKVLGNTDRHSIKKNLIGALLFDSGETAEATRLKRTARRRYTRRKNRICYLQEIFSNEMAKVDDSFFHRLEESFLVEEDKKHERHPIFGNIVDEVAYHEKYPTIYHLRKKLVDSTDKADLRLIYLALAHMIKFRGHFLIEGDLNPDNSDVDKLFIQLVQTYNQLFEENPINASGVDAKAILSARLSKSRRLENLIAQLPGEKKNGLFGNLIALSLGLTPNFKSNFDLAEDAKLQLSKDTYDDDLDNLLAQIGDQYADLFLAAKNLSDAILLSDILRVNTEITKAPLSASMIKRYDEHHQDLTLLKALVRQQLPEKYKEIFFDQSKNGYAGYIDGGASQEEFYKFIKPILEKMDGTEELLVKLNREDLLRKQRTFDNGSIPHQIHLGELHAILRRQEDFYPFLKDNREKIEKILTFRIPYYVGPLARGNSRFAWMTRKSEETITPWNFEEVVDKGASAQSFIERMTNFDKNLPNEKVLPKHSLLYEYFTVYNELTKVKYVTEGMRKPAFLSGEQKKAIVDLLFKTNRKVTVKQLKEDYFKKIECFDSVEISGVEDRFNASLGTYHDLLKIIKDKDFLDNEENEDILEDIVLTLTLFEDREMIEERLKTYAHLFDDKVMKQLKRRRYTGWGRLSRKLINGIRDKQSGKTILDFLKSDGFANRNFMQLIHDDSLTFKEDIQKAQVSGQGDSLHEHIANLAGSPAIKKGILQTVKVVDELVKVMGRHKPENIVIEMARENQTTQKGQKNSRERMKRIEEGIKELGSQILKEHPVENTQLQNEKLYLYYLQNGRDMYVDQELDINRLSDYDVDHIVPQSFLKDDSIDNKVLTRSDKARGKSDNVPSEEVVKKMKNYWRQLLNAKLITQRKFDNLTKAERGGLSELDKAGFIKRQLVETRQITKHVAQILDSRMNTKYDENDKLIREVKVITLKSKLVSDFRKDFQFYKVREINNYHHAHDAYLNAVVGTALIKKYPKLESEFVYGDYKVYDVRKMIAKSEQEIGKATAKYFFYSNIMNFFKTEITLANGEIRKRPLIETNGETGEIVWDKGRDFATVRKVLSMPQVNIVKKTEVQTGGFSKESILPKRNSDKLIARKKDWDPKKYGGFDSPTVAYSVLVVAKVEKGKSKKLKSVKELLGITIMERSSFEKNPIDFLEAKGYKEVKKDLIIKLPKYSLFELENGRKRMLASAGELQKGNELALPSKYVNFLYLASHYEKLKGSPEDNEQKQLFVEQHKHYLDEIIEQISEFSKRVILADANLDKVLSAYNKHRDKPIREQAENIIHLFTLTNLGAPAAFKYFDTTIDRKRYTSTKEVLDATLIHQSITGLYETRIDLSQLGGDGGGGGGGGGTAPLEEEYRLFLEAPIQNVTLLEQWKREIPKVWAEINPPGLASTQAPIHVQLLSTALPVRVRQYPITLEAKRSLRETIRKFRAAGILRPVHSPWNTPLLPVRKSGTSEYRMVQDLREVNKRVETIHPTVPNPYTLLSLLPPDRIWYSVLDLKDAFFCIPLAPESQLIFAFEWADAEEGESGQLTWTRLPQGFKNSPTLFNEALNRDLQGFRLDHPSVSLLQYVDDLLIAADTQAACLSATRDLLMTLAELGYRVSGKKAQLCQEEVTYLGFKIHKGSRSLSNSRTQAILQIPVPKTKRQVREFLGKIGYCRLFIPGFAELAQPLYAATRPGNDPLVWGEKEEEAFQSLKLALTQPPALALPSLDKPFQLFVEETSGAAKGVLTQALGPWKRPVAYLSKRLDPVAAGWPRCLRAIAAAALLTREASKLTFGQDIEITSSHNLESLLRSPPDKWLTNARITQYQVLLLDPPRVRFKQTAALNPATLLPETDDTLPIHHCLDTLDSLTSTRPDLTDQPLAQAEATLFTDGSSYIRDGKRYAGAAVVTLDSVIWAEPLPIGTSAQKAELIALTKALEWSKDKSVNIYTDSRYAFATLHVHGMIYRERGWLTAGGKAIKNAPEILALLTAVWLPKRVAVMHCKGHQKDDAPTSTGNRRADEVAREVAIRPLSTQATISAGKRTADGSEFEKRTADGSEFESPKKKAKVE

SEQ ID NO: 1439 - protein, 2098 aa, synthetic construct
MPAAKRVKLDGGDKKYSIGLDIGTNSVGWAVITDEYKVPSKKFKVLGNTDRHSIKKNLIGALLFDSGETAEATRLKRTARRRYTRRKNRICYLQEIFSNEMAKVDDSFFHRLEESFLVEEDKKHERHPIFGNIVDEVAYHEKYPTIYHLRKKLVDSTDKADLRLIYLALAHMIKFRGHFLIEGDLNPDNSDVDKLFIQLVQTYNQLFEENPINASGVDAKAILSARLSKSRRLENLIAQLPGEKKNGLFGNLIALSLGLTPNFKSNFDLAEDAKLQLSKDTYDDDLDNLLAQIGDQYADLFLAAKNLSDAILLSDILRVNTEITKAPLSASMIKRYDEHHQDLTLLKALVRQQLPEKYKEIFFDQSKNGYAGYIDGGASQEEFYKFIKPILEKMDGTEELLVKLNREDLLRKQRTFDNGSIPHQIHLGELHAILRRQEDFYPFLKDNREKIEKILTFRIPYYVGPLARGNSRFAWMTRKSEETITPWNFEEVVDKGASAQSFIERMTNFDKNLPNEKVLPKHSLLYEYFTVYNELTKVKYVTEGMRKPAFLSGEQKKAIVDLLFKTNRKVTVKQLKEDYFKKIECFDSVEISGVEDRFNASLGTYHDLLKIIKDKDFLDNEENEDILEDIVLTLTLFEDREMIEERLKTYAHLFDDKVMKQLKRRRYTGWGRLSRKLINGIRDKQSGKTILDFLKSDGFANRNFMQLIHDDSLTFKEDIQKAQVSGQGDSLHEHIANLAGSPAIKKGILQTVKVVDELVKVMGRHKPENIVIEMARENQTTQKGQKNSRERMKRIEEGIKELGSQILKEHPVENTQLQNEKLYLYYLQNGRDMYVDQELDINRLSDYDVDHIVPQSFLKDDSIDNKVLTRSDKARGKSDNVPSEEVVKKMKNYWRQLLNAKLITQRKFDNLTKAERGGLSELDKAGFIKRQLVETRQITKHVAQILDSRMNTKYDENDKLIREVKVITLKSKLVSDFRKDFQFYKVREINNYHHAHDAYLNAVVGTALIKKYPKLESEFVYGDYKVYDVRKMIAKSEQEIGKATAKYFFYSNIMNFFKTEITLANGEIRKRPLIETNGETGEIVWDKGRDFATVRKVLSMPQVNIVKKTEVQTGGFSKESILPKRNSDKLIARKKDWDPKKYGGFDSPTVAYSVLVVAKVEKGKSKKLKSVKELLGITIMERSSFEKNPIDFLEAKGYKEVKKDLIIKLPKYSLFELENGRKRMLASAGELQKGNELALPSKYVNFLYLASHYEKLKGSPEDNEQKQLFVEQHKHYLDEIIEQISEFSKRVILADANLDKVLSAYNKHRDKPIREQAENIIHLFTLTNLGAPAAFKYFDTTIDRKRYTSTKEVLDATLIHQSITGLYETRIDLSQLGGDGGEAAAKPAPGGSGGTAPLEEEYRLFLEAPIQNVTLLEQWKREIPKVWAEINPPGLASTQAPIHVQLLSTALPVRVRQYPITLEAKRSLRETIRKFRAAGILRPVHSPWNTPLLPVRKSGTSEYRMVQDLREVNKRVETIHPTVPNPYTLLSLLPPDRIWYSVLDLKDAFFCIPLAPESQLIFAFEWADAEEGESGQLTWTRLPQGFKNSPTLFNEALNRDLQGFRLDHPSVSLLQYVDDLLIAADTQAACLSATRDLLMTLAELGYRVSGKKAQLCQEEVTYLGFKIHKGSRSLSNSRTQAILQIPVPKTKRQVREFLGKIGYCRLFIPGFAELAQPLYAATRPGNDPLVWGEKEEEAFQSLKLALTQPPALALPSLDKPFQLFVEETSGAAKGVLTQALGPWKRPVAYLSKRLDPVAAGWPRCLRAIAAAALLTREASKLTFGQDIEITSSHNLESLLRSPPDKWLTNARITQYQVLLLDPPRVRFKQTAALNPATLLPETDDTLPIHHCLDTLDSLTSTRPDLTDQPLAQAEATLFTDGSSYIRDGKRYAGAAVVTLDSVIWAEPLPIGTSAQKAELIALTKALEWSKDKSVNIYTDSRYAFATLHVHGMIYRERGWLTAGGKAIKNAPEILALLTAVWLPKRVAVMHCKGHQKDDAPTSTGNRRADEVAREVAIRPLSTQATISAGKRTADGSEFEKRTADGSEFESPKKKAKVE

SEQ ID NO: 1440 - protein, 2094 aa, synthetic construct
MPAAKRVKLDGGDKKYSIGLDIGTNSVGWAVITDEYKVPSKKFKVLGNTDRHSIKKNLIGALLFDSGETAEATRLKRTARRRYTRRKNRICYLQEIFSNEMAKVDDSFFHRLEESFLVEEDKKHERHPIFGNIVDEVAYHEKYPTIYHLRKKLVDSTDKADLRLIYLALAHMIKFRGHFLIEGDLNPDNSDVDKLFIQLVQTYNQLFEENPINASGVDAKAILSARLSKSRRLENLIAQLPGEKKNGLFGNLIALSLGLTPNFKSNFDLAEDAKLQLSKDTYDDDLDNLLAQIGDQYADLFLAAKNLSDAILLSDILRVNTEITKAPLSASMIKRYDEHHQDLTLLKALVRQQLPEKYKEIFFDQSKNGYAGYIDGGASQEEFYKFIKPILEKMDGTEELLVKLNREDLLRKQRTFDNGSIPHQIHLGELHAILRRQEDFYPFLKDNREKIEKILTFRIPYYVGPLARGNSRFAWMTRKSEETITPWNFEEVVDKGASAQSFIERMTNFDKNLPNEKVLPKHSLLYEYFTVYNELTKVKYVTEGMRKPAFLSGEQKKAIVDLLFKTNRKVTVKQLKEDYFKKIECFDSVEISGVEDRFNASLGTYHDLLKIIKDKDFLDNEENEDILEDIVLTLTLFEDREMIEERLKTYAHLFDDKVMKQLKRRRYTGWGRLSRKLINGIRDKQSGKTILDFLKSDGFANRNFMQLIHDDSLTFKEDIQKAQVSGQGDSLHEHIANLAGSPAIKKGILQTVKVVDELVKVMGRHKPENIVIEMARENQTTQKGQKNSRERMKRIEEGIKELGSQILKEHPVENTQLQNEKLYLYYLQNGRDMYVDQELDINRLSDYDVDHIVPQSFLKDDSIDNKVLTRSDKARGKSDNVPSEEVVKKMKNYWRQLLNAKLITQRKFDNLTKAERGGLSELDKAGFIKRQLVETRQITKHVAQILDSRMNTKYDENDKLIREVKVITLKSKLVSDFRKDFQFYKVREINNYHHAHDAYLNAVVGTALIKKYPKLESEFVYGDYKVYDVRKMIAKSEQEIGKATAKYFFYSNIMNFFKTEITLANGEIRKRPLIETNGETGEIVWDKGRDFATVRKVLSMPQVNIVKKTEVQTGGFSKESILPKRNSDKLIARKKDWDPKKYGGFDSPTVAYSVLVVAKVEKGKSKKLKSVKELLGITIMERSSFEKNPIDFLEAKGYKEVKKDLIIKLPKYSLFELENGRKRMLASAGELQKGNELALPSKYVNFLYLASHYEKLKGSPEDNEQKQLFVEQHKHYLDEIIEQISEFSKRVILADANLDKVLSAYNKHRDKPIREQAENIIHLFTLTNLGAPAAFKYFDTTIDRKRYTSTKEVLDATLIHQSITGLYETRIDLSQLGGDGGPAPAPAPGGTAPLEEEYRLFLEAPIQNVTLLEQWKREIPKVWAEINPPGLASTQAPIHVQLLSTALPVRVRQYPITLEAKRSLRETIRKFRAAGILRPVHSPWNTPLLPVRKSGTSEYRMVQDLREVNKRVETIHPTVPNPYTLLSLLPPDRIWYSVLDLKDAFFCIPLAPESQLIFAFEWADAEEGESGQLTWTRLPQGFKNSPTLFNEALNRDLQGFRLDHPSVSLLQYVDDLLIAADTQAACLSATRDLLMTLAELGYRVSGKKAQLCQEEVTYLGFKIHKGSRSLSNSRTQAILQIPVPKTKRQVREFLGKIGYCRLFIPGFAELAQPLYAATRPGNDPLVWGEKEEEAFQSLKLALTQPPALALPSLDKPFQLFVEETSGAAKGVLTQALGPWKRPVAYLSKRLDPVAAGWPRCLRAIAAAALLTREASKLTFGQDIEITSSHNLESLLRSPPDKWLTNARITQYQVLLLDPPRVRFKQTAALNPATLLPETDDTLPIHHCLDTLDSLTSTRPDLTDQPLAQAEATLFTDGSSYIRDGKRYAGAAVVTLDSVIWAEPLPIGTSAQKAELIALTKALEWSKDKSVNIYTDSRYAFATLHVHGMIYRERGWLTAGGKAIKNAPEILALLTAVWLPKRVAVMHCKGHQKDDAPTSTGNRRADEVAREVAIRPLSTQATISAGKRTADGSEFEKRTADGSEFESPKKKAKVE

SEQ ID NO: 1441 - protein, 2098 aa, synthetic construct
MPAAKRVKLDGGDKKYSIGLDIGTNSVGWAVITDEYKVPSKKFKVLGNTDRHSIKKNLIGALLFDSGETAEATRLKRTARRRYTRRKNRICYLQEIFSNEMAKVDDSFFHRLEESFLVEEDKKHERHPIFGNIVDEVAYHEKYPTIYHLRKKLVDSTDKADLRLIYLALAHMIKFRGHFLIEGDLNPDNSDVDKLFIQLVQTYNQLFEENPINASGVDAKAILSARLSKSRRLENLIAQLPGEKKNGLFGNLIALSLGLTPNFKSNFDLAEDAKLQLSKDTYDDDLDNLLAQIGDQYADLFLAAKNLSDAILLSDILRVNTEITKAPLSASMIKRYDEHHQDLTLLKALVRQQLPEKYKEIFFDQSKNGYAGYIDGGASQEEFYKFIKPILEKMDGTEELLVKLNREDLLRKQRTFDNGSIPHQIHLGELHAILRRQEDFYPFLKDNREKIEKILTFRIPYYVGPLARGNSRFAWMTRKSEETITPWNFEEVVDKGASAQSFIERMTNFDKNLPNEKVLPKHSLLYEYFTVYNELTKVKYVTEGMRKPAFLSGEQKKAIVDLLFKTNRKVTVKQLKEDYFKKIECFDSVEISGVEDRFNASLGTYHDLLKIIKDKDFLDNEENEDILEDIVLTLTLFEDREMIEERLKTYAHLFDDKVMKQLKRRRYTGWGRLSRKLINGIRDKQSGKTILDFLKSDGFANRNFMQLIHDDSLTFKEDIQKAQVSGQGDSLHEHIANLAGSPAIKKGILQTVKVVDELVKVMGRHKPENIVIEMARENQTTQKGQKNSRERMKRIEEGIKELGSQILKEHPVENTQLQNEKLYLYYLQNGRDMYVDQELDINRLSDYDVDHIVPQSFLKDDSIDNKVLTRSDKARGKSDNVPSEEVVKKMKNYWRQLLNAKLITQRKFDNLTKAERGGLSELDKAGFIKRQLVETRQITKHVAQILDSRMNTKYDENDKLIREVKVITLKSKLVSDFRKDFQFYKVREINNYHHAHDAYLNAVVGTALIKKYPKLESEFVYGDYKVYDVRKMIAKSEQEIGKATAKYFFYSNIMNFFKTEITLANGEIRKRPLIETNGETGEIVWDKGRDFATVRKVLSMPQVNIVKKTEVQTGGFSKESILPKRNSDKLIARKKDWDPKKYGGFDSPTVAYSVLVVAKVEKGKSKKLKSVKELLGITIMERSSFEKNPIDFLEAKGYKEVKKDLIIKLPKYSLFELENGRKRMLASAGELQKGNELALPSKYVNFLYLASHYEKLKGSPEDNEQKQLFVEQHKHYLDEIIEQISEFSKRVILADANLDKVLSAYNKHRDKPIREQAENIIHLFTLTNLGAPAAFKYFDTTIDRKRYTSTKEVLDATLIHQSITGLYETRIDLSQLGGDGGEAAAKGGSGGGGGTAPLEEEYRLFLEAPIQNVTLLEQWKREIPKVWAEINPPGLASTQAPIHVQLLSTALPVRVRQYPITLEAKRSLRETIRKFRAAGILRPVHSPWNTPLLPVRKSGTSEYRMVQDLREVNKRVETIHPTVPNPYTLLSLLPPDRIWYSVLDLKDAFFCIPLAPESQLIFAFEWADAEEGESGQLTWTRLPQGFKNSPTLFNEALNRDLQGFRLDHPSVSLLQYVDDLLIAADTQAACLSATRDLLMTLAELGYRVSGKKAQLCQEEVTYLGFKIHKGSRSLSNSRTQAILQIPVPKTKRQVREFLGKIGYCRLFIPGFAELAQPLYAATRPGNDPLVWGEKEEEAFQSLKLALTQPPALALPSLDKPFQLFVEETSGAAKGVLTQALGPWKRPVAYLSKRLDPVAAGWPRCLRAIAAAALLTREASKLTFGQDIEITSSHNLESLLRSPPDKWLTNARITQYQVLLLDPPRVRFKQTAALNPATLLPETDDTLPIHHCLDTLDSLTSTRPDLTDQPLAQAEATLFTDGSSYIRDGKRYAGAAVVTLDSVIWAEPLPIGTSAQKAELIALTKALEWSKDKSVNIYTDSRYAFATLHVHGMIYRERGWLTAGGKAIKNAPEILALLTAVWLPKRVAVMHCKGHQKDDAPTSTGNRRADEVAREVAIRPLSTQATISAGKRTADGSEFEKRTADGSEFESPKKKAKVE

SEQ ID NO: 1442 - protein, 2098 aa, synthetic construct
MPAAKRVKLDGGDKKYSIGLDIGTNSVGWAVITDEYKVPSKKFKVLGNTDRHSIKKNLIGALLFDSGETAEATRLKRTARRRYTRRKNRICYLQEIFSNEMAKVDDSFFHRLEESFLVEEDKKHERHPIFGNIVDEVAYHEKYPTIYHLRKKLVDSTDKADLRLIYLALAHMIKFRGHFLIEGDLNPDNSDVDKLFIQLVQTYNQLFEENPINASGVDAKAILSARLSKSRRLENLIAQLPGEKKNGLFGNLIALSLGLTPNFKSNFDLAEDAKLQLSKDTYDDDLDNLLAQIGDQYADLFLAAKNLSDAILLSDILRVNTEITKAPLSASMIKRYDEHHQDLTLLKALVRQQLPEKYKEIFFDQSKNGYAGYIDGGASQEEFYKFIKPILEKMDGTEELLVKLNREDLLRKQRTFDNGSIPHQIHLGELHAILRRQEDFYPFLKDNREKIEKILTFRIPYYVGPLARGNSRFAWMTRKSEETITPWNFEEVVDKGASAQSFIERMTNFDKNLPNEKVLPKHSLLYEYFTVYNELTKVKYVTEGMRKPAFLSGEQKKAIVDLLFKTNRKVTVKQLKEDYFKKIECFDSVEISGVEDRFNASLGTYHDLLKIIKDKDFLDNEENEDILEDIVLTLTLFEDREMIEERLKTYAHLFDDKVMKQLKRRRYTGWGRLSRKLINGIRDKQSGKTILDFLKSDGFANRNFMQLIHDDSLTFKEDIQKAQVSGQGDSLHEHIANLAGSPAIKKGILQTVKVVDELVKVMGRHKPENIVIEMARENQTTQKGQKNSRERMKRIEEGIKELGSQILKEHPVENTQLQNEKLYLYYLQNGRDMYVDQELDINRLSDYDVDHIVPQSFLKDDSIDNKVLTRSDKARGKSDNVPSEEVVKKMKNYWRQLLNAKLITQRKFDNLTKAERGGLSELDKAGFIKRQLVETRQITKHVAQILDSRMNTKYDENDKLIREVKVITLKSKLVSDFRKDFQFYKVREINNYHHAHDAYLNAVVGTALIKKYPKLESEFVYGDYKVYDVRKMIAKSEQEIGKATAKYFFYSNIMNFFKTEITLANGEIRKRPLIETNGETGEIVWDKGRDFATVRKVLSMPQVNIVKKTEVQTGGFSKESILPKRNSDKLIARKKDWDPKKYGGFDSPTVAYSVLVVAKVEKGKSKKLKSVKELLGITIMERSSFEKNPIDFLEAKGYKEVKKDLIIKLPKYSLFELENGRKRMLASAGELQKGNELALPSKYVNFLYLASHYEKLKGSPEDNEQKQLFVEQHKHYLDEIIEQISEFSKRVILADANLDKVLSAYNKHRDKPIREQAENIIHLFTLTNLGAPAAFKYFDTTIDRKRYTSTKEVLDATLIHQSITGLYETRIDLSQLGGDGGGGSGGGEAAAKGGTAPLEEEYRLFLEAPIQNVTLLEQWKREIPKVWAEINPPGLASTQAPIHVQLLSTALPVRVRQYPITLEAKRSLRETIRKFRAAGILRPVHSPWNTPLLPVRKSGTSEYRMVQDLREVNKRVETIHPTVPNPYTLLSLLPPDRIWYSVLDLKDAFFCIPLAPESQLIFAFEWADAEEGESGQLTWTRLPQGFKNSPTLFNEALNRDLQGFRLDHPSVSLLQYVDDLLIAADTQAACLSATRDLLMTLAELGYRVSGKKAQLCQEEVTYLGFKIHKGSRSLSNSRTQAILQIPVPKTKRQVREFLGKIGYCRLFIPGFAELAQPLYAATRPGNDPLVWGEKEEEAFQSLKLALTQPPALALPSLDKPFQLFVEETSGAAKGVLTQALGPWKRPVAYLSKRLDPVAAGWPRCLRAIAAAALLTREASKLTFGQDIEITSSHNLESLLRSPPDKWLTNARITQYQVLLLDPPRVRFKQTAALNPATLLPETDDTLPIHHCLDTLDSLTSTRPDLTDQPLAQAEATLFTDGSSYIRDGKRYAGAAVVTLDSVIWAEPLPIGTSAQKAELIALTKALEWSKDKSVNIYTDSRYAFATLHVHGMIYRERGWLTAGGKAIKNAPEILALLTAVWLPKRVAVMHCKGHQKDDAPTSTGNRRADEVAREVAIRPLSTQATISAGKRTADGSEFEKRTADGSEFESPKKKAKVE

SEQ ID NO: 1443 - protein, 2093 aa, synthetic construct
MPAAKRVKLDGGDKKYSIGLDIGTNSVGWAVITDEYKVPSKKFKVLGNTDRHSIKKNLIGALLFDSGETAEATRLKRTARRRYTRRKNRICYLQEIFSNEMAKVDDSFFHRLEESFLVEEDKKHERHPIFGNIVDEVAYHEKYPTIYHLRKKLVDSTDKADLRLIYLALAHMIKFRGHFLIEGDLNPDNSDVDKLFIQLVQTYNQLFEENPINASGVDAKAILSARLSKSRRLENLIAQLPGEKKNGLFGNLIALSLGLTPNFKSNFDLAEDAKLQLSKDTYDDDLDNLLAQIGDQYADLFLAAKNLSDAILLSDILRVNTEITKAPLSASMIKRYDEHHQDLTLLKALVRQQLPEKYKEIFFDQSKNGYAGYIDGGASQEEFYKFIKPILEKMDGTEELLVKLNREDLLRKQRTFDNGSIPHQIHLGELHAILRRQEDFYPFLKDNREKIEKILTFRIPYYVGPLARGNSRFAWMTRKSEETITPWNFEEVVDKGASAQSFIERMTNFDKNLPNEKVLPKHSLLYEYFTVYNELTKVKYVTEGMRKPAFLSGEQKKAIVDLLFKTNRKVTVKQLKEDYFKKIECFDSVEISGVEDRFNASLGTYHDLLKIIKDKDFLDNEENEDILEDIVLTLTLFEDREMIEERLKTYAHLFDDKVMKQLKRRRYTGWGRLSRKLINGIRDKQSGKTILDFLKSDGFANRNFMQLIHDDSLTFKEDIQKAQVSGQGDSLHEHIANLAGSPAIKKGILQTVKVVDELVKVMGRHKPENIVIEMARENQTTQKGQKNSRERMKRIEEGIKELGSQILKEHPVENTQLQNEKLYLYYLQNGRDMYVDQELDINRLSDYDVDHIVPQSFLKDDSIDNKVLTRSDKARGKSDNVPSEEVVKKMKNYWRQLLNAKLITQRKFDNLTKAERGGLSELDKAGFIKRQLVETRQITKHVAQILDSRMNTKYDENDKLIREVKVITLKSKLVSDFRKDFQFYKVREINNYHHAHDAYLNAVVGTALIKKYPKLESEFVYGDYKVYDVRKMIAKSEQEIGKATAKYFFYSNIMNFFKTEITLANGEIRKRPLIETNGETGEIVWDKGRDFATVRKVLSMPQVNIVKKTEVQTGGFSKESILPKRNSDKLIARKKDWDPKKYGGFDSPTVAYSVLVVAKVEKGKSKKLKSVKELLGITIMERSSFEKNPIDFLEAKGYKEVKKDLIIKLPKYSLFELENGRKRMLASAGELQKGNELALPSKYVNFLYLASHYEKLKGSPEDNEQKQLFVEQHKHYLDEIIEQISEFSKRVILADANLDKVLSAYNKHRDKPIREQAENIIHLFTLTNLGAPAAFKYFDTTIDRKRYTSTKEVLDATLIHQSITGLYETRIDLSQLGGDGGGSSGSSGGTAPLEEEYRLFLEAPIQNVTLLEQWKREIPKVWAEINPPGLASTQAPIHVQLLSTALPVRVRQYPITLEAKRSLRETIRKFRAAGILRPVHSPWNTPLLPVRKSGTSEYRMVQDLREVNKRVETIHPTVPNPYTLLSLLPPDRIWYSVLDLKDAFFCIPLAPESQLIFAFEWADAEEGESGQLTWTRLPQGFKNSPTLFNEALNRDLQGFRLDHPSVSLLQYVDDLLIAADTQAACLSATRDLLMTLAELGYRVSGKKAQLCQEEVTYLGFKIHKGSRSLSNSRTQAILQIPVPKTKRQVREFLGKIGYCRLFIPGFAELAQPLYAATRPGNDPLVWGEKEEEAFQSLKLALTQPPALALPSLDKPFQLFVEETSGAAKGVLTQALGPWKRPVAYLSKRLDPVAAGWPRCLRAIAAAALLTREASKLTFGQDIEITSSHNLESLLRSPPDKWLTNARITQYQVLLLDPPRVRFKQTAALNPATLLPETDDTLPIHHCLDTLDSLTSTRPDLTDQPLAQAEATLFTDGSSYIRDGKRYAGAAVVTLDSVIWAEPLPIGTSAQKAELIALTKALEWSKDKSVNIYTDSRYAFATLHVHGMIYRERGWLTAGGKAIKNAPEILALLTAVWLPKRVAVMHCKGHQKDDAPTSTGNRRADEVAREVAIRPLSTQATISAGKRTADGSEFEKRTADGSEFESPKKKAKVE

SEQ ID NO: 1444 - protein, 2093 aa, synthetic construct
MPAAKRVKLDGGDKKYSIGLDIGTNSVGWAVITDEYKVPSKKFKVLGNTDRHSIKKNLIGALLFDSGETAEATRLKRTARRRYTRRKNRICYLQEIFSNEMAKVDDSFFHRLEESFLVEEDKKHERHPIFGNIVDEVAYHEKYPTIYHLRKKLVDSTDKADLRLIYLALAHMIKFRGHFLIEGDLNPDNSDVDKLFIQLVQTYNQLFEENPINASGVDAKAILSARLSKSRRLENLIAQLPGEKKNGLFGNLIALSLGLTPNFKSNFDLAEDAKLQLSKDTYDDDLDNLLAQIGDQYADLFLAAKNLSDAILLSDILRVNTEITKAPLSASMIKRYDEHHQDLTLLKALVRQQLPEKYKEIFFDQSKNGYAGYIDGGASQEEFYKFIKPILEKMDGTEELLVKLNREDLLRKQRTFDNGSIPHQIHLGELHAILRRQEDFYPFLKDNREKIEKILTFRIPYYVGPLARGNSRFAWMTRKSEETITPWNFEEVVDKGASAQSFIERMTNFDKNLPNEKVLPKHSLLYEYFTVYNELTKVKYVTEGMRKPAFLSGEQKKAIVDLLFKTNRKVTVKQLKEDYFKKIECFDSVEISGVEDRFNASLGTYHDLLKIIKDKDFLDNEENEDILEDIVLTLTLFEDREMIEERLKTYAHLFDDKVMKQLKRRRYTGWGRLSRKLINGIRDKQSGKTILDFLKSDGFANRNFMQLIHDDSLTFKEDIQKAQVSGQGDSLHEHIANLAGSPAIKKGILQTVKVVDELVKVMGRHKPENIVIEMARENQTTQKGQKNSRERMKRIEEGIKELGSQILKEHPVENTQLQNEKLYLYYLQNGRDMYVDQELDINRLSDYDVDHIVPQSFLKDDSIDNKVLTRSDKARGKSDNVPSEEVVKKMKNYWRQLLNAKLITQRKFDNLTKAERGGLSELDKAGFIKRQLVETRQITKHVAQILDSRMNTKYDENDKLIREVKVITLKSKLVSDFRKDFQFYKVREINNYHHAHDAYLNAVVGTALIKKYPKLESEFVYGDYKVYDVRKMIAKSEQEIGKATAKYFFYSNIMNFFKTEITLANGEIRKRPLIETNGETGEIVWDKGRDFATVRKVLSMPQVNIVKKTEVQTGGFSKESILPKRNSDKLIARKKDWDPKKYGGFDSPTVAYSVLVVAKVEKGKSKKLKSVKELLGITIMERSSFEKNPIDFLEAKGYKEVKKDLIIKLPKYSLFELENGRKRMLASAGELQKGNELALPSKYVNFLYLASHYEKLKGSPEDNEQKQLFVEQHKHYLDEIIEQISEFSKRVILADANLDKVLSAYNKHRDKPIREQAENIIHLFTLTNLGAPAAFKYFDTTIDRKRYTSTKEVLDATLIHQSITGLYETRIDLSQLGGDGGGGGGSSGGTAPLEEEYRLFLEAPIQNVTLLEQWKREIPKVWAEINPPGLASTQAPIHVQLLSTALPVRVRQYPITLEAKRSLRETIRKFRAAGILRPVHSPWNTPLLPVRKSGTSEYRMVQDLREVNKRVETIHPTVPNPYTLLSLLPPDRIWYSVLDLKDAFFCIPLAPESQLIFAFEWADAEEGESGQLTWTRLPQGFKNSPTLFNEALNRDLQGFRLDHPSVSLLQYVDDLLIAADTQAACLSATRDLLMTLAELGYRVSGKKAQLCQEEVTYLGFKIHKGSRSLSNSRTQAILQIPVPKTKRQVREFLGKIGYCRLFIPGFAELAQPLYAATRPGNDPLVWGEKEEEAFQSLKLALTQPPALALPSLDKPFQLFVEETSGAAKGVLTQALGPWKRPVAYLSKRLDPVAAGWPRCLRAIAAAALLTREASKLTFGQDIEITSSHNLESLLRSPPDKWLTNARITQYQVLLLDPPRVRFKQTAALNPATLLPETDDTLPIHHCLDTLDSLTSTRPDLTDQPLAQAEATLFTDGSSYIRDGKRYAGAAVVTLDSVIWAEPLPIGTSAQKAELIALTKALEWSKDKSVNIYTDSRYAFATLHVHGMIYRERGWLTAGGKAIKNAPEILALLTAVWLPKRVAVMHCKGHQKDDAPTSTGNRRADEVAREVAIRPLSTQATISAGKRTADGSEFEKRTADGSEFESPKKKAKVE

SEQ ID NO: 1445 - protein, 2093 aa, synthetic construct
MPAAKRVKLDGGDKKYSIGLDIGTNSVGWAVITDEYKVPSKKFKVLGNTDRHSIKKNLIGALLFDSGETAEATRLKRTARRRYTRRKNRICYLQEIFSNEMAKVDDSFFHRLEESFLVEEDKKHERHPIFGNIVDEVAYHEKYPTIYHLRKKLVDSTDKADLRLIYLALAHMIKFRGHFLIEGDLNPDNSDVDKLFIQLVQTYNQLFEENPINASGVDAKAILSARLSKSRRLENLIAQLPGEKKNGLFGNLIALSLGLTPNFKSNFDLAEDAKLQLSKDTYDDDLDNLLAQIGDQYADLFLAAKNLSDAILLSDILRVNTEITKAPLSASMIKRYDEHHQDLTLLKALVRQQLPEKYKEIFFDQSKNGYAGYIDGGASQEEFYKFIKPILEKMDGTEELLVKLNREDLLRKQRTFDNGSIPHQIHLGELHAILRRQEDFYPFLKDNREKIEKILTFRIPYYVGPLARGNSRFAWMTRKSEETITPWNFEEVVDKGASAQSFIERMTNFDKNLPNEKVLPKHSLLYEYFTVYNELTKVKYVTEGMRKPAFLSGEQKKAIVDLLFKTNRKVTVKQLKEDYFKKIECFDSVEISGVEDRFNASLGTYHDLLKIIKDKDFLDNEENEDILEDIVLTLTLFEDREMIEERLKTYAHLFDDKVMKQLKRRRYTGWGRLSRKLINGIRDKQSGKTILDFLKSDGFANRNFMQLIHDDSLTFKEDIQKAQVSGQGDSLHEHIANLAGSPAIKKGILQTVKVVDELVKVMGRHKPENIVIEMARENQTTQKGQKNSRERMKRIEEGIKELGSQILKEHPVENTQLQNEKLYLYYLQNGRDMYVDQELDINRLSDYDVDHIVPQSFLKDDSIDNKVLTRSDKARGKSDNVPSEEVVKKMKNYWRQLLNAKLITQRKFDNLTKAERGGLSELDKAGFIKRQLVETRQITKHVAQILDSRMNTKYDENDKLIREVKVITLKSKLVSDFRKDFQFYKVREINNYHHAHDAYLNAVVGTALIKKYPKLESEFVYGDYKVYDVRKMIAKSEQEIGKATAKYFFYSNIMNFFKTEITLANGEIRKRPLIETNGETGEIVWDKGRDFATVRKVLSMPQVNIVKKTEVQTGGFSKESILPKRNSDKLIARKKDWDPKKYGGFDSPTVAYSVLVVAKVEKGKSKKLKSVKELLGITIMERSSFEKNPIDFLEAKGYKEVKKDLIIKLPKYSLFELENGRKRMLASAGELQKGNELALPSKYVNFLYLASHYEKLKGSPEDNEQKQLFVEQHKHYLDEIIEQISEFSKRVILADANLDKVLSAYNKHRDKPIREQAENIIHLFTLTNLGAPAAFKYFDTTIDRKRYTSTKEVLDATLIHQSITGLYETRIDLSQLGGDGGGSSGGSGGTAPLEEEYRLFLEAPIQNVTLLEQWKREIPKVWAEINPPGLASTQAPIHVQLLSTALPVRVRQYPITLEAKRSLRETIRKFRAAGILRPVHSPWNTPLLPVRKSGTSEYRMVQDLREVNKRVETIHPTVPNPYTLLSLLPPDRIWYSVLDLKDAFFCIPLAPESQLIFAFEWADAEEGESGQLTWTRLPQGFKNSPTLFNEALNRDLQGFRLDHPSVSLLQYVDDLLIAADTQAACLSATRDLLMTLAELGYRVSGKKAQLCQEEVTYLGFKIHKGSRSLSNSRTQAILQIPVPKTKRQVREFLGKIGYCRLFIPGFAELAQPLYAATRPGNDPLVWGEKEEEAFQSLKLALTQPPALALPSLDKPFQLFVEETSGAAKGVLTQALGPWKRPVAYLSKRLDPVAAGWPRCLRAIAAAALLTREASKLTFGQDIEITSSHNLESLLRSPPDKWLTNARITQYQVLLLDPPRVRFKQTAALNPATLLPETDDTLPIHHCLDTLDSLTSTRPDLTDQPLAQAEATLFTDGSSYIRDGKRYAGAAVVTLDSVIWAEPLPIGTSAQKAELIALTKALEWSKDKSVNIYTDSRYAFATLHVHGMIYRERGWLTAGGKAIKNAPEILALLTAVWLPKRVAVMHCKGHQKDDAPTSTGNRRADEVAREVAIRPLSTQATISAGKRTADGSEFEKRTADGSEFESPKKKAKVE

SEQ ID NO: 1446 - protein, 2095 aa, synthetic construct
MPAAKRVKLDGGDKKYSIGLDIGTNSVGWAVITDEYKVPSKKFKVLGNTDRHSIKKNLIGALLFDSGETAEATRLKRTARRRYTRRKNRICYLQEIFSNEMAKVDDSFFHRLEESFLVEEDKKHERHPIFGNIVDEVAYHEKYPTIYHLRKKLVDSTDKADLRLIYLALAHMIKFRGHFLIEGDLNPDNSDVDKLFIQLVQTYNQLFEENPINASGVDAKAILSARLSKSRRLENLIAQLPGEKKNGLFGNLIALSLGLTPNFKSNFDLAEDAKLQLSKDTYDDDLDNLLAQIGDQYADLFLAAKNLSDAILLSDILRVNTEITKAPLSASMIKRYDEHHQDLTLLKALVRQQLPEKYKEIFFDQSKNGYAGYIDGGASQEEFYKFIKPILEKMDGTEELLVKLNREDLLRKQRTFDNGSIPHQIHLGELHAILRRQEDFYPFLKDNREKIEKILTFRIPYYVGPLARGNSRFAWMTRKSEETITPWNFEEVVDKGASAQSFIERMTNFDKNLPNEKVLPKHSLLYEYFTVYNELTKVKYVTEGMRKPAFLSGEQKKAIVDLLFKTNRKVTVKQLKEDYFKKIECFDSVEISGVEDRFNASLGTYHDLLKIIKDKDFLDNEENEDILEDIVLTLTLFEDREMIEERLKTYAHLFDDKVMKQLKRRRYTGWGRLSRKLINGIRDKQSGKTILDFLKSDGFANRNFMQLIHDDSLTFKEDIQKAQVSGQGDSLHEHIANLAGSPAIKKGILQTVKVVDELVKVMGRHKPENIVIEMARENQTTQKGQKNSRERMKRIEEGIKELGSQILKEHPVENTQLQNEKLYLYYLQNGRDMYVDQELDINRLSDYDVDHIVPQSFLKDDSIDNKVLTRSDKARGKSDNVPSEEVVKKMKNYWRQLLNAKLITQRKFDNLTKAERGGLSELDKAGFIKRQLVETRQITKHVAQILDSRMNTKYDENDKLIREVKVITLKSKLVSDFRKDFQFYKVREINNYHHAHDAYLNAVVGTALIKKYPKLESEFVYGDYKVYDVRKMIAKSEQEIGKATAKYFFYSNIMNFFKTEITLANGEIRKRPLIETNGETGEIVWDKGRDFATVRKVLSMPQVNIVKKTEVQTGGFSKESILPKRNSDKLIARKKDWDPKKYGGFDSPTVAYSVLVVAKVEKGKSKKLKSVKELLGITIMERSSFEKNPIDFLEAKGYKEVKKDLIIKLPKYSLFELENGRKRMLASAGELQKGNELALPSKYVNFLYLASHYEKLKGSPEDNEQKQLFVEQHKHYLDEIIEQISEFSKRVILADANLDKVLSAYNKHRDKPIREQAENIIHLFTLTNLGAPAAFKYFDTTIDRKRYTSTKEVLDATLIHQSITGLYETRIDLSQLGGDGGGGGEAAAKGGTAPLEEEYRLFLEAPIQNVTLLEQWKREIPKVWAEINPPGLASTQAPIHVQLLSTALPVRVRQYPITLEAKRSLRETIRKFRAAGILRPVHSPWNTPLLPVRKSGTSEYRMVQDLREVNKRVETIHPTVPNPYTLLSLLPPDRIWYSVLDLKDAFFCIPLAPESQLIFAFEWADAEEGESGQLTWTRLPQGFKNSPTLFNEALNRDLQGFRLDHPSVSLLQYVDDLLIAADTQAACLSATRDLLMTLAELGYRVSGKKAQLCQEEVTYLGFKIHKGSRSLSNSRTQAILQIPVPKTKRQVREFLGKIGYCRLFIPGFAELAQPLYAATRPGNDPLVWGEKEEEAFQSLKLALTQPPALALPSLDKPFQLFVEETSGAAKGVLTQALGPWKRPVAYLSKRLDPVAAGWPRCLRAIAAAALLTREASKLTFGQDIEITSSHNLESLLRSPPDKWLTNARITQYQVLLLDPPRVRFKQTAALNPATLLPETDDTLPIHHCLDTLDSLTSTRPDLTDQPLAQAEATLFTDGSSYIRDGKRYAGAAVVTLDSVIWAEPLPIGTSAQKAELIALTKALEWSKDKSVNIYTDSRYAFATLHVHGMIYRERGWLTAGGKAIKNAPEILALLTAVWLPKRVAVMHCKGHQKDDAPTSTGNRRADEVAREVAIRPLSTQATISAGKRTADGSEFEKRTADGSEFESPKKKAKVE

SEQ ID NO: 1447 - protein, 2096 aa, synthetic construct
MPAAKRVKLDGGDKKYSIGLDIGTNSVGWAVITDEYKVPSKKFKVLGNTDRHSIKKNLIGALLFDSGETAEATRLKRTARRRYTRRKNRICYLQEIFSNEMAKVDDSFFHRLEESFLVEEDKKHERHPIFGNIVDEVAYHEKYPTIYHLRKKLVDSTDKADLRLIYLALAHMIKFRGHFLIEGDLNPDNSDVDKLFIQLVQTYNQLFEENPINASGVDAKAILSARLSKSRRLENLIAQLPGEKKNGLFGNLIALSLGLTPNFKSNFDLAEDAKLQLSKDTYDDDLDNLLAQIGDQYADLFLAAKNLSDAILLSDILRVNTEITKAPLSASMIKRYDEHHQDLTLLKALVRQQLPEKYKEIFFDQSKNGYAGYIDGGASQEEFYKFIKPILEKMDGTEELLVKLNREDLLRKQRTFDNGSIPHQIHLGELHAILRRQEDFYPFLKDNREKIEKILTFRIPYYVGPLARGNSRFAWMTRKSEETITPWNFEEVVDKGASAQSFIERMTNFDKNLPNEKVLPKHSLLYEYFTVYNELTKVKYVTEGMRKPAFLSGEQKKAIVDLLFKTNRKVTVKQLKEDYFKKIECFDSVEISGVEDRFNASLGTYHDLLKIIKDKDFLDNEENEDILEDIVLTLTLFEDREMIEERLKTYAHLFDDKVMKQLKRRRYTGWGRLSRKLINGIRDKQSGKTILDFLKSDGFANRNFMQLIHDDSLTFKEDIQKAQVSGQGDSLHEHIANLAGSPAIKKGILQTVKVVDELVKVMGRHKPENIVIEMARENQTTQKGQKNSRERMKRIEEGIKELGSQILKEHPVENTQLQNEKLYLYYLQNGRDMYVDQELDINRLSDYDVDHIVPQSFLKDDSIDNKVLTRSDKARGKSDNVPSEEVVKKMKNYWRQLLNAKLITQRKFDNLTKAERGGLSELDKAGFIKRQLVETRQITKHVAQILDSRMNTKYDENDKLIREVKVITLKSKLVSDFRKDFQFYKVREINNYHHAHDAYLNAVVGTALIKKYPKLESEFVYGDYKVYDVRKMIAKSEQEIGKATAKYFFYSNIMNFFKTEITLANGEIRKRPLIETNGETGEIVWDKGRDFATVRKVLSMPQVNIVKKTEVQTGGFSKESILPKRNSDKLIARKKDWDPKKYGGFDSPTVAYSVLVVAKVEKGKSKKLKSVKELLGITIMERSSFEKNPIDFLEAKGYKEVKKDLIIKLPKYSLFELENGRKRMLASAGELQKGNELALPSKYVNFLYLASHYEKLKGSPEDNEQKQLFVEQHKHYLDEIIEQISEFSKRVILADANLDKVLSAYNKHRDKPIREQAENIIHLFTLTNLGAPAAFKYFDTTIDRKRYTSTKEVLDATLIHQSITGLYETRIDLSQLGGDGGPAPGGGGSSGGTAPLEEEYRLFLEAPIQNVTLLEQWKREIPKVWAEINPPGLASTQAPIHVQLLSTALPVRVRQYPITLEAKRSLRETIRKFRAAGILRPVHSPWNTPLLPVRKSGTSEYRMVQDLREVNKRVETIHPTVPNPYTLLSLLPPDRIWYSVLDLKDAFFCIPLAPESQLIFAFEWADAEEGESGQLTWTRLPQGFKNSPTLFNEALNRDLQGFRLDHPSVSLLQYVDDLLIAADTQAACLSATRDLLMTLAELGYRVSGKKAQLCQEEVTYLGFKIHKGSRSLSNSRTQAILQIPVPKTKRQVREFLGKIGYCRLFIPGFAELAQPLYAATRPGNDPLVWGEKEEEAFQSLKLALTQPPALALPSLDKPFQLFVEETSGAAKGVLTQALGPWKRPVAYLSKRLDPVAAGWPRCLRAIAAAALLTREASKLTFGQDIEITSSHNLESLLRSPPDKWLTNARITQYQVLLLDPPRVRFKQTAALNPATLLPETDDTLPIHHCLDTLDSLTSTRPDLTDQPLAQAEATLFTDGSSYIRDGKRYAGAAVVTLDSVIWAEPLPIGTSAQKAELIALTKALEWSKDKSVNIYTDSRYAFATLHVHGMIYRERGWLTAGGKAIKNAPEILALLTAVWLPKRVAVMHCKGHQKDDAPTSTGNRRADEVAREVAIRPLSTQATISAGKRTADGSEFEKRTADGSEFESPKKKAKVE

SEQ ID NO: 1448 - protein, 2129 aa, synthetic construct
MPAAKRVKLDGGDKKYSIGLDIGTNSVGWAVITDEYKVPSKKFKVLGNTDRHSIKKNLIGALLFDSGETAEATRLKRTARRRYTRRKNRICYLQEIFSNEMAKVDDSFFHRLEESFLVEEDKKHERHPIFGNIVDEVAYHEKYPTIYHLRKKLVDSTDKADLRLIYLALAHMIKFRGHFLIEGDLNPDNSDVDKLFIQLVQTYNQLFEENPINASGVDAKAILSARLSKSRRLENLIAQLPGEKKNGLFGNLIALSLGLTPNFKSNFDLAEDAKLQLSKDTYDDDLDNLLAQIGDQYADLFLAAKNLSDAILLSDILRVNTEITKAPLSASMIKRYDEHHQDLTLLKALVRQQLPEKYKEIFFDQSKNGYAGYIDGGASQEEFYKFIKPILEKMDGTEELLVKLNREDLLRKQRTFDNGSIPHQIHLGELHAILRRQEDFYPFLKDNREKIEKILTFRIPYYVGPLARGNSRFAWMTRKSEETITPWNFEEVVDKGASAQSFIERMTNFDKNLPNEKVLPKHSLLYEYFTVYNELTKVKYVTEGMRKPAFLSGEQKKAIVDLLFKTNRKVTVKQLKEDYFKKIECFDSVEISGVEDRFNASLGTYHDLLKIIKDKDFLDNEENEDILEDIVLTLTLFEDREMIEERLKTYAHLFDDKVMKQLKRRRYTGWGRLSRKLINGIRDKQSGKTILDFLKSDGFANRNFMQLIHDDSLTFKEDIQKAQVSGQGDSLHEHIANLAGSPAIKKGILQTVKVVDELVKVMGRHKPENIVIEMARENQTTQKGQKNSRERMKRIEEGIKELGSQILKEHPVENTQLQNEKLYLYYLQNGRDMYVDQELDINRLSDYDVDHIVPQSFLKDDSIDNKVLTRSDKARGKSDNVPSEEVVKKMKNYWRQLLNAKLITQRKFDNLTKAERGGLSELDKAGFIKRQLVETRQITKHVAQILDSRMNTKYDENDKLIREVKVITLKSKLVSDFRKDFQFYKVREINNYHHAHDAYLNAVVGTALIKKYPKLESEFVYGDYKVYDVRKMIAKSEQEIGKATAKYFFYSNIMNFFKTEITLANGEIRKRPLIETNGETGEIVWDKGRDFATVRKVLSMPQVNIVKKTEVQTGGFSKESILPKRNSDKLIARKKDWDPKKYGGFDSPTVAYSVLVVAKVEKGKSKKLKSVKELLGITIMERSSFEKNPIDFLEAKGYKEVKKDLIIKLPKYSLFELENGRKRMLASAGELQKGNELALPSKYVNFLYLASHYEKLKGSPEDNEQKQLFVEQHKHYLDEIIEQISEFSKRVILADANLDKVLSAYNKHRDKPIREQAENIIHLFTLTNLGAPAAFKYFDTTIDRKRYTSTKEVLDATLIHQSITGLYETRIDLSQLGGDGGAEAAAKEAAAKEAAAKEAAAKALEAEAAAKEAAAKEAAAKEAAAKAGGVLNLEEEYRLHEKPVPSSIDPSWLQLFPTVWAERAGMGLANQVPPVVVELRSGASPVAVRQYPMSKEAREGIRPHIQKFLDLGVLVPCRSPWNTPLLPVKKPGTNDYRPVQDLREINKRVQDIHPTVPNPYNLLSSLPPSYTWYSVLDLKDAFFCLRLHPNSQPLFAFEWKDPEKGNTGQLTWTRLPQGFKNSPTLFNEALHRDLAPFRALNPQVVLLQYVDDLLVAAPTYEDCKKGTQKLLQELSKLGYRVSAKKAQLCQREVTYLGYLLKEGKRWLTPARKATVMKIPVPTTPRQVREFLGKAGFCRLFIPGFASLAAPLYPLTKPSIPFIWTEEHQQAFDHIKKALLSAPALALPDLTKPFTLYIDERAGVARGVLTQTLGPWRRPVAYLSKKLDPVASGWPTCLKAVAAVALLLKDADKLTLGQNVTVIASHSLESIVRQPPDRWMTNARMTHYQSLLLNERVSFAPPAVLNPATLLPVESEATPVHRCSEILAEETGTRRDLEDQPLPGVPTWYTDGSSFITEGKRRAGAPIVDGKRTVWASSLPEGTSAQKAELVALTQALRLAEGKNINIYTDSRYAFATAHIHGAIYKQRGWLTSAGKDIKNKEEILALLEAIHLPRRVAIIHCPGHQRGSNPVATGNRRADEAAKQAALSTRVLAGTTKPAGKRTADGSEFEKRTADGSEFESPKKKAKVE

SEQ ID NO: 1449 - protein, 2092 aa, synthetic construct
MPAAKRVKLDGGDKKYSIGLDIGTNSVGWAVITDEYKVPSKKFKVLGNTDRHSIKKNLIGALLFDSGETAEATRLKRTARRRYTRRKNRICYLQEIFSNEMAKVDDSFFHRLEESFLVEEDKKHERHPIFGNIVDEVAYHEKYPTIYHLRKKLVDSTDKADLRLIYLALAHMIKFRGHFLIEGDLNPDNSDVDKLFIQLVQTYNQLFEENPINASGVDAKAILSARLSKSRRLENLIAQLPGEKKNGLFGNLIALSLGLTPNFKSNFDLAEDAKLQLSKDTYDDDLDNLLAQIGDQYADLFLAAKNLSDAILLSDILRVNTEITKAPLSASMIKRYDEHHQDLTLLKALVRQQLPEKYKEIFFDQSKNGYAGYIDGGASQEEFYKFIKPILEKMDGTEELLVKLNREDLLRKQRTFDNGSIPHQIHLGELHAILRRQEDFYPFLKDNREKIEKILTFRIPYYVGPLARGNSRFAWMTRKSEETITPWNFEEVVDKGASAQSFIERMTNFDKNLPNEKVLPKHSLLYEYFTVYNELTKVKYVTEGMRKPAFLSGEQKKAIVDLLFKTNRKVTVKQLKEDYFKKIECFDSVEISGVEDRFNASLGTYHDLLKIIKDKDFLDNEENEDILEDIVLTLTLFEDREMIEERLKTYAHLFDDKVMKQLKRRRYTGWGRLSRKLINGIRDKQSGKTILDFLKSDGFANRNFMQLIHDDSLTFKEDIQKAQVSGQGDSLHEHIANLAGSPAIKKGILQTVKVVDELVKVMGRHKPENIVIEMARENQTTQKGQKNSRERMKRIEEGIKELGSQILKEHPVENTQLQNEKLYLYYLQNGRDMYVDQELDINRLSDYDVDHIVPQSFLKDDSIDNKVLTRSDKARGKSDNVPSEEVVKKMKNYWRQLLNAKLITQRKFDNLTKAERGGLSELDKAGFIKRQLVETRQITKHVAQILDSRMNTKYDENDKLIREVKVITLKSKLVSDFRKDFQFYKVREINNYHHAHDAYLNAVVGTALIKKYPKLESEFVYGDYKVYDVRKMIAKSEQEIGKATAKYFFYSNIMNFFKTEITLANGEIRKRPLIETNGETGEIVWDKGRDFATVRKVLSMPQVNIVKKTEVQTGGFSKESILPKRNSDKLIARKKDWDPKKYGGFDSPTVAYSVLVVAKVEKGKSKKLKSVKELLGITIMERSSFEKNPIDFLEAKGYKEVKKDLIIKLPKYSLFELENGRKRMLASAGELQKGNELALPSKYVNFLYLASHYEKLKGSPEDNEQKQLFVEQHKHYLDEIIEQISEFSKRVILADANLDKVLSAYNKHRDKPIREQAENIIHLFTLTNLGAPAAFKYFDTTIDRKRYTSTKEVLDATLIHQSITGLYETRIDLSQLGGDGGGGSGGSGGSGGVLNLEEEYRLHEKPVPSSIDPSWLQLFPTVWAERAGMGLANQVPPVVVELRSGASPVAVRQYPMSKEAREGIRPHIQKFLDLGVLVPCRSPWNTPLLPVKKPGTNDYRPVQDLREINKRVQDIHPTVPNPYNLLSSLPPSYTWYSVLDLKDAFFCLRLHPNSQPLFAFEWKDPEKGNTGQLTWTRLPQGFKNSPTLFNEALHRDLAPFRALNPQVVLLQYVDDLLVAAPTYEDCKKGTQKLLQELSKLGYRVSAKKAQLCQREVTYLGYLLKEGKRWLTPARKATVMKIPVPTTPRQVREFLGKAGFCRLFIPGFASLAAPLYPLTKPSIPFIWTEEHQQAFDHIKKALLSAPALALPDLTKPFTLYIDERAGVARGVLTQTLGPWRRPVAYLSKKLDPVASGWPTCLKAVAAVALLLKDADKLTLGQNVTVIASHSLESIVRQPPDRWMTNARMTHYQSLLLNERVSFAPPAVLNPATLLPVESEATPVHRCSEILAEETGTRRDLEDQPLPGVPTWYTDGSSFITEGKRRAGAPIVDGKRTVWASSLPEGTSAQKAELVALTQALRLAEGKNINIYTDSRYAFATAHIHGAIYKQRGWLTSAGKDIKNKEEILALLEAIHLPRRVAIIHCPGHQRGSNPVATGNRRADEAAKQAALSTRVLAGTTKPAGKRTADGSEFEKRTADGSEFESPKKKAKVE

SEQ ID NO: 1450 - protein, 2089 aa, synthetic construct
MPAAKRVKLDGGDKKYSIGLDIGTNSVGWAVITDEYKVPSKKFKVLGNTDRHSIKKNLIGALLFDSGETAEATRLKRTARRRYTRRKNRICYLQEIFSNEMAKVDDSFFHRLEESFLVEEDKKHERHPIFGNIVDEVAYHEKYPTIYHLRKKLVDSTDKADLRLIYLALAHMIKFRGHFLIEGDLNPDNSDVDKLFIQLVQTYNQLFEENPINASGVDAKAILSARLSKSRRLENLIAQLPGEKKNGLFGNLIALSLGLTPNFKSNFDLAEDAKLQLSKDTYDDDLDNLLAQIGDQYADLFLAAKNLSDAILLSDILRVNTEITKAPLSASMIKRYDEHHQDLTLLKALVRQQLPEKYKEIFFDQSKNGYAGYIDGGASQEEFYKFIKPILEKMDGTEELLVKLNREDLLRKQRTFDNGSIPHQIHLGELHAILRRQEDFYPFLKDNREKIEKILTFRIPYYVGPLARGNSRFAWMTRKSEETITPWNFEEVVDKGASAQSFIERMTNFDKNLPNEKVLPKHSLLYEYFTVYNELTKVKYVTEGMRKPAFLSGEQKKAIVDLLFKTNRKVTVKQLKEDYFKKIECFDSVEISGVEDRFNASLGTYHDLLKIIKDKDFLDNEENEDILEDIVLTLTLFEDREMIEERLKTYAHLFDDKVMKQLKRRRYTGWGRLSRKLINGIRDKQSGKTILDFLKSDGFANRNFMQLIHDDSLTFKEDIQKAQVSGQGDSLHEHIANLAGSPAIKKGILQTVKVVDELVKVMGRHKPENIVIEMARENQTTQKGQKNSRERMKRIEEGIKELGSQILKEHPVENTQLQNEKLYLYYLQNGRDMYVDQELDINRLSDYDVDHIVPQSFLKDDSIDNKVLTRSDKARGKSDNVPSEEVVKKMKNYWRQLLNAKLITQRKFDNLTKAERGGLSELDKAGFIKRQLVETRQITKHVAQILDSRMNTKYDENDKLIREVKVITLKSKLVSDFRKDFQFYKVREINNYHHAHDAYLNAVVGTALIKKYPKLESEFVYGDYKVYDVRKMIAKSEQEIGKATAKYFFYSNIMNFFKTEITLANGEIRKRPLIETNGETGEIVWDKGRDFATVRKVLSMPQVNIVKKTEVQTGGFSKESILPKRNSDKLIARKKDWDPKKYGGFDSPTVAYSVLVVAKVEKGKSKKLKSVKELLGITIMERSSFEKNPIDFLEAKGYKEVKKDLIIKLPKYSLFELENGRKRMLASAGELQKGNELALPSKYVNFLYLASHYEKLKGSPEDNEQKQLFVEQHKHYLDEIIEQISEFSKRVILADANLDKVLSAYNKHRDKPIREQAENIIHLFTLTNLGAPAAFKYFDTTIDRKRYTSTKEVLDATLIHQSITGLYETRIDLSQLGGDGGGGSGSSGGVLNLEEEYRLHEKPVPSSIDPSWLQLFPTVWAERAGMGLANQVPPVVVELRSGASPVAVRQYPMSKEAREGIRPHIQKFLDLGVLVPCRSPWNTPLLPVKKPGTNDYRPVQDLREINKRVQDIHPTVPNPYNLLSSLPPSYTWYSVLDLKDAFFCLRLHPNSQPLFAFEWKDPEKGNTGQLTWTRLPQGFKNSPTLFNEALHRDLAPFRALNPQVVLLQYVDDLLVAAPTYEDCKKGTQKLLQELSKLGYRVSAKKAQLCQREVTYLGYLLKEGKRWLTPARKATVMKIPVPTTPRQVREFLGKAGFCRLFIPGFASLAAPLYPLTKPSIPFIWTEEHQQAFDHIKKALLSAPALALPDLTKPFTLYIDERAGVARGVLTQTLGPWRRPVAYLSKKLDPVASGWPTCLKAVAAVALLLKDADKLTLGQNVTVIASHSLESIVRQPPDRWMTNARMTHYQSLLLNERVSFAPPAVLNPATLLPVESEATPVHRCSEILAEETGTRRDLEDQPLPGVPTWYTDGSSFITEGKRRAGAPIVDGKRTVWASSLPEGTSAQKAELVALTQALRLAEGKNINIYTDSRYAFATAHIHGAIYKQRGWLTSAGKDIKNKEEILALLEAIHLPRRVAIIHCPGHQRGSNPVATGNRRADEAAKQAALSTRVLAGTTKPAGKRTADGSEFEKRTADGSEFESPKKKAKVE

SEQ ID NO: 1451 - protein, 2094 aa, synthetic construct
MPAAKRVKLDGGDKKYSIGLDIGTNSVGWAVITDEYKVPSKKFKVLGNTDRHSIKKNLIGALLFDSGETAEATRLKRTARRRYTRRKNRICYLQEIFSNEMAKVDDSFFHRLEESFLVEEDKKHERHPIFGNIVDEVAYHEKYPTIYHLRKKLVDSTDKADLRLIYLALAHMIKFRGHFLIEGDLNPDNSDVDKLFIQLVQTYNQLFEENPINASGVDAKAILSARLSKSRRLENLIAQLPGEKKNGLFGNLIALSLGLTPNFKSNFDLAEDAKLQLSKDTYDDDLDNLLAQIGDQYADLFLAAKNLSDAILLSDILRVNTEITKAPLSASMIKRYDEHHQDLTLLKALVRQQLPEKYKEIFFDQSKNGYAGYIDGGASQEEFYKFIKPILEKMDGTEELLVKLNREDLLRKQRTFDNGSIPHQIHLGELHAILRRQEDFYPFLKDNREKIEKILTFRIPYYVGPLARGNSRFAWMTRKSEETITPWNFEEVVDKGASAQSFIERMTNFDKNLPNEKVLPKHSLLYEYFTVYNELTKVKYVTEGMRKPAFLSGEQKKAIVDLLFKTNRKVTVKQLKEDYFKKIECFDSVEISGVEDRFNASLGTYHDLLKIIKDKDFLDNEENEDILEDIVLTLTLFEDREMIEERLKTYAHLFDDKVMKQLKRRRYTGWGRLSRKLINGIRDKQSGKTILDFLKSDGFANRNFMQLIHDDSLTFKEDIQKAQVSGQGDSLHEHIANLAGSPAIKKGILQTVKVVDELVKVMGRHKPENIVIEMARENQTTQKGQKNSRERMKRIEEGIKELGSQILKEHPVENTQLQNEKLYLYYLQNGRDMYVDQELDINRLSDYDVDHIVPQSFLKDDSIDNKVLTRSDKARGKSDNVPSEEVVKKMKNYWRQLLNAKLITQRKFDNLTKAERGGLSELDKAGFIKRQLVETRQITKHVAQILDSRMNTKYDENDKLIREVKVITLKSKLVSDFRKDFQFYKVREINNYHHAHDAYLNAVVGTALIKKYPKLESEFVYGDYKVYDVRKMIAKSEQEIGKATAKYFFYSNIMNFFKTEITLANGEIRKRPLIETNGETGEIVWDKGRDFATVRKVLSMPQVNIVKKTEVQTGGFSKESILPKRNSDKLIARKKDWDPKKYGGFDSPTVAYSVLVVAKVEKGKSKKLKSVKELLGITIMERSSFEKNPIDFLEAKGYKEVKKDLIIKLPKYSLFELENGRKRMLASAGELQKGNELALPSKYVNFLYLASHYEKLKGSPEDNEQKQLFVEQHKHYLDEIIEQISEFSKRVILADANLDKVLSAYNKHRDKPIREQAENIIHLFTLTNLGAPAAFKYFDTTIDRKRYTSTKEVLDATLIHQSITGLYETRIDLSQLGGDGGEAAAKGGGGGSGGVLNLEEEYRLHEKPVPSSIDPSWLQLFPTVWAERAGMGLANQVPPVVVELRSGASPVAVRQYPMSKEAREGIRPHIQKFLDLGVLVPCRSPWNTPLLPVKKPGTNDYRPVQDLREINKRVQDIHPTVPNPYNLLSSLPPSYTWYSVLDLKDAFFCLRLHPNSQPLFAFEWKDPEKGNTGQLTWTRLPQGFKNSPTLFNEALHRDLAPFRALNPQVVLLQYVDDLLVAAPTYEDCKKGTQKLLQELSKLGYRVSAKKAQLCQREVTYLGYLLKEGKRWLTPARKATVMKIPVPTTPRQVREFLGKAGFCRLFIPGFASLAAPLYPLTKPSIPFIWTEEHQQAFDHIKKALLSAPALALPDLTKPFTLYIDERAGVARGVLTQTLGPWRRPVAYLSKKLDPVASGWPTCLKAVAAVALLLKDADKLTLGQNVTVIASHSLESIVRQPPDRWMTNARMTHYQSLLLNERVSFAPPAVLNPATLLPVESEATPVHRCSEILAEETGTRRDLEDQPLPGVPTWYTDGSSFITEGKRRAGAPIVDGKRTVWASSLPEGTSAQKAELVALTQALRLAEGKNINIYTDSRYAFATAHIHGAIYKQRGWLTSAGKDIKNKEEILALLEAIHLPRRVAIIHCPGHQRGSNPVATGNRRADEAAKQAALSTRVLAGTTKPAGKRTADGSEFEKRTADGSEFESPKKKAKVE

SEQ ID NO: 1452 - protein, 2098 aa, synthetic construct
MPAAKRVKLDGGDKKYSIGLDIGTNSVGWAVITDEYKVPSKKFKVLGNTDRHSIKKNLIGALLFDSGETAEATRLKRTARRRYTRRKNRICYLQEIFSNEMAKVDDSFFHRLEESFLVEEDKKHERHPIFGNIVDEVAYHEKYPTIYHLRKKLVDSTDKADLRLIYLALAHMIKFRGHFLIEGDLNPDNSDVDKLFIQLVQTYNQLFEENPINASGVDAKAILSARLSKSRRLENLIAQLPGEKKNGLFGNLIALSLGLTPNFKSNFDLAEDAKLQLSKDTYDDDLDNLLAQIGDQYADLFLAAKNLSDAILLSDILRVNTEITKAPLSASMIKRYDEHHQDLTLLKALVRQQLPEKYKEIFFDQSKNGYAGYIDGGASQEEFYKFIKPILEKMDGTEELLVKLNREDLLRKQRTFDNGSIPHQIHLGELHAILRRQEDFYPFLKDNREKIEKILTFRIPYYVGPLARGNSRFAWMTRKSEETITPWNFEEVVDKGASAQSFIERMTNFDKNLPNEKVLPKHSLLYEYFTVYNELTKVKYVTEGMRKPAFLSGEQKKAIVDLLFKTNRKVTVKQLKEDYFKKIECFDSVEISGVEDRFNASLGTYHDLLKIIKDKDFLDNEENEDILEDIVLTLTLFEDREMIEERLKTYAHLFDDKVMKQLKRRRYTGWGRLSRKLINGIRDKQSGKTILDFLKSDGFANRNFMQLIHDDSLTFKEDIQKAQVSGQGDSLHEHIANLAGSPAIKKGILQTVKVVDELVKVMGRHKPENIVIEMARENQTTQKGQKNSRERMKRIEEGIKELGSQILKEHPVENTQLQNEKLYLYYLQNGRDMYVDQELDINRLSDYDVDHIVPQSFLKDDSIDNKVLTRSDKARGKSDNVPSEEVVKKMKNYWRQLLNAKLITQRKFDNLTKAERGGLSELDKAGFIKRQLVETRQITKHVAQILDSRMNTKYDENDKLIREVKVITLKSKLVSDFRKDFQFYKVREINNYHHAHDAYLNAVVGTALIKKYPKLESEFVYGDYKVYDVRKMIAKSEQEIGKATAKYFFYSNIMNFFKTEITLANGEIRKRPLIETNGETGEIVWDKGRDFATVRKVLSMPQVNIVKKTEVQTGGFSKESILPKRNSDKLIARKKDWDPKKYGGFDSPTVAYSVLVVAKVEKGKSKKLKSVKELLGITIMERSSFEKNPIDFLEAKGYKEVKKDLIIKLPKYSLFELENGRKRMLASAGELQKGNELALPSKYVNFLYLASHYEKLKGSPEDNEQKQLFVEQHKHYLDEIIEQISEFSKRVILADANLDKVLSAYNKHRDKPIREQAENIIHLFTLTNLGAPAAFKYFDTTIDRKRYTSTKEVLDATLIHQSITGLYETRIDLSQLGGDGGEAAAKEAAAKEAAAKGGVLNLEEEYRLHEKPVPSSIDPSWLQLFPTVWAERAGMGLANQVPPVVVELRSGASPVAVRQYPMSKEAREGIRPHIQKFLDLGVLVPCRSPWNTPLLPVKKPGTNDYRPVQDLREINKRVQDIHPTVPNPYNLLSSLPPSYTWYSVLDLKDAFFCLRLHPNSQPLFAFEWKDPEKGNTGQLTWTRLPQGFKNSPTLFNEALHRDLAPFRALNPQVVLLQYVDDLLVAAPTYEDCKKGTQKLLQELSKLGYRVSAKKAQLCQREVTYLGYLLKEGKRWLTPARKATVMKIPVPTTPRQVREFLGKAGFCRLFIPGFASLAAPLYPLTKPSIPFIWTEEHQQAFDHIKKALLSAPALALPDLTKPFTLYIDERAGVARGVLTQTLGPWRRPVAYLSKKLDPVASGWPTCLKAVAAVALLLKDADKLTLGQNVTVIASHSLESIVRQPPDRWMTNARMTHYQSLLLNERVSFAPPAVLNPATLLPVESEATPVHRCSEILAEETGTRRDLEDQPLPGVPTWYTDGSSFITEGKRRAGAPIVDGKRTVWASSLPEGTSAQKAELVALTQALRLAEGKNINIYTDSRYAFATAHIHGAIYKQRGWLTSAGKDIKNKEEILALLEAIHLPRRVAIIHCPGHQRGSNPVATGNRRADEAAKQAALSTRVLAGTTKPAGKRTADGSEFEKRTADGSEFESPKKKAKVE

SEQ ID NO: 1453 - protein, 2094 aa, synthetic construct
MPAAKRVKLDGGDKKYSIGLDIGTNSVGWAVITDEYKVPSKKFKVLGNTDRHSIKKNLIGALLFDSGETAEATRLKRTARRRYTRRKNRICYLQEIFSNEMAKVDDSFFHRLEESFLVEEDKKHERHPIFGNIVDEVAYHEKYPTIYHLRKKLVDSTDKADLRLIYLALAHMIKFRGHFLIEGDLNPDNSDVDKLFIQLVQTYNQLFEENPINASGVDAKAILSARLSKSRRLENLIAQLPGEKKNGLFGNLIALSLGLTPNFKSNFDLAEDAKLQLSKDTYDDDLDNLLAQIGDQYADLFLAAKNLSDAILLSDILRVNTEITKAPLSASMIKRYDEHHQDLTLLKALVRQQLPEKYKEIFFDQSKNGYAGYIDGGASQEEFYKFIKPILEKMDGTEELLVKLNREDLLRKQRTFDNGSIPHQIHLGELHAILRRQEDFYPFLKDNREKIEKILTFRIPYYVGPLARGNSRFAWMTRKSEETITPWNFEEVVDKGASAQSFIERMTNFDKNLPNEKVLPKHSLLYEYFTVYNELTKVKYVTEGMRKPAFLSGEQKKAIVDLLFKTNRKVTVKQLKEDYFKKIECFDSVEISGVEDRFNASLGTYHDLLKIIKDKDFLDNEENEDILEDIVLTLTLFEDREMIEERLKTYAHLFDDKVMKQLKRRRYTGWGRLSRKLINGIRDKQSGKTILDFLKSDGFANRNFMQLIHDDSLTFKEDIQKAQVSGQGDSLHEHIANLAGSPAIKKGILQTVKVVDELVKVMGRHKPENIVIEMARENQTTQKGQKNSRERMKRIEEGIKELGSQILKEHPVENTQLQNEKLYLYYLQNGRDMYVDQELDINRLSDYDVDHIVPQSFLKDDSIDNKVLTRSDKARGKSDNVPSEEVVKKMKNYWRQLLNAKLITQRKFDNLTKAERGGLSELDKAGFIKRQLVETRQITKHVAQILDSRMNTKYDENDKLIREVKVITLKSKLVSDFRKDFQFYKVREINNYHHAHDAYLNAVVGTALIKKYPKLESEFVYGDYKVYDVRKMIAKSEQEIGKATAKYFFYSNIMNFFKTEITLANGEIRKRPLIETNGETGEIVWDKGRDFATVRKVLSMPQVNIVKKTEVQTGGFSKESILPKRNSDKLIARKKDWDPKKYGGFDSPTVAYSVLVVAKVEKGKSKKLKSVKELLGITIMERSSFEKNPIDFLEAKGYKEVKKDLIIKLPKYSLFELENGRKRMLASAGELQKGNELALPSKYVNFLYLASHYEKLKGSPEDNEQKQLFVEQHKHYLDEIIEQISEFSKRVILADANLDKVLSAYNKHRDKPIREQAENIIHLFTLTNLGAPAAFKYFDTTIDRKRYTSTKEVLDATLIHQSITGLYETRIDLSQLGGDGGPAPAPAPAPAPGGVLNLEEEYRLHEKPVPSSIDPSWLQLFPTVWAERAGMGLANQVPPVVVELRSGASPVAVRQYPMSKEAREGIRPHIQKFLDLGVLVPCRSPWNTPLLPVKKPGTNDYRPVQDLREINKRVQDIHPTVPNPYNLLSSLPPSYTWYSVLDLKDAFFCLRLHPNSQPLFAFEWKDPEKGNTGQLTWTRLPQGFKNSPTLFNEALHRDLAPFRALNPQVVLLQYVDDLLVAAPTYEDCKKGTQKLLQELSKLGYRVSAKKAQLCQREVTYLGYLLKEGKRWLTPARKATVMKIPVPTTPRQVREFLGKAGFCRLFIPGFASLAAPLYPLTKPSIPFIWTEEHQQAFDHIKKALLSAPALALPDLTKPFTLYIDERAGVARGVLTQTLGPWRRPVAYLSKKLDPVASGWPTCLKAVAAVALLLKDADKLTLGQNVTVIASHSLESIVRQPPDRWMTNARMTHYQSLLLNERVSFAPPAVLNPATLLPVESEATPVHRCSEILAEETGTRRDLEDQPLPGVPTWYTDGSSFITEGKRRAGAPIVDGKRTVWASSLPEGTSAQKAELVALTQALRLAEGKNINIYTDSRYAFATAHIHGAIYKQRGWLTSAGKDIKNKEEILALLEAIHLPRRVAIIHCPGHQRGSNPVATGNRRADEAAKQAALSTRVLAGTTKPAGKRTADGSEFEKRTADGSEFESPKKKAKVE

SEQ ID NO: 1454 - protein, 2113 aa, synthetic construct
MPAAKRVKLDGGDKKYSIGLDIGTNSVGWAVITDEYKVPSKKFKVLGNTDRHSIKKNLIGALLFDSGETAEATRLKRTARRRYTRRKNRICYLQEIFSNEMAKVDDSFFHRLEESFLVEEDKKHERHPIFGNIVDEVAYHEKYPTIYHLRKKLVDSTDKADLRLIYLALAHMIKFRGHFLIEGDLNPDNSDVDKLFIQLVQTYNQLFEENPINASGVDAKAILSARLSKSRRLENLIAQLPGEKKNGLFGNLIALSLGLTPNFKSNFDLAEDAKLQLSKDTYDDDLDNLLAQIGDQYADLFLAAKNLSDAILLSDILRVNTEITKAPLSASMIKRYDEHHQDLTLLKALVRQQLPEKYKEIFFDQSKNGYAGYIDGGASQEEFYKFIKPILEKMDGTEELLVKLNREDLLRKQRTFDNGSIPHQIHLGELHAILRRQEDFYPFLKDNREKIEKILTFRIPYYVGPLARGNSRFAWMTRKSEETITPWNFEEVVDKGASAQSFIERMTNFDKNLPNEKVLPKHSLLYEYFTVYNELTKVKYVTEGMRKPAFLSGEQKKAIVDLLFKTNRKVTVKQLKEDYFKKIECFDSVEISGVEDRFNASLGTYHDLLKIIKDKDFLDNEENEDILEDIVLTLTLFEDREMIEERLKTYAHLFDDKVMKQLKRRRYTGWGRLSRKLINGIRDKQSGKTILDFLKSDGFANRNFMQLIHDDSLTFKEDIQKAQVSGQGDSLHEHIANLAGSPAIKKGILQTVKVVDELVKVMGRHKPENIVIEMARENQTTQKGQKNSRERMKRIEEGIKELGSQILKEHPVENTQLQNEKLYLYYLQNGRDMYVDQELDINRLSDYDVDHIVPQSFLKDDSIDNKVLTRSDKARGKSDNVPSEEVVKKMKNYWRQLLNAKLITQRKFDNLTKAERGGLSELDKAGFIKRQLVETRQITKHVAQILDSRMNTKYDENDKLIREVKVITLKSKLVSDFRKDFQFYKVREINNYHHAHDAYLNAVVGTALIKKYPKLESEFVYGDYKVYDVRKMIAKSEQEIGKATAKYFFYSNIMNFFKTEITLANGEIRKRPLIETNGETGEIVWDKGRDFATVRKVLSMPQVNIVKKTEVQTGGFSKESILPKRNSDKLIARKKDWDPKKYGGFDSPTVAYSVLVVAKVEKGKSKKLKSVKELLGITIMERSSFEKNPIDFLEAKGYKEVKKDLIIKLPKYSLFELENGRKRMLASAGELQKGNELALPSKYVNFLYLASHYEKLKGSPEDNEQKQLFVEQHKHYLDEIIEQISEFSKRVILADANLDKVLSAYNKHRDKPIREQAENIIHLFTLTNLGAPAAFKYFDTTIDRKRYTSTKEVLDATLIHQSITGLYETRIDLSQLGGDGGEAAAKEAAAKEAAAKEAAAKEAAAKEAAAKGGVLNLEEEYRLHEKPVPSSIDPSWLQLFPTVWAERAGMGLANQVPPVVVELRSGASPVAVRQYPMSKEAREGIRPHIQKFLDLGVLVPCRSPWNTPLLPVKKPGTNDYRPVQDLREINKRVQDIHPTVPNPYNLLSSLPPSYTWYSVLDLKDAFFCLRLHPNSQPLFAFEWKDPEKGNTGQLTWTRLPQGFKNSPTLFNEALHRDLAPFRALNPQVVLLQYVDDLLVAAPTYEDCKKGTQKLLQELSKLGYRVSAKKAQLCQREVTYLGYLLKEGKRWLTPARKATVMKIPVPTTPRQVREFLGKAGFCRLFIPGFASLAAPLYPLTKPSIPFIWTEEHQQAFDHIKKALLSAPALALPDLTKPFTLYIDERAGVARGVLTQTLGPWRRPVAYLSKKLDPVASGWPTCLKAVAAVALLLKDADKLTLGQNVTVIASHSLESIVRQPPDRWMTNARMTHYQSLLLNERVSFAPPAVLNPATLLPVESEATPVHRCSEILAEETGTRRDLEDQPLPGVPTWYTDGSSFITEGKRRAGAPIVDGKRTVWASSLPEGTSAQKAELVALTQALRLAEGKNINIYTDSRYAFATAHIHGAIYKQRGWLTSAGKDIKNKEEILALLEAIHLPRRVAIIHCPGHQRGSNPVATGNRRADEAAKQAALSTRVLAGTTKPAGKRTADGSEFEKRTADGSEFESPKKKAKVE

SEQ ID NO: 1455 - protein, 2094 aa, synthetic construct
MPAAKRVKLDGGDKKYSIGLDIGTNSVGWAVITDEYKVPSKKFKVLGNTDRHSIKKNLIGALLFDSGETAEATRLKRTARRRYTRRKNRICYLQEIFSNEMAKVDDSFFHRLEESFLVEEDKKHERHPIFGNIVDEVAYHEKYPTIYHLRKKLVDSTDKADLRLIYLALAHMIKFRGHFLIEGDLNPDNSDVDKLFIQLVQTYNQLFEENPINASGVDAKAILSARLSKSRRLENLIAQLPGEKKNGLFGNLIALSLGLTPNFKSNFDLAEDAKLQLSKDTYDDDLDNLLAQIGDQYADLFLAAKNLSDAILLSDILRVNTEITKAPLSASMIKRYDEHHQDLTLLKALVRQQLPEKYKEIFFDQSKNGYAGYIDGGASQEEFYKFIKPILEKMDGTEELLVKLNREDLLRKQRTFDNGSIPHQIHLGELHAILRRQEDFYPFLKDNREKIEKILTFRIPYYVGPLARGNSRFAWMTRKSEETITPWNFEEVVDKGASAQSFIERMTNFDKNLPNEKVLPKHSLLYEYFTVYNELTKVKYVTEGMRKPAFLSGEQKKAIVDLLFKTNRKVTVKQLKEDYFKKIECFDSVEISGVEDRFNASLGTYHDLLKIIKDKDFLDNEENEDILEDIVLTLTLFEDREMIEERLKTYAHLFDDKVMKQLKRRRYTGWGRLSRKLINGIRDKQSGKTILDFLKSDGFANRNFMQLIHDDSLTFKEDIQKAQVSGQGDSLHEHIANLAGSPAIKKGILQTVKVVDELVKVMGRHKPENIVIEMARENQTTQKGQKNSRERMKRIEEGIKELGSQILKEHPVENTQLQNEKLYLYYLQNGRDMYVDQELDINRLSDYDVDHIVPQSFLKDDSIDNKVLTRSDKARGKSDNVPSEEVVKKMKNYWRQLLNAKLITQRKFDNLTKAERGGLSELDKAGFIKRQLVETRQITKHVAQILDSRMNTKYDENDKLIREVKVITLKSKLVSDFRKDFQFYKVREINNYHHAHDAYLNAVVGTALIKKYPKLESEFVYGDYKVYDVRKMIAKSEQEIGKATAKYFFYSNIMNFFKTEITLANGEIRKRPLIETNGETGEIVWDKGRDFATVRKVLSMPQVNIVKKTEVQTGGFSKESILPKRNSDKLIARKKDWDPKKYGGFDSPTVAYSVLVVAKVEKGKSKKLKSVKELLGITIMERSSFEKNPIDFLEAKGYKEVKKDLIIKLPKYSLFELENGRKRMLASAGELQKGNELALPSKYVNFLYLASHYEKLKGSPEDNEQKQLFVEQHKHYLDEIIEQISEFSKRVILADANLDKVLSAYNKHRDKPIREQAENIIHLFTLTNLGAPAAFKYFDTTIDRKRYTSTKEVLDATLIHQSITGLYETRIDLSQLGGDGGEAAAKGGGGSSGGVLNLEEEYRLHEKPVPSSIDPSWLQLFPTVWAERAGMGLANQVPPVVVELRSGASPVAVRQYPMSKEAREGIRPHIQKFLDLGVLVPCRSPWNTPLLPVKKPGTNDYRPVQDLREINKRVQDIHPTVPNPYNLLSSLPPSYTWYSVLDLKDAFFCLRLHPNSQPLFAFEWKDPEKGNTGQLTWTRLPQGFKNSPTLFNEALHRDLAPFRALNPQVVLLQYVDDLLVAAPTYEDCKKGTQKLLQELSKLGYRVSAKKAQLCQREVTYLGYLLKEGKRWLTPARKATVMKIPVPTTPRQVREFLGKAGFCRLFIPGFASLAAPLYPLTKPSIPFIWTEEHQQAFDHIKKALLSAPALALPDLTKPFTLYIDERAGVARGVLTQTLGPWRRPVAYLSKKLDPVASGWPTCLKAVAAVALLLKDADKLTLGQNVTVIASHSLESIVRQPPDRWMTNARMTHYQSLLLNERVSFAPPAVLNPATLLPVESEATPVHRCSEILAEETGTRRDLEDQPLPGVPTWYTDGSSFITEGKRRAGAPIVDGKRTVWASSLPEGTSAQKAELVALTQALRLAEGKNINIYTDSRYAFATAHIHGAIYKQRGWLTSAGKDIKNKEEILALLEAIHLPRRVAIIHCPGHQRGSNPVATGNRRADEAAKQAALSTRVLAGTTKPAGKRTADGSEFEKRTADGSEFESPKKKAKVE

SEQ ID NO: 1456 - protein, 2094 aa, synthetic construct
MPAAKRVKLDGGDKKYSIGLDIGTNSVGWAVITDEYKVPSKKFKVLGNTDRHSIKKNLIGALLFDSGETAEATRLKRTARRRYTRRKNRICYLQEIFSNEMAKVDDSFFHRLEESFLVEEDKKHERHPIFGNIVDEVAYHEKYPTIYHLRKKLVDSTDKADLRLIYLALAHMIKFRGHFLIEGDLNPDNSDVDKLFIQLVQTYNQLFEENPINASGVDAKAILSARLSKSRRLENLIAQLPGEKKNGLFGNLIALSLGLTPNFKSNFDLAEDAKLQLSKDTYDDDLDNLLAQIGDQYADLFLAAKNLSDAILLSDILRVNTEITKAPLSASMIKRYDEHHQDLTLLKALVRQQLPEKYKEIFFDQSKNGYAGYIDGGASQEEFYKFIKPILEKMDGTEELLVKLNREDLLRKQRTFDNGSIPHQIHLGELHAILRRQEDFYPFLKDNREKIEKILTFRIPYYVGPLARGNSRFAWMTRKSEETITPWNFEEVVDKGASAQSFIERMTNFDKNLPNEKVLPKHSLLYEYFTVYNELTKVKYVTEGMRKPAFLSGEQKKAIVDLLFKTNRKVTVKQLKEDYFKKIECFDSVEISGVEDRFNASLGTYHDLLKIIKDKDFLDNEENEDILEDIVLTLTLFEDREMIEERLKTYAHLFDDKVMKQLKRRRYTGWGRLSRKLINGIRDKQSGKTILDFLKSDGFANRNFMQLIHDDSLTFKEDIQKAQVSGQGDSLHEHIANLAGSPAIKKGILQTVKVVDELVKVMGRHKPENIVIEMARENQTTQKGQKNSRERMKRIEEGIKELGSQILKEHPVENTQLQNEKLYLYYLQNGRDMYVDQELDINRLSDYDVDHIVPQSFLKDDSIDNKVLTRSDKARGKSDNVPSEEVVKKMKNYWRQLLNAKLITQRKFDNLTKAERGGLSELDKAGFIKRQLVETRQITKHVAQILDSRMNTKYDENDKLIREVKVITLKSKLVSDFRKDFQFYKVREINNYHHAHDAYLNAVVGTALIKKYPKLESEFVYGDYKVYDVRKMIAKSEQEIGKATAKYFFYSNIMNFFKTEITLANGEIRKRPLIETNGETGEIVWDKGRDFATVRKVLSMPQVNIVKKTEVQTGGFSKESILPKRNSDKLIARKKDWDPKKYGGFDSPTVAYSVLVVAKVEKGKSKKLKSVKELLGITIMERSSFEKNPIDFLEAKGYKEVKKDLIIKLPKYSLFELENGRKRMLASAGELQKGNELALPSKYVNFLYLASHYEKLKGSPEDNEQKQLFVEQHKHYLDEIIEQISEFSKRVILADANLDKVLSAYNKHRDKPIREQAENIIHLFTLTNLGAPAAFKYFDTTIDRKRYTSTKEVLDATLIHQSITGLYETRIDLSQLGGDGGGGGGGSEAAAKGGVLNLEEEYRLHEKPVPSSIDPSWLQLFPTVWAERAGMGLANQVPPVVVELRSGASPVAVRQYPMSKEAREGIRPHIQKFLDLGVLVPCRSPWNTPLLPVKKPGTNDYRPVQDLREINKRVQDIHPTVPNPYNLLSSLPPSYTWYSVLDLKDAFFCLRLHPNSQPLFAFEWKDPEKGNTGQLTWTRLPQGFKNSPTLFNEALHRDLAPFRALNPQVVLLQYVDDLLVAAPTYEDCKKGTQKLLQELSKLGYRVSAKKAQLCQREVTYLGYLLKEGKRWLTPARKATVMKIPVPTTPRQVREFLGKAGFCRLFIPGFASLAAPLYPLTKPSIPFIWTEEHQQAFDHIKKALLSAPALALPDLTKPFTLYIDERAGVARGVLTQTLGPWRRPVAYLSKKLDPVASGWPTCLKAVAAVALLLKDADKLTLGQNVTVIASHSLESIVRQPPDRWMTNARMTHYQSLLLNERVSFAPPAVLNPATLLPVESEATPVHRCSEILAEETGTRRDLEDQPLPGVPTWYTDGSSFITEGKRRAGAPIVDGKRTVWASSLPEGTSAQKAELVALTQALRLAEGKNINIYTDSRYAFATAHIHGAIYKQRGWLTSAGKDIKNKEEILALLEAIHLPRRVAIIHCPGHQRGSNPVATGNRRADEAAKQAALSTRVLAGTTKPAGKRTADGSEFEKRTADGSEFESPKKKAKVE

SEQ ID NO: 1457 - protein, 2094 aa, synthetic construct
MPAAKRVKLDGGDKKYSIGLDIGTNSVGWAVITDEYKVPSKKFKVLGNTDRHSIKKNLIGALLFDSGETAEATRLKRTARRRYTRRKNRICYLQEIFSNEMAKVDDSFFHRLEESFLVEEDKKHERHPIFGNIVDEVAYHEKYPTIYHLRKKLVDSTDKADLRLIYLALAHMIKFRGHFLIEGDLNPDNSDVDKLFIQLVQTYNQLFEENPINASGVDAKAILSARLSKSRRLENLIAQLPGEKKNGLFGNLIALSLGLTPNFKSNFDLAEDAKLQLSKDTYDDDLDNLLAQIGDQYADLFLAAKNLSDAILLSDILRVNTEITKAPLSASMIKRYDEHHQDLTLLKALVRQQLPEKYKEIFFDQSKNGYAGYIDGGASQEEFYKFIKPILEKMDGTEELLVKLNREDLLRKQRTFDNGSIPHQIHLGELHAILRRQEDFYPFLKDNREKIEKILTFRIPYYVGPLARGNSRFAWMTRKSEETITPWNFEEVVDKGASAQSFIERMTNFDKNLPNEKVLPKHSLLYEYFTVYNELTKVKYVTEGMRKPAFLSGEQKKAIVDLLFKTNRKVTVKQLKEDYFKKIECFDSVEISGVEDRFNASLGTYHDLLKIIKDKDFLDNEENEDILEDIVLTLTLFEDREMIEERLKTYAHLFDDKVMKQLKRRRYTGWGRLSRKLINGIRDKQSGKTILDFLKSDGFANRNFMQLIHDDSLTFKEDIQKAQVSGQGDSLHEHIANLAGSPAIKKGILQTVKVVDELVKVMGRHKPENIVIEMARENQTTQKGQKNSRERMKRIEEGIKELGSQILKEHPVENTQLQNEKLYLYYLQNGRDMYVDQELDINRLSDYDVDHIVPQSFLKDDSIDNKVLTRSDKARGKSDNVPSEEVVKKMKNYWRQLLNAKLITQRKFDNLTKAERGGLSELDKAGFIKRQLVETRQITKHVAQILDSRMNTKYDENDKLIREVKVITLKSKLVSDFRKDFQFYKVREINNYHHAHDAYLNAVVGTALIKKYPKLESEFVYGDYKVYDVRKMIAKSEQEIGKATAKYFFYSNIMNFFKTEITLANGEIRKRPLIETNGETGEIVWDKGRDFATVRKVLSMPQVNIVKKTEVQTGGFSKESILPKRNSDKLIARKKDWDPKKYGGFDSPTVAYSVLVVAKVEKGKSKKLKSVKELLGITIMERSSFEKNPIDFLEAKGYKEVKKDLIIKLPKYSLFELENGRKRMLASAGELQKGNELALPSKYVNFLYLASHYEKLKGSPEDNEQKQLFVEQHKHYLDEIIEQISEFSKRVILADANLDKVLSAYNKHRDKPIREQAENIIHLFTLTNLGAPAAFKYFDTTIDRKRYTSTKEVLDATLIHQSITGLYETRIDLSQLGGDGGGSSPAPEAAAKGGVLNLEEEYRLHEKPVPSSIDPSWLQLFPTVWAERAGMGLANQVPPVVVELRSGASPVAVRQYPMSKEAREGIRPHIQKFLDLGVLVPCRSPWNTPLLPVKKPGTNDYRPVQDLREINKRVQDIHPTVPNPYNLLSSLPPSYTWYSVLDLKDAFFCLRLHPNSQPLFAFEWKDPEKGNTGQLTWTRLPQGFKNSPTLFNEALHRDLAPFRALNPQVVLLQYVDDLLVAAPTYEDCKKGTQKLLQELSKLGYRVSAKKAQLCQREVTYLGYLLKEGKRWLTPARKATVMKIPVPTTPRQVREFLGKAGFCRLFIPGFASLAAPLYPLTKPSIPFIWTEEHQQAFDHIKKALLSAPALALPDLTKPFTLYIDERAGVARGVLTQTLGPWRRPVAYLSKKLDPVASGWPTCLKAVAAVALLLKDADKLTLGQNVTVIASHSLESIVRQPPDRWMTNARMTHYQSLLLNERVSFAPPAVLNPATLLPVESEATPVHRCSEILAEETGTRRDLEDQPLPGVPTWYTDGSSFITEGKRRAGAPIVDGKRTVWASSLPEGTSAQKAELVALTQALRLAEGKNINIYTDSRYAFATAHIHGAIYKQRGWLTSAGKDIKNKEEILALLEAIHLPRRVAIIHCPGHQRGSNPVATGNRRADEAAKQAALSTRVLAGTTKPAGKRTADGSEFEKRTADGSEFESPKKKAKVE

SEQ ID NO: 1458 - protein, 2098 aa, synthetic construct
MPAAKRVKLDGGDKKYSIGLDIGTNSVGWAVITDEYKVPSKKFKVLGNTDRHSIKKNLIGALLFDSGETAEATRLKRTARRRYTRRKNRICYLQEIFSNEMAKVDDSFFHRLEESFLVEEDKKHERHPIFGNIVDEVAYHEKYPTIYHLRKKLVDSTDKADLRLIYLALAHMIKFRGHFLIEGDLNPDNSDVDKLFIQLVQTYNQLFEENPINASGVDAKAILSARLSKSRRLENLIAQLPGEKKNGLFGNLIALSLGLTPNFKSNFDLAEDAKLQLSKDTYDDDLDNLLAQIGDQYADLFLAAKNLSDAILLSDILRVNTEITKAPLSASMIKRYDEHHQDLTLLKALVRQQLPEKYKEIFFDQSKNGYAGYIDGGASQEEFYKFIKPILEKMDGTEELLVKLNREDLLRKQRTFDNGSIPHQIHLGELHAILRRQEDFYPFLKDNREKIEKILTFRIPYYVGPLARGNSRFAWMTRKSEETITPWNFEEVVDKGASAQSFIERMTNFDKNLPNEKVLPKHSLLYEYFTVYNELTKVKYVTEGMRKPAFLSGEQKKAIVDLLFKTNRKVTVKQLKEDYFKKIECFDSVEISGVEDRFNASLGTYHDLLKIIKDKDFLDNEENEDILEDIVLTLTLFEDREMIEERLKTYAHLFDDKVMKQLKRRRYTGWGRLSRKLINGIRDKQSGKTILDFLKSDGFANRNFMQLIHDDSLTFKEDIQKAQVSGQGDSLHEHIANLAGSPAIKKGILQTVKVVDELVKVMGRHKPENIVIEMARENQTTQKGQKNSRERMKRIEEGIKELGSQILKEHPVENTQLQNEKLYLYYLQNGRDMYVDQELDINRLSDYDVDHIVPQSFLKDDSIDNKVLTRSDKARGKSDNVPSEEVVKKMKNYWRQLLNAKLITQRKFDNLTKAERGGLSELDKAGFIKRQLVETRQITKHVAQILDSRMNTKYDENDKLIREVKVITLKSKLVSDFRKDFQFYKVREINNYHHAHDAYLNAVVGTALIKKYPKLESEFVYGDYKVYDVRKMIAKSEQEIGKATAKYFFYSNIMNFFKTEITLANGEIRKRPLIETNGETGEIVWDKGRDFATVRKVLSMPQVNIVKKTEVQTGGFSKESILPKRNSDKLIARKKDWDPKKYGGFDSPTVAYSVLVVAKVEKGKSKKLKSVKELLGITIMERSSFEKNPIDFLEAKGYKEVKKDLIIKLPKYSLFELENGRKRMLASAGELQKGNELALPSKYVNFLYLASHYEKLKGSPEDNEQKQLFVEQHKHYLDEIIEQISEFSKRVILADANLDKVLSAYNKHRDKPIREQAENIIHLFTLTNLGAPAAFKYFDTTIDRKRYTSTKEVLDATLIHQSITGLYETRIDLSQLGGDGGGGGGSGGGGSGGGGSGGVLNLEEEYRLHEKPVPSSIDPSWLQLFPTVWAERAGMGLANQVPPVVVELRSGASPVAVRQYPMSKEAREGIRPHIQKFLDLGVLVPCRSPWNTPLLPVKKPGTNDYRPVQDLREINKRVQDIHPTVPNPYNLLSSLPPSYTWYSVLDLKDAFFCLRLHPNSQPLFAFEWKDPEKGNTGQLTWTRLPQGFKNSPTLFNEALHRDLAPFRALNPQVVLLQYVDDLLVAAPTYEDCKKGTQKLLQELSKLGYRVSAKKAQLCQREVTYLGYLLKEGKRWLTPARKATVMKIPVPTTPRQVREFLGKAGFCRLFIPGFASLAAPLYPLTKPSIPFIWTEEHQQAFDHIKKALLSAPALALPDLTKPFTLYIDERAGVARGVLTQTLGPWRRPVAYLSKKLDPVASGWPTCLKAVAAVALLLKDADKLTLGQNVTVIASHSLESIVRQPPDRWMTNARMTHYQSLLLNERVSFAPPAVLNPATLLPVESEATPVHRCSEILAEETGTRRDLEDQPLPGVPTWYTDGSSFITEGKRRAGAPIVDGKRTVWASSLPEGTSAQKAELVALTQALRLAEGKNINIYTDSRYAFATAHIHGAIYKQRGWLTSAGKDIKNKEEILALLEAIHLPRRVAIIHCPGHQRGSNPVATGNRRADEAAKQAALSTRVLAGTTKPAGKRTADGSEFEKRTADGSEFESPKKKAKVE

SEQ ID NO: 1459 - protein, 2094 aa, synthetic construct
MPAAKRVKLDGGDKKYSIGLDIGTNSVGWAVITDEYKVPSKKFKVLGNTDRHSIKKNLIGALLFDSGETAEATRLKRTARRRYTRRKNRICYLQEIFSNEMAKVDDSFFHRLEESFLVEEDKKHERHPIFGNIVDEVAYHEKYPTIYHLRKKLVDSTDKADLRLIYLALAHMIKFRGHFLIEGDLNPDNSDVDKLFIQLVQTYNQLFEENPINASGVDAKAILSARLSKSRRLENLIAQLPGEKKNGLFGNLIALSLGLTPNFKSNFDLAEDAKLQLSKDTYDDDLDNLLAQIGDQYADLFLAAKNLSDAILLSDILRVNTEITKAPLSASMIKRYDEHHQDLTLLKALVRQQLPEKYKEIFFDQSKNGYAGYIDGGASQEEFYKFIKPILEKMDGTEELLVKLNREDLLRKQRTFDNGSIPHQIHLGELHAILRRQEDFYPFLKDNREKIEKILTFRIPYYVGPLARGNSRFAWMTRKSEETITPWNFEEVVDKGASAQSFIERMTNFDKNLPNEKVLPKHSLLYEYFTVYNELTKVKYVTEGMRKPAFLSGEQKKAIVDLLFKTNRKVTVKQLKEDYFKKIECFDSVEISGVEDRFNASLGTYHDLLKIIKDKDFLDNEENEDILEDIVLTLTLFEDREMIEERLKTYAHLFDDKVMKQLKRRRYTGWGRLSRKLINGIRDKQSGKTILDFLKSDGFANRNFMQLIHDDSLTFKEDIQKAQVSGQGDSLHEHIANLAGSPAIKKGILQTVKVVDELVKVMGRHKPENIVIEMARENQTTQKGQKNSRERMKRIEEGIKELGSQILKEHPVENTQLQNEKLYLYYLQNGRDMYVDQELDINRLSDYDVDHIVPQSFLKDDSIDNKVLTRSDKARGKSDNVPSEEVVKKMKNYWRQLLNAKLITQRKFDNLTKAERGGLSELDKAGFIKRQLVETRQITKHVAQILDSRMNTKYDENDKLIREVKVITLKSKLVSDFRKDFQFYKVREINNYHHAHDAYLNAVVGTALIKKYPKLESEFVYGDYKVYDVRKMIAKSEQEIGKATAKYFFYSNIMNFFKTEITLANGEIRKRPLIETNGETGEIVWDKGRDFATVRKVLSMPQVNIVKKTEVQTGGFSKESILPKRNSDKLIARKKDWDPKKYGGFDSPTVAYSVLVVAKVEKGKSKKLKSVKELLGITIMERSSFEKNPIDFLEAKGYKEVKKDLIIKLPKYSLFELENGRKRMLASAGELQKGNELALPSKYVNFLYLASHYEKLKGSPEDNEQKQLFVEQHKHYLDEIIEQISEFSKRVILADANLDKVLSAYNKHRDKPIREQAENIIHLFTLTNLGAPAAFKYFDTTIDRKRYTSTKEVLDATLIHQSITGLYETRIDLSQLGGDGGPAPGGGEAAAKGGVLNLEEEYRLHEKPVPSSIDPSWLQLFPTVWAERAGMGLANQVPPVVVELRSGASPVAVRQYPMSKEAREGIRPHIQKFLDLGVLVPCRSPWNTPLLPVKKPGTNDYRPVQDLREINKRVQDIHPTVPNPYNLLSSLPPSYTWYSVLDLKDAFFCLRLHPNSQPLFAFEWKDPEKGNTGQLTWTRLPQGFKNSPTLFNEALHRDLAPFRALNPQVVLLQYVDDLLVAAPTYEDCKKGTQKLLQELSKLGYRVSAKKAQLCQREVTYLGYLLKEGKRWLTPARKATVMKIPVPTTPRQVREFLGKAGFCRLFIPGFASLAAPLYPLTKPSIPFIWTEEHQQAFDHIKKALLSAPALALPDLTKPFTLYIDERAGVARGVLTQTLGPWRRPVAYLSKKLDPVASGWPTCLKAVAAVALLLKDADKLTLGQNVTVIASHSLESIVRQPPDRWMTNARMTHYQSLLLNERVSFAPPAVLNPATLLPVESEATPVHRCSEILAEETGTRRDLEDQPLPGVPTWYTDGSSFITEGKRRAGAPIVDGKRTVWASSLPEGTSAQKAELVALTQALRLAEGKNINIYTDSRYAFATAHIHGAIYKQRGWLTSAGKDIKNKEEILALLEAIHLPRRVAIIHCPGHQRGSNPVATGNRRADEAAKQAALSTRVLAGTTKPAGKRTADGSEFEKRTADGSEFESPKKKAKVE

SEQ ID NO: 1460 - protein, 2092 aa, synthetic construct
MPAAKRVKLDGGDKKYSIGLDIGTNSVGWAVITDEYKVPSKKFKVLGNTDRHSIKKNLIGALLFDSGETAEATRLKRTARRRYTRRKNRICYLQEIFSNEMAKVDDSFFHRLEESFLVEEDKKHERHPIFGNIVDEVAYHEKYPTIYHLRKKLVDSTDKADLRLIYLALAHMIKFRGHFLIEGDLNPDNSDVDKLFIQLVQTYNQLFEENPINASGVDAKAILSARLSKSRRLENLIAQLPGEKKNGLFGNLIALSLGLTPNFKSNFDLAEDAKLQLSKDTYDDDLDNLLAQIGDQYADLFLAAKNLSDAILLSDILRVNTEITKAPLSASMIKRYDEHHQDLTLLKALVRQQLPEKYKEIFFDQSKNGYAGYIDGGASQEEFYKFIKPILEKMDGTEELLVKLNREDLLRKQRTFDNGSIPHQIHLGELHAILRRQEDFYPFLKDNREKIEKILTFRIPYYVGPLARGNSRFAWMTRKSEETITPWNFEEVVDKGASAQSFIERMTNFDKNLPNEKVLPKHSLLYEYFTVYNELTKVKYVTEGMRKPAFLSGEQKKAIVDLLFKTNRKVTVKQLKEDYFKKIECFDSVEISGVEDRFNASLGTYHDLLKIIKDKDFLDNEENEDILEDIVLTLTLFEDREMIEERLKTYAHLFDDKVMKQLKRRRYTGWGRLSRKLINGIRDKQSGKTILDFLKSDGFANRNFMQLIHDDSLTFKEDIQKAQVSGQGDSLHEHIANLAGSPAIKKGILQTVKVVDELVKVMGRHKPENIVIEMARENQTTQKGQKNSRERMKRIEEGIKELGSQILKEHPVENTQLQNEKLYLYYLQNGRDMYVDQELDINRLSDYDVDHIVPQSFLKDDSIDNKVLTRSDKARGKSDNVPSEEVVKKMKNYWRQLLNAKLITQRKFDNLTKAERGGLSELDKAGFIKRQLVETRQITKHVAQILDSRMNTKYDENDKLIREVKVITLKSKLVSDFRKDFQFYKVREINNYHHAHDAYLNAVVGTALIKKYPKLESEFVYGDYKVYDVRKMIAKSEQEIGKATAKYFFYSNIMNFFKTEITLANGEIRKRPLIETNGETGEIVWDKGRDFATVRKVLSMPQVNIVKKTEVQTGGFSKESILPKRNSDKLIARKKDWDPKKYGGFDSPTVAYSVLVVAKVEKGKSKKLKSVKELLGITIMERSSFEKNPIDFLEAKGYKEVKKDLIIKLPKYSLFELENGRKRMLASAGELQKGNELALPSKYVNFLYLASHYEKLKGSPEDNEQKQLFVEQHKHYLDEIIEQISEFSKRVILADANLDKVLSAYNKHRDKPIREQAENIIHLFTLTNLGAPAAFKYFDTTIDRKRYTSTKEVLDATLIHQSITGLYETRIDLSQLGGDGGPAPGGGGGSGGVLNLEEEYRLHEKPVPSSIDPSWLQLFPTVWAERAGMGLANQVPPVVVELRSGASPVAVRQYPMSKEAREGIRPHIQKFLDLGVLVPCRSPWNTPLLPVKKPGTNDYRPVQDLREINKRVQDIHPTVPNPYNLLSSLPPSYTWYSVLDLKDAFFCLRLHPNSQPLFAFEWKDPEKGNTGQLTWTRLPQGFKNSPTLFNEALHRDLAPFRALNPQVVLLQYVDDLLVAAPTYEDCKKGTQKLLQELSKLGYRVSAKKAQLCQREVTYLGYLLKEGKRWLTPARKATVMKIPVPTTPRQVREFLGKAGFCRLFIPGFASLAAPLYPLTKPSIPFIWTEEHQQAFDHIKKALLSAPALALPDLTKPFTLYIDERAGVARGVLTQTLGPWRRPVAYLSKKLDPVASGWPTCLKAVAAVALLLKDADKLTLGQNVTVIASHSLESIVRQPPDRWMTNARMTHYQSLLLNERVSFAPPAVLNPATLLPVESEATPVHRCSEILAEETGTRRDLEDQPLPGVPTWYTDGSSFITEGKRRAGAPIVDGKRTVWASSLPEGTSAQKAELVALTQALRLAEGKNINIYTDSRYAFATAHIHGAIYKQRGWLTSAGKDIKNKEEILALLEAIHLPRRVAIIHCPGHQRGSNPVATGNRRADEAAKQAALSTRVLAGTTKPAGKRTADGSEFEKRTADGSEFESPKKKAKVE

SEQ ID NO: 1461 - protein, 2094 aa, synthetic construct
MPAAKRVKLDGGDKKYSIGLDIGTNSVGWAVITDEYKVPSKKFKVLGNTDRHSIKKNLIGALLFDSGETAEATRLKRTARRRYTRRKNRICYLQEIFSNEMAKVDDSFFHRLEESFLVEEDKKHERHPIFGNIVDEVAYHEKYPTIYHLRKKLVDSTDKADLRLIYLALAHMIKFRGHFLIEGDLNPDNSDVDKLFIQLVQTYNQLFEENPINASGVDAKAILSARLSKSRRLENLIAQLPGEKKNGLFGNLIALSLGLTPNFKSNFDLAEDAKLQLSKDTYDDDLDNLLAQIGDQYADLFLAAKNLSDAILLSDILRVNTEITKAPLSASMIKRYDEHHQDLTLLKALVRQQLPEKYKEIFFDQSKNGYAGYIDGGASQEEFYKFIKPILEKMDGTEELLVKLNREDLLRKQRTFDNGSIPHQIHLGELHAILRRQEDFYPFLKDNREKIEKILTFRIPYYVGPLARGNSRFAWMTRKSEETITPWNFEEVVDKGASAQSFIERMTNFDKNLPNEKVLPKHSLLYEYFTVYNELTKVKYVTEGMRKPAFLSGEQKKAIVDLLFKTNRKVTVKQLKEDYFKKIECFDSVEISGVEDRFNASLGTYHDLLKIIKDKDFLDNEENEDILEDIVLTLTLFEDREMIEERLKTYAHLFDDKVMKQLKRRRYTGWGRLSRKLINGIRDKQSGKTILDFLKSDGFANRNFMQLIHDDSLTFKEDIQKAQVSGQGDSLHEHIANLAGSPAIKKGILQTVKVVDELVKVMGRHKPENIVIEMARENQTTQKGQKNSRERMKRIEEGIKELGSQILKEHPVENTQLQNEKLYLYYLQNGRDMYVDQELDINRLSDYDVDHIVPQSFLKDDSIDNKVLTRSDKARGKSDNVPSEEVVKKMKNYWRQLLNAKLITQRKFDNLTKAERGGLSELDKAGFIKRQLVETRQITKHVAQILDSRMNTKYDENDKLIREVKVITLKSKLVSDFRKDFQFYKVREINNYHHAHDAYLNAVVGTALIKKYPKLESEFVYGDYKVYDVRKMIAKSEQEIGKATAKYFFYSNIMNFFKTEITLANGEIRKRPLIETNGETGEIVWDKGRDFATVRKVLSMPQVNIVKKTEVQTGGFSKESILPKRNSDKLIARKKDWDPKKYGGFDSPTVAYSVLVVAKVEKGKSKKLKSVKELLGITIMERSSFEKNPIDFLEAKGYKEVKKDLIIKLPKYSLFELENGRKRMLASAGELQKGNELALPSKYVNFLYLASHYEKLKGSPEDNEQKQLFVEQHKHYLDEIIEQISEFSKRVILADANLDKVLSAYNKHRDKPIREQAENIIHLFTLTNLGAPAAFKYFDTTIDRKRYTSTKEVLDATLIHQSITGLYETRIDLSQLGGDGGGGGEAAAKGSSGGVLNLEEEYRLHEKPVPSSIDPSWLQLFPTVWAERAGMGLANQVPPVVVELRSGASPVAVRQYPMSKEAREGIRPHIQKFLDLGVLVPCRSPWNTPLLPVKKPGTNDYRPVQDLREINKRVQDIHPTVPNPYNLLSSLPPSYTWYSVLDLKDAFFCLRLHPNSQPLFAFEWKDPEKGNTGQLTWTRLPQGFKNSPTLFNEALHRDLAPFRALNPQVVLLQYVDDLLVAAPTYEDCKKGTQKLLQELSKLGYRVSAKKAQLCQREVTYLGYLLKEGKRWLTPARKATVMKIPVPTTPRQVREFLGKAGFCRLFIPGFASLAAPLYPLTKPSIPFIWTEEHQQAFDHIKKALLSAPALALPDLTKPFTLYIDERAGVARGVLTQTLGPWRRPVAYLSKKLDPVASGWPTCLKAVAAVALLLKDADKLTLGQNVTVIASHSLESIVRQPPDRWMTNARMTHYQSLLLNERVSFAPPAVLNPATLLPVESEATPVHRCSEILAEETGTRRDLEDQPLPGVPTWYTDGSSFITEGKRRAGAPIVDGKRTVWASSLPEGTSAQKAELVALTQALRLAEGKNINIYTDSRYAFATAHIHGAIYKQRGWLTSAGKDIKNKEEILALLEAIHLPRRVAIIHCPGHQRGSNPVATGNRRADEAAKQAALSTRVLAGTTKPAGKRTADGSEFEKRTADGSEFESPKKKAKVE

SEQ ID NO: 1462 - protein, 2088 aa, synthetic construct
MPAAKRVKLDGGDKKYSIGLDIGTNSVGWAVITDEYKVPSKKFKVLGNTDRHSIKKNLIGALLFDSGETAEATRLKRTARRRYTRRKNRICYLQEIFSNEMAKVDDSFFHRLEESFLVEEDKKHERHPIFGNIVDEVAYHEKYPTIYHLRKKLVDSTDKADLRLIYLALAHMIKFRGHFLIEGDLNPDNSDVDKLFIQLVQTYNQLFEENPINASGVDAKAILSARLSKSRRLENLIAQLPGEKKNGLFGNLIALSLGLTPNFKSNFDLAEDAKLQLSKDTYDDDLDNLLAQIGDQYADLFLAAKNLSDAILLSDILRVNTEITKAPLSASMIKRYDEHHQDLTLLKALVRQQLPEKYKEIFFDQSKNGYAGYIDGGASQEEFYKFIKPILEKMDGTEELLVKLNREDLLRKQRTFDNGSIPHQIHLGELHAILRRQEDFYPFLKDNREKIEKILTFRIPYYVGPLARGNSRFAWMTRKSEETITPWNFEEVVDKGASAQSFIERMTNFDKNLPNEKVLPKHSLLYEYFTVYNELTKVKYVTEGMRKPAFLSGEQKKAIVDLLFKTNRKVTVKQLKEDYFKKIECFDSVEISGVEDRFNASLGTYHDLLKIIKDKDFLDNEENEDILEDIVLTLTLFEDREMIEERLKTYAHLFDDKVMKQLKRRRYTGWGRLSRKLINGIRDKQSGKTILDFLKSDGFANRNFMQLIHDDSLTFKEDIQKAQVSGQGDSLHEHIANLAGSPAIKKGILQTVKVVDELVKVMGRHKPENIVIEMARENQTTQKGQKNSRERMKRIEEGIKELGSQILKEHPVENTQLQNEKLYLYYLQNGRDMYVDQELDINRLSDYDVDHIVPQSFLKDDSIDNKVLTRSDKARGKSDNVPSEEVVKKMKNYWRQLLNAKLITQRKFDNLTKAERGGLSELDKAGFIKRQLVETRQITKHVAQILDSRMNTKYDENDKLIREVKVITLKSKLVSDFRKDFQFYKVREINNYHHAHDAYLNAVVGTALIKKYPKLESEFVYGDYKVYDVRKMIAKSEQEIGKATAKYFFYSNIMNFFKTEITLANGEIRKRPLIETNGETGEIVWDKGRDFATVRKVLSMPQVNIVKKTEVQTGGFSKESILPKRNSDKLIARKKDWDPKKYGGFDSPTVAYSVLVVAKVEKGKSKKLKSVKELLGITIMERSSFEKNPIDFLEAKGYKEVKKDLIIKLPKYSLFELENGRKRMLASAGELQKGNELALPSKYVNFLYLASHYEKLKGSPEDNEQKQLFVEQHKHYLDEIIEQISEFSKRVILADANLDKVLSAYNKHRDKPIREQAENIIHLFTLTNLGAPAAFKYFDTTIDRKRYTSTKEVLDATLIHQSITGLYETRIDLSQLGGDGGGGGGSGGVLNLEEEYRLHEKPVPSSIDPSWLQLFPTVWAERAGMGLANQVPPVVVELRSGASPVAVRQYPMSKEAREGIRPHIQKFLDLGVLVPCRSPWNTPLLPVKKPGTNDYRPVQDLREINKRVQDIHPTVPNPYNLLSSLPPSYTWYSVLDLKDAFFCLRLHPNSQPLFAFEWKDPEKGNTGQLTWTRLPQGFKNSPTLFNEALHRDLAPFRALNPQVVLLQYVDDLLVAAPTYEDCKKGTQKLLQELSKLGYRVSAKKAQLCQREVTYLGYLLKEGKRWLTPARKATVMKIPVPTTPRQVREFLGKAGFCRLFIPGFASLAAPLYPLTKPSIPFIWTEEHQQAFDHIKKALLSAPALALPDLTKPFTLYIDERAGVARGVLTQTLGPWRRPVAYLSKKLDPVASGWPTCLKAVAAVALLLKDADKLTLGQNVTVIASHSLESIVRQPPDRWMTNARMTHYQSLLLNERVSFAPPAVLNPATLLPVESEATPVHRCSEILAEETGTRRDLEDQPLPGVPTWYTDGSSFITEGKRRAGAPIVDGKRTVWASSLPEGTSAQKAELVALTQALRLAEGKNINIYTDSRYAFATAHIHGAIYKQRGWLTSAGKDIKNKEEILALLEAIHLPRRVAIIHCPGHQRGSNPVATGNRRADEAAKQAALSTRVLAGTTKPAGKRTADGSEFEKRTADGSEFESPKKKAKVE

SEQ ID NO: 1463 - protein, 2094 aa, synthetic construct
MPAAKRVKLDGGDKKYSIGLDIGTNSVGWAVITDEYKVPSKKFKVLGNTDRHSIKKNLIGALLFDSGETAEATRLKRTARRRYTRRKNRICYLQEIFSNEMAKVDDSFFHRLEESFLVEEDKKHERHPIFGNIVDEVAYHEKYPTIYHLRKKLVDSTDKADLRLIYLALAHMIKFRGHFLIEGDLNPDNSDVDKLFIQLVQTYNQLFEENPINASGVDAKAILSARLSKSRRLENLIAQLPGEKKNGLFGNLIALSLGLTPNFKSNFDLAEDAKLQLSKDTYDDDLDNLLAQIGDQYADLFLAAKNLSDAILLSDILRVNTEITKAPLSASMIKRYDEHHQDLTLLKALVRQQLPEKYKEIFFDQSKNGYAGYIDGGASQEEFYKFIKPILEKMDGTEELLVKLNREDLLRKQRTFDNGSIPHQIHLGELHAILRRQEDFYPFLKDNREKIEKILTFRIPYYVGPLARGNSRFAWMTRKSEETITPWNFEEVVDKGASAQSFIERMTNFDKNLPNEKVLPKHSLLYEYFTVYNELTKVKYVTEGMRKPAFLSGEQKKAIVDLLFKTNRKVTVKQLKEDYFKKIECFDSVEISGVEDRFNASLGTYHDLLKIIKDKDFLDNEENEDILEDIVLTLTLFEDREMIEERLKTYAHLFDDKVMKQLKRRRYTGWGRLSRKLINGIRDKQSGKTILDFLKSDGFANRNFMQLIHDDSLTFKEDIQKAQVSGQGDSLHEHIANLAGSPAIKKGILQTVKVVDELVKVMGRHKPENIVIEMARENQTTQKGQKNSRERMKRIEEGIKELGSQILKEHPVENTQLQNEKLYLYYLQNGRDMYVDQELDINRLSDYDVDHIVPQSFLKDDSIDNKVLTRSDKARGKSDNVPSEEVVKKMKNYWRQLLNAKLITQRKFDNLTKAERGGLSELDKAGFIKRQLVETRQITKHVAQILDSRMNTKYDENDKLIREVKVITLKSKLVSDFRKDFQFYKVREINNYHHAHDAYLNAVVGTALIKKYPKLESEFVYGDYKVYDVRKMIAKSEQEIGKATAKYFFYSNIMNFFKTEITLANGEIRKRPLIETNGETGEIVWDKGRDFATVRKVLSMPQVNIVKKTEVQTGGFSKESILPKRNSDKLIARKKDWDPKKYGGFDSPTVAYSVLVVAKVEKGKSKKLKSVKELLGITIMERSSFEKNPIDFLEAKGYKEVKKDLIIKLPKYSLFELENGRKRMLASAGELQKGNELALPSKYVNFLYLASHYEKLKGSPEDNEQKQLFVEQHKHYLDEIIEQISEFSKRVILADANLDKVLSAYNKHRDKPIREQAENIIHLFTLTNLGAPAAFKYFDTTIDRKRYTSTKEVLDATLIHQSITGLYETRIDLSQLGGDGGGGSEAAAKGGGGGVLNLEEEYRLHEKPVPSSIDPSWLQLFPTVWAERAGMGLANQVPPVVVELRSGASPVAVRQYPMSKEAREGIRPHIQKFLDLGVLVPCRSPWNTPLLPVKKPGTNDYRPVQDLREINKRVQDIHPTVPNPYNLLSSLPPSYTWYSVLDLKDAFFCLRLHPNSQPLFAFEWKDPEKGNTGQLTWTRLPQGFKNSPTLFNEALHRDLAPFRALNPQVVLLQYVDDLLVAAPTYEDCKKGTQKLLQELSKLGYRVSAKKAQLCQREVTYLGYLLKEGKRWLTPARKATVMKIPVPTTPRQVREFLGKAGFCRLFIPGFASLAAPLYPLTKPSIPFIWTEEHQQAFDHIKKALLSAPALALPDLTKPFTLYIDERAGVARGVLTQTLGPWRRPVAYLSKKLDPVASGWPTCLKAVAAVALLLKDADKLTLGQNVTVIASHSLESIVRQPPDRWMTNARMTHYQSLLLNERVSFAPPAVLNPATLLPVESEATPVHRCSEILAEETGTRRDLEDQPLPGVPTWYTDGSSFITEGKRRAGAPIVDGKRTVWASSLPEGTSAQKAELVALTQALRLAEGKNINIYTDSRYAFATAHIHGAIYKQRGWLTSAGKDIKNKEEILALLEAIHLPRRVAIIHCPGHQRGSNPVATGNRRADEAAKQAALSTRVLAGTTKPAGKRTADGSEFEKRTADGSEFESPKKKAKVE

SEQ ID NO: 1464 - protein, 2086 aa, synthetic construct
MPAAKRVKLDGGDKKYSIGLDIGTNSVGWAVITDEYKVPSKKFKVLGNTDRHSIKKNLIGALLFDSGETAEATRLKRTARRRYTRRKNRICYLQEIFSNEMAKVDDSFFHRLEESFLVEEDKKHERHPIFGNIVDEVAYHEKYPTIYHLRKKLVDSTDKADLRLIYLALAHMIKFRGHFLIEGDLNPDNSDVDKLFIQLVQTYNQLFEENPINASGVDAKAILSARLSKSRRLENLIAQLPGEKKNGLFGNLIALSLGLTPNFKSNFDLAEDAKLQLSKDTYDDDLDNLLAQIGDQYADLFLAAKNLSDAILLSDILRVNTEITKAPLSASMIKRYDEHHQDLTLLKALVRQQLPEKYKEIFFDQSKNGYAGYIDGGASQEEFYKFIKPILEKMDGTEELLVKLNREDLLRKQRTFDNGSIPHQIHLGELHAILRRQEDFYPFLKDNREKIEKILTFRIPYYVGPLARGNSRFAWMTRKSEETITPWNFEEVVDKGASAQSFIERMTNFDKNLPNEKVLPKHSLLYEYFTVYNELTKVKYVTEGMRKPAFLSGEQKKAIVDLLFKTNRKVTVKQLKEDYFKKIECFDSVEISGVEDRFNASLGTYHDLLKIIKDKDFLDNEENEDILEDIVLTLTLFEDREMIEERLKTYAHLFDDKVMKQLKRRRYTGWGRLSRKLINGIRDKQSGKTILDFLKSDGFANRNFMQLIHDDSLTFKEDIQKAQVSGQGDSLHEHIANLAGSPAIKKGILQTVKVVDELVKVMGRHKPENIVIEMARENQTTQKGQKNSRERMKRIEEGIKELGSQILKEHPVENTQLQNEKLYLYYLQNGRDMYVDQELDINRLSDYDVDHIVPQSFLKDDSIDNKVLTRSDKARGKSDNVPSEEVVKKMKNYWRQLLNAKLITQRKFDNLTKAERGGLSELDKAGFIKRQLVETRQITKHVAQILDSRMNTKYDENDKLIREVKVITLKSKLVSDFRKDFQFYKVREINNYHHAHDAYLNAVVGTALIKKYPKLESEFVYGDYKVYDVRKMIAKSEQEIGKATAKYFFYSNIMNFFKTEITLANGEIRKRPLIETNGETGEIVWDKGRDFATVRKVLSMPQVNIVKKTEVQTGGFSKESILPKRNSDKLIARKKDWDPKKYGGFDSPTVAYSVLVVAKVEKGKSKKLKSVKELLGITIMERSSFEKNPIDFLEAKGYKEVKKDLIIKLPKYSLFELENGRKRMLASAGELQKGNELALPSKYVNFLYLASHYEKLKGSPEDNEQKQLFVEQHKHYLDEIIEQISEFSKRVILADANLDKVLSAYNKHRDKPIREQAENIIHLFTLTNLGAPAAFKYFDTTIDRKRYTSTKEVLDATLIHQSITGLYETRIDLSQLGGDGGGGSGGVLNLEEEYRLHEKPVPSSIDPSWLQLFPTVWAERAGMGLANQVPPVVVELRSGASPVAVRQYPMSKEAREGIRPHIQKFLDLGVLVPCRSPWNTPLLPVKKPGTNDYRPVQDLREINKRVQDIHPTVPNPYNLLSSLPPSYTWYSVLDLKDAFFCLRLHPNSQPLFAFEWKDPEKGNTGQLTWTRLPQGFKNSPTLFNEALHRDLAPFRALNPQVVLLQYVDDLLVAAPTYEDCKKGTQKLLQELSKLGYRVSAKKAQLCQREVTYLGYLLKEGKRWLTPARKATVMKIPVPTTPRQVREFLGKAGFCRLFIPGFASLAAPLYPLTKPSIPFIWTEEHQQAFDHIKKALLSAPALALPDLTKPFTLYIDERAGVARGVLTQTLGPWRRPVAYLSKKLDPVASGWPTCLKAVAAVALLLKDADKLTLGQNVTVIASHSLESIVRQPPDRWMTNARMTHYQSLLLNERVSFAPPAVLNPATLLPVESEATPVHRCSEILAEETGTRRDLEDQPLPGVPTWYTDGSSFITEGKRRAGAPIVDGKRTVWASSLPEGTSAQKAELVALTQALRLAEGKNINIYTDSRYAFATAHIHGAIYKQRGWLTSAGKDIKNKEEILALLEAIHLPRRVAIIHCPGHQRGSNPVATGNRRADEAAKQAALSTRVLAGTTKPAGKRTADGSEFEKRTADGSEFESPKKKAKVE

SEQ ID NO: 1465 - protein, 2091 aa, synthetic construct
MPAAKRVKLDGGDKKYSIGLDIGTNSVGWAVITDEYKVPSKKFKVLGNTDRHSIKKNLIGALLFDSGETAEATRLKRTARRRYTRRKNRICYLQEIFSNEMAKVDDSFFHRLEESFLVEEDKKHERHPIFGNIVDEVAYHEKYPTIYHLRKKLVDSTDKADLRLIYLALAHMIKFRGHFLIEGDLNPDNSDVDKLFIQLVQTYNQLFEENPINASGVDAKAILSARLSKSRRLENLIAQLPGEKKNGLFGNLIALSLGLTPNFKSNFDLAEDAKLQLSKDTYDDDLDNLLAQIGDQYADLFLAAKNLSDAILLSDILRVNTEITKAPLSASMIKRYDEHHQDLTLLKALVRQQLPEKYKEIFFDQSKNGYAGYIDGGASQEEFYKFIKPILEKMDGTEELLVKLNREDLLRKQRTFDNGSIPHQIHLGELHAILRRQEDFYPFLKDNREKIEKILTFRIPYYVGPLARGNSRFAWMTRKSEETITPWNFEEVVDKGASAQSFIERMTNFDKNLPNEKVLPKHSLLYEYFTVYNELTKVKYVTEGMRKPAFLSGEQKKAIVDLLFKTNRKVTVKQLKEDYFKKIECFDSVEISGVEDRFNASLGTYHDLLKIIKDKDFLDNEENEDILEDIVLTLTLFEDREMIEERLKTYAHLFDDKVMKQLKRRRYTGWGRLSRKLINGIRDKQSGKTILDFLKSDGFANRNFMQLIHDDSLTFKEDIQKAQVSGQGDSLHEHIANLAGSPAIKKGILQTVKVVDELVKVMGRHKPENIVIEMARENQTTQKGQKNSRERMKRIEEGIKELGSQILKEHPVENTQLQNEKLYLYYLQNGRDMYVDQELDINRLSDYDVDHIVPQSFLKDDSIDNKVLTRSDKARGKSDNVPSEEVVKKMKNYWRQLLNAKLITQRKFDNLTKAERGGLSELDKAGFIKRQLVETRQITKHVAQILDSRMNTKYDENDKLIREVKVITLKSKLVSDFRKDFQFYKVREINNYHHAHDAYLNAVVGTALIKKYPKLESEFVYGDYKVYDVRKMIAKSEQEIGKATAKYFFYSNIMNFFKTEITLANGEIRKRPLIETNGETGEIVWDKGRDFATVRKVLSMPQVNIVKKTEVQTGGFSKESILPKRNSDKLIARKKDWDPKKYGGFDSPTVAYSVLVVAKVEKGKSKKLKSVKELLGITIMERSSFEKNPIDFLEAKGYKEVKKDLIIKLPKYSLFELENGRKRMLASAGELQKGNELALPSKYVNFLYLASHYEKLKGSPEDNEQKQLFVEQHKHYLDEIIEQISEFSKRVILADANLDKVLSAYNKHRDKPIREQAENIIHLFTLTNLGAPAAFKYFDTTIDRKRYTSTKEVLDATLIHQSITGLYETRIDLSQLGGDGGGGGGGGGGGGVLNLEEEYRLHEKPVPSSIDPSWLQLFPTVWAERAGMGLANQVPPVVVELRSGASPVAVRQYPMSKEAREGIRPHIQKFLDLGVLVPCRSPWNTPLLPVKKPGTNDYRPVQDLREINKRVQDIHPTVPNPYNLLSSLPPSYTWYSVLDLKDAFFCLRLHPNSQPLFAFEWKDPEKGNTGQLTWTRLPQGFKNSPTLFNEALHRDLAPFRALNPQVVLLQYVDDLLVAAPTYEDCKKGTQKLLQELSKLGYRVSAKKAQLCQREVTYLGYLLKEGKRWLTPARKATVMKIPVPTTPRQVREFLGKAGFCRLFIPGFASLAAPLYPLTKPSIPFIWTEEHQQAFDHIKKALLSAPALALPDLTKPFTLYIDERAGVARGVLTQTLGPWRRPVAYLSKKLDPVASGWPTCLKAVAAVALLLKDADKLTLGQNVTVIASHSLESIVRQPPDRWMTNARMTHYQSLLLNERVSFAPPAVLNPATLLPVESEATPVHRCSEILAEETGTRRDLEDQPLPGVPTWYTDGSSFITEGKRRAGAPIVDGKRTVWASSLPEGTSAQKAELVALTQALRLAEGKNINIYTDSRYAFATAHIHGAIYKQRGWLTSAGKDIKNKEEILALLEAIHLPRRVAIIHCPGHQRGSNPVATGNRRADEAAKQAALSTRVLAGTTKPAGKRTADGSEFEKRTADGSEFESPKKKAKVE

SEQ ID NO: 1466 - protein, 2094 aa, synthetic construct
MPAAKRVKLDGGDKKYSIGLDIGTNSVGWAVITDEYKVPSKKFKVLGNTDRHSIKKNLIGALLFDSGETAEATRLKRTARRRYTRRKNRICYLQEIFSNEMAKVDDSFFHRLEESFLVEEDKKHERHPIFGNIVDEVAYHEKYPTIYHLRKKLVDSTDKADLRLIYLALAHMIKFRGHFLIEGDLNPDNSDVDKLFIQLVQTYNQLFEENPINASGVDAKAILSARLSKSRRLENLIAQLPGEKKNGLFGNLIALSLGLTPNFKSNFDLAEDAKLQLSKDTYDDDLDNLLAQIGDQYADLFLAAKNLSDAILLSDILRVNTEITKAPLSASMIKRYDEHHQDLTLLKALVRQQLPEKYKEIFFDQSKNGYAGYIDGGASQEEFYKFIKPILEKMDGTEELLVKLNREDLLRKQRTFDNGSIPHQIHLGELHAILRRQEDFYPFLKDNREKIEKILTFRIPYYVGPLARGNSRFAWMTRKSEETITPWNFEEVVDKGASAQSFIERMTNFDKNLPNEKVLPKHSLLYEYFTVYNELTKVKYVTEGMRKPAFLSGEQKKAIVDLLFKTNRKVTVKQLKEDYFKKIECFDSVEISGVEDRFNASLGTYHDLLKIIKDKDFLDNEENEDILEDIVLTLTLFEDREMIEERLKTYAHLFDDKVMKQLKRRRYTGWGRLSRKLINGIRDKQSGKTILDFLKSDGFANRNFMQLIHDDSLTFKEDIQKAQVSGQGDSLHEHIANLAGSPAIKKGILQTVKVVDELVKVMGRHKPENIVIEMARENQTTQKGQKNSRERMKRIEEGIKELGSQILKEHPVENTQLQNEKLYLYYLQNGRDMYVDQELDINRLSDYDVDHIVPQSFLKDDSIDNKVLTRSDKARGKSDNVPSEEVVKKMKNYWRQLLNAKLITQRKFDNLTKAERGGLSELDKAGFIKRQLVETRQITKHVAQILDSRMNTKYDENDKLIREVKVITLKSKLVSDFRKDFQFYKVREINNYHHAHDAYLNAVVGTALIKKYPKLESEFVYGDYKVYDVRKMIAKSEQEIGKATAKYFFYSNIMNFFKTEITLANGEIRKRPLIETNGETGEIVWDKGRDFATVRKVLSMPQVNIVKKTEVQTGGFSKESILPKRNSDKLIARKKDWDPKKYGGFDSPTVAYSVLVVAKVEKGKSKKLKSVKELLGITIMERSSFEKNPIDFLEAKGYKEVKKDLIIKLPKYSLFELENGRKRMLASAGELQKGNELALPSKYVNFLYLASHYEKLKGSPEDNEQKQLFVEQHKHYLDEIIEQISEFSKRVILADANLDKVLSAYNKHRDKPIREQAENIIHLFTLTNLGAPAAFKYFDTTIDRKRYTSTKEVLDATLIHQSITGLYETRIDLSQLGGDGGGSSGGGEAAAKGGVLNLEEEYRLHEKPVPSSIDPSWLQLFPTVWAERAGMGLANQVPPVVVELRSGASPVAVRQYPMSKEAREGIRPHIQKFLDLGVLVPCRSPWNTPLLPVKKPGTNDYRPVQDLREINKRVQDIHPTVPNPYNLLSSLPPSYTWYSVLDLKDAFFCLRLHPNSQPLFAFEWKDPEKGNTGQLTWTRLPQGFKNSPTLFNEALHRDLAPFRALNPQVVLLQYVDDLLVAAPTYEDCKKGTQKLLQELSKLGYRVSAKKAQLCQREVTYLGYLLKEGKRWLTPARKATVMKIPVPTTPRQVREFLGKAGFCRLFIPGFASLAAPLYPLTKPSIPFIWTEEHQQAFDHIKKALLSAPALALPDLTKPFTLYIDERAGVARGVLTQTLGPWRRPVAYLSKKLDPVASGWPTCLKAVAAVALLLKDADKLTLGQNVTVIASHSLESIVRQPPDRWMTNARMTHYQSLLLNERVSFAPPAVLNPATLLPVESEATPVHRCSEILAEETGTRRDLEDQPLPGVPTWYTDGSSFITEGKRRAGAPIVDGKRTVWASSLPEGTSAQKAELVALTQALRLAEGKNINIYTDSRYAFATAHIHGAIYKQRGWLTSAGKDIKNKEEILALLEAIHLPRRVAIIHCPGHQRGSNPVATGNRRADEAAKQAALSTRVLAGTTKPAGKRTADGSEFEKRTADGSEFESPKKKAKVE

SEQ ID NO: 1467 - protein, 2094 aa, synthetic construct
MPAAKRVKLDGGDKKYSIGLDIGTNSVGWAVITDEYKVPSKKFKVLGNTDRHSIKKNLIGALLFDSGETAEATRLKRTARRRYTRRKNRICYLQEIFSNEMAKVDDSFFHRLEESFLVEEDKKHERHPIFGNIVDEVAYHEKYPTIYHLRKKLVDSTDKADLRLIYLALAHMIKFRGHFLIEGDLNPDNSDVDKLFIQLVQTYNQLFEENPINASGVDAKAILSARLSKSRRLENLIAQLPGEKKNGLFGNLIALSLGLTPNFKSNFDLAEDAKLQLSKDTYDDDLDNLLAQIGDQYADLFLAAKNLSDAILLSDILRVNTEITKAPLSASMIKRYDEHHQDLTLLKALVRQQLPEKYKEIFFDQSKNGYAGYIDGGASQEEFYKFIKPILEKMDGTEELLVKLNREDLLRKQRTFDNGSIPHQIHLGELHAILRRQEDFYPFLKDNREKIEKILTFRIPYYVGPLARGNSRFAWMTRKSEETITPWNFEEVVDKGASAQSFIERMTNFDKNLPNEKVLPKHSLLYEYFTVYNELTKVKYVTEGMRKPAFLSGEQKKAIVDLLFKTNRKVTVKQLKEDYFKKIECFDSVEISGVEDRFNASLGTYHDLLKIIKDKDFLDNEENEDILEDIVLTLTLFEDREMIEERLKTYAHLFDDKVMKQLKRRRYTGWGRLSRKLINGIRDKQSGKTILDFLKSDGFANRNFMQLIHDDSLTFKEDIQKAQVSGQGDSLHEHIANLAGSPAIKKGILQTVKVVDELVKVMGRHKPENIVIEMARENQTTQKGQKNSRERMKRIEEGIKELGSQILKEHPVENTQLQNEKLYLYYLQNGRDMYVDQELDINRLSDYDVDHIVPQSFLKDDSIDNKVLTRSDKARGKSDNVPSEEVVKKMKNYWRQLLNAKLITQRKFDNLTKAERGGLSELDKAGFIKRQLVETRQITKHVAQILDSRMNTKYDENDKLIREVKVITLKSKLVSDFRKDFQFYKVREINNYHHAHDAYLNAVVGTALIKKYPKLESEFVYGDYKVYDVRKMIAKSEQEIGKATAKYFFYSNIMNFFKTEITLANGEIRKRPLIETNGETGEIVWDKGRDFATVRKVLSMPQVNIVKKTEVQTGGFSKESILPKRNSDKLIARKKDWDPKKYGGFDSPTVAYSVLVVAKVEKGKSKKLKSVKELLGITIMERSSFEKNPIDFLEAKGYKEVKKDLIIKLPKYSLFELENGRKRMLASAGELQKGNELALPSKYVNFLYLASHYEKLKGSPEDNEQKQLFVEQHKHYLDEIIEQISEFSKRVILADANLDKVLSAYNKHRDKPIREQAENIIHLFTLTNLGAPAAFKYFDTTIDRKRYTSTKEVLDATLIHQSITGLYETRIDLSQLGGDGGEAAAKGSSPAPGGVLNLEEEYRLHEKPVPSSIDPSWLQLFPTVWAERAGMGLANQVPPVVVELRSGASPVAVRQYPMSKEAREGIRPHIQKFLDLGVLVPCRSPWNTPLLPVKKPGTNDYRPVQDLREINKRVQDIHPTVPNPYNLLSSLPPSYTWYSVLDLKDAFFCLRLHPNSQPLFAFEWKDPEKGNTGQLTWTRLPQGFKNSPTLFNEALHRDLAPFRALNPQVVLLQYVDDLLVAAPTYEDCKKGTQKLLQELSKLGYRVSAKKAQLCQREVTYLGYLLKEGKRWLTPARKATVMKIPVPTTPRQVREFLGKAGFCRLFIPGFASLAAPLYPLTKPSIPFIWTEEHQQAFDHIKKALLSAPALALPDLTKPFTLYIDERAGVARGVLTQTLGPWRRPVAYLSKKLDPVASGWPTCLKAVAAVALLLKDADKLTLGQNVTVIASHSLESIVRQPPDRWMTNARMTHYQSLLLNERVSFAPPAVLNPATLLPVESEATPVHRCSEILAEETGTRRDLEDQPLPGVPTWYTDGSSFITEGKRRAGAPIVDGKRTVWASSLPEGTSAQKAELVALTQALRLAEGKNINIYTDSRYAFATAHIHGAIYKQRGWLTSAGKDIKNKEEILALLEAIHLPRRVAIIHCPGHQRGSNPVATGNRRADEAAKQAALSTRVLAGTTKPAGKRTADGSEFEKRTADGSEFESPKKKAKVE

SEQ ID NO: 1468 - protein, 2094 aa, synthetic construct
MPAAKRVKLDGGDKKYSIGLDIGTNSVGWAVITDEYKVPSKKFKVLGNTDRHSIKKNLIGALLFDSGETAEATRLKRTARRRYTRRKNRICYLQEIFSNEMAKVDDSFFHRLEESFLVEEDKKHERHPIFGNIVDEVAYHEKYPTIYHLRKKLVDSTDKADLRLIYLALAHMIKFRGHFLIEGDLNPDNSDVDKLFIQLVQTYNQLFEENPINASGVDAKAILSARLSKSRRLENLIAQLPGEKKNGLFGNLIALSLGLTPNFKSNFDLAEDAKLQLSKDTYDDDLDNLLAQIGDQYADLFLAAKNLSDAILLSDILRVNTEITKAPLSASMIKRYDEHHQDLTLLKALVRQQLPEKYKEIFFDQSKNGYAGYIDGGASQEEFYKFIKPILEKMDGTEELLVKLNREDLLRKQRTFDNGSIPHQIHLGELHAILRRQEDFYPFLKDNREKIEKILTFRIPYYVGPLARGNSRFAWMTRKSEETITPWNFEEVVDKGASAQSFIERMTNFDKNLPNEKVLPKHSLLYEYFTVYNELTKVKYVTEGMRKPAFLSGEQKKAIVDLLFKTNRKVTVKQLKEDYFKKIECFDSVEISGVEDRFNASLGTYHDLLKIIKDKDFLDNEENEDILEDIVLTLTLFEDREMIEERLKTYAHLFDDKVMKQLKRRRYTGWGRLSRKLINGIRDKQSGKTILDFLKSDGFANRNFMQLIHDDSLTFKEDIQKAQVSGQGDSLHEHIANLAGSPAIKKGILQTVKVVDELVKVMGRHKPENIVIEMARENQTTQKGQKNSRERMKRIEEGIKELGSQILKEHPVENTQLQNEKLYLYYLQNGRDMYVDQELDINRLSDYDVDHIVPQSFLKDDSIDNKVLTRSDKARGKSDNVPSEEVVKKMKNYWRQLLNAKLITQRKFDNLTKAERGGLSELDKAGFIKRQLVETRQITKHVAQILDSRMNTKYDENDKLIREVKVITLKSKLVSDFRKDFQFYKVREINNYHHAHDAYLNAVVGTALIKKYPKLESEFVYGDYKVYDVRKMIAKSEQEIGKATAKYFFYSNIMNFFKTEITLANGEIRKRPLIETNGETGEIVWDKGRDFATVRKVLSMPQVNIVKKTEVQTGGFSKESILPKRNSDKLIARKKDWDPKKYGGFDSPTVAYSVLVVAKVEKGKSKKLKSVKELLGITIMERSSFEKNPIDFLEAKGYKEVKKDLIIKLPKYSLFELENGRKRMLASAGELQKGNELALPSKYVNFLYLASHYEKLKGSPEDNEQKQLFVEQHKHYLDEIIEQISEFSKRVILADANLDKVLSAYNKHRDKPIREQAENIIHLFTLTNLGAPAAFKYFDTTIDRKRYTSTKEVLDATLIHQSITGLYETRIDLSQLGGDGGGGSEAAAKPAPGGVLNLEEEYRLHEKPVPSSIDPSWLQLFPTVWAERAGMGLANQVPPVVVELRSGASPVAVRQYPMSKEAREGIRPHIQKFLDLGVLVPCRSPWNTPLLPVKKPGTNDYRPVQDLREINKRVQDIHPTVPNPYNLLSSLPPSYTWYSVLDLKDAFFCLRLHPNSQPLFAFEWKDPEKGNTGQLTWTRLPQGFKNSPTLFNEALHRDLAPFRALNPQVVLLQYVDDLLVAAPTYEDCKKGTQKLLQELSKLGYRVSAKKAQLCQREVTYLGYLLKEGKRWLTPARKATVMKIPVPTTPRQVREFLGKAGFCRLFIPGFASLAAPLYPLTKPSIPFIWTEEHQQAFDHIKKALLSAPALALPDLTKPFTLYIDERAGVARGVLTQTLGPWRRPVAYLSKKLDPVASGWPTCLKAVAAVALLLKDADKLTLGQNVTVIASHSLESIVRQPPDRWMTNARMTHYQSLLLNERVSFAPPAVLNPATLLPVESEATPVHRCSEILAEETGTRRDLEDQPLPGVPTWYTDGSSFITEGKRRAGAPIVDGKRTVWASSLPEGTSAQKAELVALTQALRLAEGKNINIYTDSRYAFATAHIHGAIYKQRGWLTSAGKDIKNKEEILALLEAIHLPRRVAIIHCPGHQRGSNPVATGNRRADEAAKQAALSTRVLAGTTKPAGKRTADGSEFEKRTADGSEFESPKKKAKVE

SEQ ID NO: 1469 - protein, 2094 aa, synthetic construct
MPAAKRVKLDGGDKKYSIGLDIGTNSVGWAVITDEYKVPSKKFKVLGNTDRHSIKKNLIGALLFDSGETAEATRLKRTARRRYTRRKNRICYLQEIFSNEMAKVDDSFFHRLEESFLVEEDKKHERHPIFGNIVDEVAYHEKYPTIYHLRKKLVDSTDKADLRLIYLALAHMIKFRGHFLIEGDLNPDNSDVDKLFIQLVQTYNQLFEENPINASGVDAKAILSARLSKSRRLENLIAQLPGEKKNGLFGNLIALSLGLTPNFKSNFDLAEDAKLQLSKDTYDDDLDNLLAQIGDQYADLFLAAKNLSDAILLSDILRVNTEITKAPLSASMIKRYDEHHQDLTLLKALVRQQLPEKYKEIFFDQSKNGYAGYIDGGASQEEFYKFIKPILEKMDGTEELLVKLNREDLLRKQRTFDNGSIPHQIHLGELHAILRRQEDFYPFLKDNREKIEKILTFRIPYYVGPLARGNSRFAWMTRKSEETITPWNFEEVVDKGASAQSFIERMTNFDKNLPNEKVLPKHSLLYEYFTVYNELTKVKYVTEGMRKPAFLSGEQKKAIVDLLFKTNRKVTVKQLKEDYFKKIECFDSVEISGVEDRFNASLGTYHDLLKIIKDKDFLDNEENEDILEDIVLTLTLFEDREMIEERLKTYAHLFDDKVMKQLKRRRYTGWGRLSRKLINGIRDKQSGKTILDFLKSDGFANRNFMQLIHDDSLTFKEDIQKAQVSGQGDSLHEHIANLAGSPAIKKGILQTVKVVDELVKVMGRHKPENIVIEMARENQTTQKGQKNSRERMKRIEEGIKELGSQILKEHPVENTQLQNEKLYLYYLQNGRDMYVDQELDINRLSDYDVDHIVPQSFLKDDSIDNKVLTRSDKARGKSDNVPSEEVVKKMKNYWRQLLNAKLITQRKFDNLTKAERGGLSELDKAGFIKRQLVETRQITKHVAQILDSRMNTKYDENDKLIREVKVITLKSKLVSDFRKDFQFYKVREINNYHHAHDAYLNAVVGTALIKKYPKLESEFVYGDYKVYDVRKMIAKSEQEIGKATAKYFFYSNIMNFFKTEITLANGEIRKRPLIETNGETGEIVWDKGRDFATVRKVLSMPQVNIVKKTEVQTGGFSKESILPKRNSDKLIARKKDWDPKKYGGFDSPTVAYSVLVVAKVEKGKSKKLKSVKELLGITIMERSSFEKNPIDFLEAKGYKEVKKDLIIKLPKYSLFELENGRKRMLASAGELQKGNELALPSKYVNFLYLASHYEKLKGSPEDNEQKQLFVEQHKHYLDEIIEQISEFSKRVILADANLDKVLSAYNKHRDKPIREQAENIIHLFTLTNLGAPAAFKYFDTTIDRKRYTSTKEVLDATLIHQSITGLYETRIDLSQLGGDGGEAAAKPAPGGSGGVLNLEEEYRLHEKPVPSSIDPSWLQLFPTVWAERAGMGLANQVPPVVVELRSGASPVAVRQYPMSKEAREGIRPHIQKFLDLGVLVPCRSPWNTPLLPVKKPGTNDYRPVQDLREINKRVQDIHPTVPNPYNLLSSLPPSYTWYSVLDLKDAFFCLRLHPNSQPLFAFEWKDPEKGNTGQLTWTRLPQGFKNSPTLFNEALHRDLAPFRALNPQVVLLQYVDDLLVAAPTYEDCKKGTQKLLQELSKLGYRVSAKKAQLCQREVTYLGYLLKEGKRWLTPARKATVMKIPVPTTPRQVREFLGKAGFCRLFIPGFASLAAPLYPLTKPSIPFIWTEEHQQAFDHIKKALLSAPALALPDLTKPFTLYIDERAGVARGVLTQTLGPWRRPVAYLSKKLDPVASGWPTCLKAVAAVALLLKDADKLTLGQNVTVIASHSLESIVRQPPDRWMTNARMTHYQSLLLNERVSFAPPAVLNPATLLPVESEATPVHRCSEILAEETGTRRDLEDQPLPGVPTWYTDGSSFITEGKRRAGAPIVDGKRTVWASSLPEGTSAQKAELVALTQALRLAEGKNINIYTDSRYAFATAHIHGAIYKQRGWLTSAGKDIKNKEEILALLEAIHLPRRVAIIHCPGHQRGSNPVATGNRRADEAAKQAALSTRVLAGTTKPAGKRTADGSEFEKRTADGSEFESPKKKAKVE

SEQ ID NO: 1470 - protein, 2089 aa, synthetic construct
MPAAKRVKLDGGDKKYSIGLDIGTNSVGWAVITDEYKVPSKKFKVLGNTDRHSIKKNLIGALLFDSGETAEATRLKRTARRRYTRRKNRICYLQEIFSNEMAKVDDSFFHRLEESFLVEEDKKHERHPIFGNIVDEVAYHEKYPTIYHLRKKLVDSTDKADLRLIYLALAHMIKFRGHFLIEGDLNPDNSDVDKLFIQLVQTYNQLFEENPINASGVDAKAILSARLSKSRRLENLIAQLPGEKKNGLFGNLIALSLGLTPNFKSNFDLAEDAKLQLSKDTYDDDLDNLLAQIGDQYADLFLAAKNLSDAILLSDILRVNTEITKAPLSASMIKRYDEHHQDLTLLKALVRQQLPEKYKEIFFDQSKNGYAGYIDGGASQEEFYKFIKPILEKMDGTEELLVKLNREDLLRKQRTFDNGSIPHQIHLGELHAILRRQEDFYPFLKDNREKIEKILTFRIPYYVGPLARGNSRFAWMTRKSEETITPWNFEEVVDKGASAQSFIERMTNFDKNLPNEKVLPKHSLLYEYFTVYNELTKVKYVTEGMRKPAFLSGEQKKAIVDLLFKTNRKVTVKQLKEDYFKKIECFDSVEISGVEDRFNASLGTYHDLLKIIKDKDFLDNEENEDILEDIVLTLTLFEDREMIEERLKTYAHLFDDKVMKQLKRRRYTGWGRLSRKLINGIRDKQSGKTILDFLKSDGFANRNFMQLIHDDSLTFKEDIQKAQVSGQGDSLHEHIANLAGSPAIKKGILQTVKVVDELVKVMGRHKPENIVIEMARENQTTQKGQKNSRERMKRIEEGIKELGSQILKEHPVENTQLQNEKLYLYYLQNGRDMYVDQELDINRLSDYDVDHIVPQSFLKDDSIDNKVLTRSDKARGKSDNVPSEEVVKKMKNYWRQLLNAKLITQRKFDNLTKAERGGLSELDKAGFIKRQLVETRQITKHVAQILDSRMNTKYDENDKLIREVKVITLKSKLVSDFRKDFQFYKVREINNYHHAHDAYLNAVVGTALIKKYPKLESEFVYGDYKVYDVRKMIAKSEQEIGKATAKYFFYSNIMNFFKTEITLANGEIRKRPLIETNGETGEIVWDKGRDFATVRKVLSMPQVNIVKKTEVQTGGFSKESILPKRNSDKLIARKKDWDPKKYGGFDSPTVAYSVLVVAKVEKGKSKKLKSVKELLGITIMERSSFEKNPIDFLEAKGYKEVKKDLIIKLPKYSLFELENGRKRMLASAGELQKGNELALPSKYVNFLYLASHYEKLKGSPEDNEQKQLFVEQHKHYLDEIIEQISEFSKRVILADANLDKVLSAYNKHRDKPIREQAENIIHLFTLTNLGAPAAFKYFDTTIDRKRYTSTKEVLDATLIHQSITGLYETRIDLSQLGGDGGGGSPAPGGVLNLEEEYRLHEKPVPSSIDPSWLQLFPTVWAERAGMGLANQVPPVVVELRSGASPVAVRQYPMSKEAREGIRPHIQKFLDLGVLVPCRSPWNTPLLPVKKPGTNDYRPVQDLREINKRVQDIHPTVPNPYNLLSSLPPSYTWYSVLDLKDAFFCLRLHPNSQPLFAFEWKDPEKGNTGQLTWTRLPQGFKNSPTLFNEALHRDLAPFRALNPQVVLLQYVDDLLVAAPTYEDCKKGTQKLLQELSKLGYRVSAKKAQLCQREVTYLGYLLKEGKRWLTPARKATVMKIPVPTTPRQVREFLGKAGFCRLFIPGFASLAAPLYPLTKPSIPFIWTEEHQQAFDHIKKALLSAPALALPDLTKPFTLYIDERAGVARGVLTQTLGPWRRPVAYLSKKLDPVASGWPTCLKAVAAVALLLKDADKLTLGQNVTVIASHSLESIVRQPPDRWMTNARMTHYQSLLLNERVSFAPPAVLNPATLLPVESEATPVHRCSEILAEETGTRRDLEDQPLPGVPTWYTDGSSFITEGKRRAGAPIVDGKRTVWASSLPEGTSAQKAELVALTQALRLAEGKNINIYTDSRYAFATAHIHGAIYKQRGWLTSAGKDIKNKEEILALLEAIHLPRRVAIIHCPGHQRGSNPVATGNRRADEAAKQAALSTRVLAGTTKPAGKRTADGSEFEKRTADGSEFESPKKKAKVE

SEQ ID NO: 1471 - protein, 2092 aa, synthetic construct
MPAAKRVKLDGGDKKYSIGLDIGTNSVGWAVITDEYKVPSKKFKVLGNTDRHSIKKNLIGALLFDSGETAEATRLKRTARRRYTRRKNRICYLQEIFSNEMAKVDDSFFHRLEESFLVEEDKKHERHPIFGNIVDEVAYHEKYPTIYHLRKKLVDSTDKADLRLIYLALAHMIKFRGHFLIEGDLNPDNSDVDKLFIQLVQTYNQLFEENPINASGVDAKAILSARLSKSRRLENLIAQLPGEKKNGLFGNLIALSLGLTPNFKSNFDLAEDAKLQLSKDTYDDDLDNLLAQIGDQYADLFLAAKNLSDAILLSDILRVNTEITKAPLSASMIKRYDEHHQDLTLLKALVRQQLPEKYKEIFFDQSKNGYAGYIDGGASQEEFYKFIKPILEKMDGTEELLVKLNREDLLRKQRTFDNGSIPHQIHLGELHAILRRQEDFYPFLKDNREKIEKILTFRIPYYVGPLARGNSRFAWMTRKSEETITPWNFEEVVDKGASAQSFIERMTNFDKNLPNEKVLPKHSLLYEYFTVYNELTKVKYVTEGMRKPAFLSGEQKKAIVDLLFKTNRKVTVKQLKEDYFKKIECFDSVEISGVEDRFNASLGTYHDLLKIIKDKDFLDNEENEDILEDIVLTLTLFEDREMIEERLKTYAHLFDDKVMKQLKRRRYTGWGRLSRKLINGIRDKQSGKTILDFLKSDGFANRNFMQLIHDDSLTFKEDIQKAQVSGQGDSLHEHIANLAGSPAIKKGILQTVKVVDELVKVMGRHKPENIVIEMARENQTTQKGQKNSRERMKRIEEGIKELGSQILKEHPVENTQLQNEKLYLYYLQNGRDMYVDQELDINRLSDYDVDHIVPQSFLKDDSIDNKVLTRSDKARGKSDNVPSEEVVKKMKNYWRQLLNAKLITQRKFDNLTKAERGGLSELDKAGFIKRQLVETRQITKHVAQILDSRMNTKYDENDKLIREVKVITLKSKLVSDFRKDFQFYKVREINNYHHAHDAYLNAVVGTALIKKYPKLESEFVYGDYKVYDVRKMIAKSEQEIGKATAKYFFYSNIMNFFKTEITLANGEIRKRPLIETNGETGEIVWDKGRDFATVRKVLSMPQVNIVKKTEVQTGGFSKESILPKRNSDKLIARKKDWDPKKYGGFDSPTVAYSVLVVAKVEKGKSKKLKSVKELLGITIMERSSFEKNPIDFLEAKGYKEVKKDLIIKLPKYSLFELENGRKRMLASAGELQKGNELALPSKYVNFLYLASHYEKLKGSPEDNEQKQLFVEQHKHYLDEIIEQISEFSKRVILADANLDKVLSAYNKHRDKPIREQAENIIHLFTLTNLGAPAAFKYFDTTIDRKRYTSTKEVLDATLIHQSITGLYETRIDLSQLGGDGGGGGGSSGGSGGVLNLEEEYRLHEKPVPSSIDPSWLQLFPTVWAERAGMGLANQVPPVVVELRSGASPVAVRQYPMSKEAREGIRPHIQKFLDLGVLVPCRSPWNTPLLPVKKPGTNDYRPVQDLREINKRVQDIHPTVPNPYNLLSSLPPSYTWYSVLDLKDAFFCLRLHPNSQPLFAFEWKDPEKGNTGQLTWTRLPQGFKNSPTLFNEALHRDLAPFRALNPQVVLLQYVDDLLVAAPTYEDCKKGTQKLLQELSKLGYRVSAKKAQLCQREVTYLGYLLKEGKRWLTPARKATVMKIPVPTTPRQVREFLGKAGFCRLFIPGFASLAAPLYPLTKPSIPFIWTEEHQQAFDHIKKALLSAPALALPDLTKPFTLYIDERAGVARGVLTQTLGPWRRPVAYLSKKLDPVASGWPTCLKAVAAVALLLKDADKLTLGQNVTVIASHSLESIVRQPPDRWMTNARMTHYQSLLLNERVSFAPPAVLNPATLLPVESEATPVHRCSEILAEETGTRRDLEDQPLPGVPTWYTDGSSFITEGKRRAGAPIVDGKRTVWASSLPEGTSAQKAELVALTQALRLAEGKNINIYTDSRYAFATAHIHGAIYKQRGWLTSAGKDIKNKEEILALLEAIHLPRRVAIIHCPGHQRGSNPVATGNRRADEAAKQAALSTRVLAGTTKPAGKRTADGSEFEKRTADGSEFESPKKKAKVE

SEQ ID NO: 1472 - protein, 2092 aa, synthetic construct
MPAAKRVKLDGGDKKYSIGLDIGTNSVGWAVITDEYKVPSKKFKVLGNTDRHSIKKNLIGALLFDSGETAEATRLKRTARRRYTRRKNRICYLQEIFSNEMAKVDDSFFHRLEESFLVEEDKKHERHPIFGNIVDEVAYHEKYPTIYHLRKKLVDSTDKADLRLIYLALAHMIKFRGHFLIEGDLNPDNSDVDKLFIQLVQTYNQLFEENPINASGVDAKAILSARLSKSRRLENLIAQLPGEKKNGLFGNLIALSLGLTPNFKSNFDLAEDAKLQLSKDTYDDDLDNLLAQIGDQYADLFLAAKNLSDAILLSDILRVNTEITKAPLSASMIKRYDEHHQDLTLLKALVRQQLPEKYKEIFFDQSKNGYAGYIDGGASQEEFYKFIKPILEKMDGTEELLVKLNREDLLRKQRTFDNGSIPHQIHLGELHAILRRQEDFYPFLKDNREKIEKILTFRIPYYVGPLARGNSRFAWMTRKSEETITPWNFEEVVDKGASAQSFIERMTNFDKNLPNEKVLPKHSLLYEYFTVYNELTKVKYVTEGMRKPAFLSGEQKKAIVDLLFKTNRKVTVKQLKEDYFKKIECFDSVEISGVEDRFNASLGTYHDLLKIIKDKDFLDNEENEDILEDIVLTLTLFEDREMIEERLKTYAHLFDDKVMKQLKRRRYTGWGRLSRKLINGIRDKQSGKTILDFLKSDGFANRNFMQLIHDDSLTFKEDIQKAQVSGQGDSLHEHIANLAGSPAIKKGILQTVKVVDELVKVMGRHKPENIVIEMARENQTTQKGQKNSRERMKRIEEGIKELGSQILKEHPVENTQLQNEKLYLYYLQNGRDMYVDQELDINRLSDYDVDHIVPQSFLKDDSIDNKVLTRSDKARGKSDNVPSEEVVKKMKNYWRQLLNAKLITQRKFDNLTKAERGGLSELDKAGFIKRQLVETRQITKHVAQILDSRMNTKYDENDKLIREVKVITLKSKLVSDFRKDFQFYKVREINNYHHAHDAYLNAVVGTALIKKYPKLESEFVYGDYKVYDVRKMIAKSEQEIGKATAKYFFYSNIMNFFKTEITLANGEIRKRPLIETNGETGEIVWDKGRDFATVRKVLSMPQVNIVKKTEVQTGGFSKESILPKRNSDKLIARKKDWDPKKYGGFDSPTVAYSVLVVAKVEKGKSKKLKSVKELLGITIMERSSFEKNPIDFLEAKGYKEVKKDLIIKLPKYSLFELENGRKRMLASAGELQKGNELALPSKYVNFLYLASHYEKLKGSPEDNEQKQLFVEQHKHYLDEIIEQISEFSKRVILADANLDKVLSAYNKHRDKPIREQAENIIHLFTLTNLGAPAAFKYFDTTIDRKRYTSTKEVLDATLIHQSITGLYETRIDLSQLGGDGGGGSGGGGSSGGVLNLEEEYRLHEKPVPSSIDPSWLQLFPTVWAERAGMGLANQVPPVVVELRSGASPVAVRQYPMSKEAREGIRPHIQKFLDLGVLVPCRSPWNTPLLPVKKPGTNDYRPVQDLREINKRVQDIHPTVPNPYNLLSSLPPSYTWYSVLDLKDAFFCLRLHPNSQPLFAFEWKDPEKGNTGQLTWTRLPQGFKNSPTLFNEALHRDLAPFRALNPQVVLLQYVDDLLVAAPTYEDCKKGTQKLLQELSKLGYRVSAKKAQLCQREVTYLGYLLKEGKRWLTPARKATVMKIPVPTTPRQVREFLGKAGFCRLFIPGFASLAAPLYPLTKPSIPFIWTEEHQQAFDHIKKALLSAPALALPDLTKPFTLYIDERAGVARGVLTQTLGPWRRPVAYLSKKLDPVASGWPTCLKAVAAVALLLKDADKLTLGQNVTVIASHSLESIVRQPPDRWMTNARMTHYQSLLLNERVSFAPPAVLNPATLLPVESEATPVHRCSEILAEETGTRRDLEDQPLPGVPTWYTDGSSFITEGKRRAGAPIVDGKRTVWASSLPEGTSAQKAELVALTQALRLAEGKNINIYTDSRYAFATAHIHGAIYKQRGWLTSAGKDIKNKEEILALLEAIHLPRRVAIIHCPGHQRGSNPVATGNRRADEAAKQAALSTRVLAGTTKPAGKRTADGSEFEKRTADGSEFESPKKKAKVE

SEQ ID NO: 1473 - protein, 2094 aa, synthetic construct
MPAAKRVKLDGGDKKYSIGLDIGTNSVGWAVITDEYKVPSKKFKVLGNTDRHSIKKNLIGALLFDSGETAEATRLKRTARRRYTRRKNRICYLQEIFSNEMAKVDDSFFHRLEESFLVEEDKKHERHPIFGNIVDEVAYHEKYPTIYHLRKKLVDSTDKADLRLIYLALAHMIKFRGHFLIEGDLNPDNSDVDKLFIQLVQTYNQLFEENPINASGVDAKAILSARLSKSRRLENLIAQLPGEKKNGLFGNLIALSLGLTPNFKSNFDLAEDAKLQLSKDTYDDDLDNLLAQIGDQYADLFLAAKNLSDAILLSDILRVNTEITKAPLSASMIKRYDEHHQDLTLLKALVRQQLPEKYKEIFFDQSKNGYAGYIDGGASQEEFYKFIKPILEKMDGTEELLVKLNREDLLRKQRTFDNGSIPHQIHLGELHAILRRQEDFYPFLKDNREKIEKILTFRIPYYVGPLARGNSRFAWMTRKSEETITPWNFEEVVDKGASAQSFIERMTNFDKNLPNEKVLPKHSLLYEYFTVYNELTKVKYVTEGMRKPAFLSGEQKKAIVDLLFKTNRKVTVKQLKEDYFKKIECFDSVEISGVEDRFNASLGTYHDLLKIIKDKDFLDNEENEDILEDIVLTLTLFEDREMIEERLKTYAHLFDDKVMKQLKRRRYTGWGRLSRKLINGIRDKQSGKTILDFLKSDGFANRNFMQLIHDDSLTFKEDIQKAQVSGQGDSLHEHIANLAGSPAIKKGILQTVKVVDELVKVMGRHKPENIVIEMARENQTTQKGQKNSRERMKRIEEGIKELGSQILKEHPVENTQLQNEKLYLYYLQNGRDMYVDQELDINRLSDYDVDHIVPQSFLKDDSIDNKVLTRSDKARGKSDNVPSEEVVKKMKNYWRQLLNAKLITQRKFDNLTKAERGGLSELDKAGFIKRQLVETRQITKHVAQILDSRMNTKYDENDKLIREVKVITLKSKLVSDFRKDFQFYKVREINNYHHAHDAYLNAVVGTALIKKYPKLESEFVYGDYKVYDVRKMIAKSEQEIGKATAKYFFYSNIMNFFKTEITLANGEIRKRPLIETNGETGEIVWDKGRDFATVRKVLSMPQVNIVKKTEVQTGGFSKESILPKRNSDKLIARKKDWDPKKYGGFDSPTVAYSVLVVAKVEKGKSKKLKSVKELLGITIMERSSFEKNPIDFLEAKGYKEVKKDLIIKLPKYSLFELENGRKRMLASAGELQKGNELALPSKYVNFLYLASHYEKLKGSPEDNEQKQLFVEQHKHYLDEIIEQISEFSKRVILADANLDKVLSAYNKHRDKPIREQAENIIHLFTLTNLGAPAAFKYFDTTIDRKRYTSTKEVLDATLIHQSITGLYETRIDLSQLGGDGGGGSEAAAKGSSGGVLNLEEEYRLHEKPVPSSIDPSWLQLFPTVWAERAGMGLANQVPPVVVELRSGASPVAVRQYPMSKEAREGIRPHIQKFLDLGVLVPCRSPWNTPLLPVKKPGTNDYRPVQDLREINKRVQDIHPTVPNPYNLLSSLPPSYTWYSVLDLKDAFFCLRLHPNSQPLFAFEWKDPEKGNTGQLTWTRLPQGFKNSPTLFNEALHRDLAPFRALNPQVVLLQYVDDLLVAAPTYEDCKKGTQKLLQELSKLGYRVSAKKAQLCQREVTYLGYLLKEGKRWLTPARKATVMKIPVPTTPRQVREFLGKAGFCRLFIPGFASLAAPLYPLTKPSIPFIWTEEHQQAFDHIKKALLSAPALALPDLTKPFTLYIDERAGVARGVLTQTLGPWRRPVAYLSKKLDPVASGWPTCLKAVAAVALLLKDADKLTLGQNVTVIASHSLESIVRQPPDRWMTNARMTHYQSLLLNERVSFAPPAVLNPATLLPVESEATPVHRCSEILAEETGTRRDLEDQPLPGVPTWYTDGSSFITEGKRRAGAPIVDGKRTVWASSLPEGTSAQKAELVALTQALRLAEGKNINIYTDSRYAFATAHIHGAIYKQRGWLTSAGKDIKNKEEILALLEAIHLPRRVAIIHCPGHQRGSNPVATGNRRADEAAKQAALSTRVLAGTTKPAGKRTADGSEFEKRTADGSEFESPKKKAKVE

SEQ ID NO: 1474 - protein, 2094 aa, synthetic construct
MPAAKRVKLDGGDKKYSIGLDIGTNSVGWAVITDEYKVPSKKFKVLGNTDRHSIKKNLIGALLFDSGETAEATRLKRTARRRYTRRKNRICYLQEIFSNEMAKVDDSFFHRLEESFLVEEDKKHERHPIFGNIVDEVAYHEKYPTIYHLRKKLVDSTDKADLRLIYLALAHMIKFRGHFLIEGDLNPDNSDVDKLFIQLVQTYNQLFEENPINASGVDAKAILSARLSKSRRLENLIAQLPGEKKNGLFGNLIALSLGLTPNFKSNFDLAEDAKLQLSKDTYDDDLDNLLAQIGDQYADLFLAAKNLSDAILLSDILRVNTEITKAPLSASMIKRYDEHHQDLTLLKALVRQQLPEKYKEIFFDQSKNGYAGYIDGGASQEEFYKFIKPILEKMDGTEELLVKLNREDLLRKQRTFDNGSIPHQIHLGELHAILRRQEDFYPFLKDNREKIEKILTFRIPYYVGPLARGNSRFAWMTRKSEETITPWNFEEVVDKGASAQSFIERMTNFDKNLPNEKVLPKHSLLYEYFTVYNELTKVKYVTEGMRKPAFLSGEQKKAIVDLLFKTNRKVTVKQLKEDYFKKIECFDSVEISGVEDRFNASLGTYHDLLKIIKDKDFLDNEENEDILEDIVLTLTLFEDREMIEERLKTYAHLFDDKVMKQLKRRRYTGWGRLSRKLINGIRDKQSGKTILDFLKSDGFANRNFMQLIHDDSLTFKEDIQKAQVSGQGDSLHEHIANLAGSPAIKKGILQTVKVVDELVKVMGRHKPENIVIEMARENQTTQKGQKNSRERMKRIEEGIKELGSQILKEHPVENTQLQNEKLYLYYLQNGRDMYVDQELDINRLSDYDVDHIVPQSFLKDDSIDNKVLTRSDKARGKSDNVPSEEVVKKMKNYWRQLLNAKLITQRKFDNLTKAERGGLSELDKAGFIKRQLVETRQITKHVAQILDSRMNTKYDENDKLIREVKVITLKSKLVSDFRKDFQFYKVREINNYHHAHDAYLNAVVGTALIKKYPKLESEFVYGDYKVYDVRKMIAKSEQEIGKATAKYFFYSNIMNFFKTEITLANGEIRKRPLIETNGETGEIVWDKGRDFATVRKVLSMPQVNIVKKTEVQTGGFSKESILPKRNSDKLIARKKDWDPKKYGGFDSPTVAYSVLVVAKVEKGKSKKLKSVKELLGITIMERSSFEKNPIDFLEAKGYKEVKKDLIIKLPKYSLFELENGRKRMLASAGELQKGNELALPSKYVNFLYLASHYEKLKGSPEDNEQKQLFVEQHKHYLDEIIEQISEFSKRVILADANLDKVLSAYNKHRDKPIREQAENIIHLFTLTNLGAPAAFKYFDTTIDRKRYTSTKEVLDATLIHQSITGLYETRIDLSQLGGDGGGSSEAAAKGGSGGVLNLEEEYRLHEKPVPSSIDPSWLQLFPTVWAERAGMGLANQVPPVVVELRSGASPVAVRQYPMSKEAREGIRPHIQKFLDLGVLVPCRSPWNTPLLPVKKPGTNDYRPVQDLREINKRVQDIHPTVPNPYNLLSSLPPSYTWYSVLDLKDAFFCLRLHPNSQPLFAFEWKDPEKGNTGQLTWTRLPQGFKNSPTLFNEALHRDLAPFRALNPQVVLLQYVDDLLVAAPTYEDCKKGTQKLLQELSKLGYRVSAKKAQLCQREVTYLGYLLKEGKRWLTPARKATVMKIPVPTTPRQVREFLGKAGFCRLFIPGFASLAAPLYPLTKPSIPFIWTEEHQQAFDHIKKALLSAPALALPDLTKPFTLYIDERAGVARGVLTQTLGPWRRPVAYLSKKLDPVASGWPTCLKAVAAVALLLKDADKLTLGQNVTVIASHSLESIVRQPPDRWMTNARMTHYQSLLLNERVSFAPPAVLNPATLLPVESEATPVHRCSEILAEETGTRRDLEDQPLPGVPTWYTDGSSFITEGKRRAGAPIVDGKRTVWASSLPEGTSAQKAELVALTQALRLAEGKNINIYTDSRYAFATAHIHGAIYKQRGWLTSAGKDIKNKEEILALLEAIHLPRRVAIIHCPGHQRGSNPVATGNRRADEAAKQAALSTRVLAGTTKPAGKRTADGSEFEKRTADGSEFESPKKKAKVE

SEQ ID NO: 1475 - protein, 2089 aa, synthetic construct
MPAAKRVKLDGGDKKYSIGLDIGTNSVGWAVITDEYKVPSKKFKVLGNTDRHSIKKNLIGALLFDSGETAEATRLKRTARRRYTRRKNRICYLQEIFSNEMAKVDDSFFHRLEESFLVEEDKKHERHPIFGNIVDEVAYHEKYPTIYHLRKKLVDSTDKADLRLIYLALAHMIKFRGHFLIEGDLNPDNSDVDKLFIQLVQTYNQLFEENPINASGVDAKAILSARLSKSRRLENLIAQLPGEKKNGLFGNLIALSLGLTPNFKSNFDLAEDAKLQLSKDTYDDDLDNLLAQIGDQYADLFLAAKNLSDAILLSDILRVNTEITKAPLSASMIKRYDEHHQDLTLLKALVRQQLPEKYKEIFFDQSKNGYAGYIDGGASQEEFYKFIKPILEKMDGTEELLVKLNREDLLRKQRTFDNGSIPHQIHLGELHAILRRQEDFYPFLKDNREKIEKILTFRIPYYVGPLARGNSRFAWMTRKSEETITPWNFEEVVDKGASAQSFIERMTNFDKNLPNEKVLPKHSLLYEYFTVYNELTKVKYVTEGMRKPAFLSGEQKKAIVDLLFKTNRKVTVKQLKEDYFKKIECFDSVEISGVEDRFNASLGTYHDLLKIIKDKDFLDNEENEDILEDIVLTLTLFEDREMIEERLKTYAHLFDDKVMKQLKRRRYTGWGRLSRKLINGIRDKQSGKTILDFLKSDGFANRNFMQLIHDDSLTFKEDIQKAQVSGQGDSLHEHIANLAGSPAIKKGILQTVKVVDELVKVMGRHKPENIVIEMARENQTTQKGQKNSRERMKRIEEGIKELGSQILKEHPVENTQLQNEKLYLYYLQNGRDMYVDQELDINRLSDYDVDHIVPQSFLKDDSIDNKVLTRSDKARGKSDNVPSEEVVKKMKNYWRQLLNAKLITQRKFDNLTKAERGGLSELDKAGFIKRQLVETRQITKHVAQILDSRMNTKYDENDKLIREVKVITLKSKLVSDFRKDFQFYKVREINNYHHAHDAYLNAVVGTALIKKYPKLESEFVYGDYKVYDVRKMIAKSEQEIGKATAKYFFYSNIMNFFKTEITLANGEIRKRPLIETNGETGEIVWDKGRDFATVRKVLSMPQVNIVKKTEVQTGGFSKESILPKRNSDKLIARKKDWDPKKYGGFDSPTVAYSVLVVAKVEKGKSKKLKSVKELLGITIMERSSFEKNPIDFLEAKGYKEVKKDLIIKLPKYSLFELENGRKRMLASAGELQKGNELALPSKYVNFLYLASHYEKLKGSPEDNEQKQLFVEQHKHYLDEIIEQISEFSKRVILADANLDKVLSAYNKHRDKPIREQAENIIHLFTLTNLGAPAAFKYFDTTIDRKRYTSTKEVLDATLIHQSITGLYETRIDLSQLGGDGGGGSGGSGGVLNLEEEYRLHEKPVPSSIDPSWLQLFPTVWAERAGMGLANQVPPVVVELRSGASPVAVRQYPMSKEAREGIRPHIQKFLDLGVLVPCRSPWNTPLLPVKKPGTNDYRPVQDLREINKRVQDIHPTVPNPYNLLSSLPPSYTWYSVLDLKDAFFCLRLHPNSQPLFAFEWKDPEKGNTGQLTWTRLPQGFKNSPTLFNEALHRDLAPFRALNPQVVLLQYVDDLLVAAPTYEDCKKGTQKLLQELSKLGYRVSAKKAQLCQREVTYLGYLLKEGKRWLTPARKATVMKIPVPTTPRQVREFLGKAGFCRLFIPGFASLAAPLYPLTKPSIPFIWTEEHQQAFDHIKKALLSAPALALPDLTKPFTLYIDERAGVARGVLTQTLGPWRRPVAYLSKKLDPVASGWPTCLKAVAAVALLLKDADKLTLGQNVTVIASHSLESIVRQPPDRWMTNARMTHYQSLLLNERVSFAPPAVLNPATLLPVESEATPVHRCSEILAEETGTRRDLEDQPLPGVPTWYTDGSSFITEGKRRAGAPIVDGKRTVWASSLPEGTSAQKAELVALTQALRLAEGKNINIYTDSRYAFATAHIHGAIYKQRGWLTSAGKDIKNKEEILALLEAIHLPRRVAIIHCPGHQRGSNPVATGNRRADEAAKQAALSTRVLAGTTKPAGKRTADGSEFEKRTADGSEFESPKKKAKVE

SEQ ID NO: 1476 - protein, 2092 aa, synthetic construct
MPAAKRVKLDGGDKKYSIGLDIGTNSVGWAVITDEYKVPSKKFKVLGNTDRHSIKKNLIGALLFDSGETAEATRLKRTARRRYTRRKNRICYLQEIFSNEMAKVDDSFFHRLEESFLVEEDKKHERHPIFGNIVDEVAYHEKYPTIYHLRKKLVDSTDKADLRLIYLALAHMIKFRGHFLIEGDLNPDNSDVDKLFIQLVQTYNQLFEENPINASGVDAKAILSARLSKSRRLENLIAQLPGEKKNGLFGNLIALSLGLTPNFKSNFDLAEDAKLQLSKDTYDDDLDNLLAQIGDQYADLFLAAKNLSDAILLSDILRVNTEITKAPLSASMIKRYDEHHQDLTLLKALVRQQLPEKYKEIFFDQSKNGYAGYIDGGASQEEFYKFIKPILEKMDGTEELLVKLNREDLLRKQRTFDNGSIPHQIHLGELHAILRRQEDFYPFLKDNREKIEKILTFRIPYYVGPLARGNSRFAWMTRKSEETITPWNFEEVVDKGASAQSFIERMTNFDKNLPNEKVLPKHSLLYEYFTVYNELTKVKYVTEGMRKPAFLSGEQKKAIVDLLFKTNRKVTVKQLKEDYFKKIECFDSVEISGVEDRFNASLGTYHDLLKIIKDKDFLDNEENEDILEDIVLTLTLFEDREMIEERLKTYAHLFDDKVMKQLKRRRYTGWGRLSRKLINGIRDKQSGKTILDFLKSDGFANRNFMQLIHDDSLTFKEDIQKAQVSGQGDSLHEHIANLAGSPAIKKGILQTVKVVDELVKVMGRHKPENIVIEMARENQTTQKGQKNSRERMKRIEEGIKELGSQILKEHPVENTQLQNEKLYLYYLQNGRDMYVDQELDINRLSDYDVDHIVPQSFLKDDSIDNKVLTRSDKARGKSDNVPSEEVVKKMKNYWRQLLNAKLITQRKFDNLTKAERGGLSELDKAGFIKRQLVETRQITKHVAQILDSRMNTKYDENDKLIREVKVITLKSKLVSDFRKDFQFYKVREINNYHHAHDAYLNAVVGTALIKKYPKLESEFVYGDYKVYDVRKMIAKSEQEIGKATAKYFFYSNIMNFFKTEITLANGEIRKRPLIETNGETGEIVWDKGRDFATVRKVLSMPQVNIVKKTEVQTGGFSKESILPKRNSDKLIARKKDWDPKKYGGFDSPTVAYSVLVVAKVEKGKSKKLKSVKELLGITIMERSSFEKNPIDFLEAKGYKEVKKDLIIKLPKYSLFELENGRKRMLASAGELQKGNELALPSKYVNFLYLASHYEKLKGSPEDNEQKQLFVEQHKHYLDEIIEQISEFSKRVILADANLDKVLSAYNKHRDKPIREQAENIIHLFTLTNLGAPAAFKYFDTTIDRKRYTSTKEVLDATLIHQSITGLYETRIDLSQLGGDGGGGSGSSPAPGGVLNLEEEYRLHEKPVPSSIDPSWLQLFPTVWAERAGMGLANQVPPVVVELRSGASPVAVRQYPMSKEAREGIRPHIQKFLDLGVLVPCRSPWNTPLLPVKKPGTNDYRPVQDLREINKRVQDIHPTVPNPYNLLSSLPPSYTWYSVLDLKDAFFCLRLHPNSQPLFAFEWKDPEKGNTGQLTWTRLPQGFKNSPTLFNEALHRDLAPFRALNPQVVLLQYVDDLLVAAPTYEDCKKGTQKLLQELSKLGYRVSAKKAQLCQREVTYLGYLLKEGKRWLTPARKATVMKIPVPTTPRQVREFLGKAGFCRLFIPGFASLAAPLYPLTKPSIPFIWTEEHQQAFDHIKKALLSAPALALPDLTKPFTLYIDERAGVARGVLTQTLGPWRRPVAYLSKKLDPVASGWPTCLKAVAAVALLLKDADKLTLGQNVTVIASHSLESIVRQPPDRWMTNARMTHYQSLLLNERVSFAPPAVLNPATLLPVESEATPVHRCSEILAEETGTRRDLEDQPLPGVPTWYTDGSSFITEGKRRAGAPIVDGKRTVWASSLPEGTSAQKAELVALTQALRLAEGKNINIYTDSRYAFATAHIHGAIYKQRGWLTSAGKDIKNKEEILALLEAIHLPRRVAIIHCPGHQRGSNPVATGNRRADEAAKQAALSTRVLAGTTKPAGKRTADGSEFEKRTADGSEFESPKKKAKVE

SEQ ID NO: 1477 - protein, 2092 aa, synthetic construct
MPAAKRVKLDGGDKKYSIGLDIGTNSVGWAVITDEYKVPSKKFKVLGNTDRHSIKKNLIGALLFDSGETAEATRLKRTARRRYTRRKNRICYLQEIFSNEMAKVDDSFFHRLEESFLVEEDKKHERHPIFGNIVDEVAYHEKYPTIYHLRKKLVDSTDKADLRLIYLALAHMIKFRGHFLIEGDLNPDNSDVDKLFIQLVQTYNQLFEENPINASGVDAKAILSARLSKSRRLENLIAQLPGEKKNGLFGNLIALSLGLTPNFKSNFDLAEDAKLQLSKDTYDDDLDNLLAQIGDQYADLFLAAKNLSDAILLSDILRVNTEITKAPLSASMIKRYDEHHQDLTLLKALVRQQLPEKYKEIFFDQSKNGYAGYIDGGASQEEFYKFIKPILEKMDGTEELLVKLNREDLLRKQRTFDNGSIPHQIHLGELHAILRRQEDFYPFLKDNREKIEKILTFRIPYYVGPLARGNSRFAWMTRKSEETITPWNFEEVVDKGASAQSFIERMTNFDKNLPNEKVLPKHSLLYEYFTVYNELTKVKYVTEGMRKPAFLSGEQKKAIVDLLFKTNRKVTVKQLKEDYFKKIECFDSVEISGVEDRFNASLGTYHDLLKIIKDKDFLDNEENEDILEDIVLTLTLFEDREMIEERLKTYAHLFDDKVMKQLKRRRYTGWGRLSRKLINGIRDKQSGKTILDFLKSDGFANRNFMQLIHDDSLTFKEDIQKAQVSGQGDSLHEHIANLAGSPAIKKGILQTVKVVDELVKVMGRHKPENIVIEMARENQTTQKGQKNSRERMKRIEEGIKELGSQILKEHPVENTQLQNEKLYLYYLQNGRDMYVDQELDINRLSDYDVDHIVPQSFLKDDSIDNKVLTRSDKARGKSDNVPSEEVVKKMKNYWRQLLNAKLITQRKFDNLTKAERGGLSELDKAGFIKRQLVETRQITKHVAQILDSRMNTKYDENDKLIREVKVITLKSKLVSDFRKDFQFYKVREINNYHHAHDAYLNAVVGTALIKKYPKLESEFVYGDYKVYDVRKMIAKSEQEIGKATAKYFFYSNIMNFFKTEITLANGEIRKRPLIETNGETGEIVWDKGRDFATVRKVLSMPQVNIVKKTEVQTGGFSKESILPKRNSDKLIARKKDWDPKKYGGFDSPTVAYSVLVVAKVEKGKSKKLKSVKELLGITIMERSSFEKNPIDFLEAKGYKEVKKDLIIKLPKYSLFELENGRKRMLASAGELQKGNELALPSKYVNFLYLASHYEKLKGSPEDNEQKQLFVEQHKHYLDEIIEQISEFSKRVILADANLDKVLSAYNKHRDKPIREQAENIIHLFTLTNLGAPAAFKYFDTTIDRKRYTSTKEVLDATLIHQSITGLYETRIDLSQLGGDGGGSSGGGGGSGGVLNLEEEYRLHEKPVPSSIDPSWLQLFPTVWAERAGMGLANQVPPVVVELRSGASPVAVRQYPMSKEAREGIRPHIQKFLDLGVLVPCRSPWNTPLLPVKKPGTNDYRPVQDLREINKRVQDIHPTVPNPYNLLSSLPPSYTWYSVLDLKDAFFCLRLHPNSQPLFAFEWKDPEKGNTGQLTWTRLPQGFKNSPTLFNEALHRDLAPFRALNPQVVLLQYVDDLLVAAPTYEDCKKGTQKLLQELSKLGYRVSAKKAQLCQREVTYLGYLLKEGKRWLTPARKATVMKIPVPTTPRQVREFLGKAGFCRLFIPGFASLAAPLYPLTKPSIPFIWTEEHQQAFDHIKKALLSAPALALPDLTKPFTLYIDERAGVARGVLTQTLGPWRRPVAYLSKKLDPVASGWPTCLKAVAAVALLLKDADKLTLGQNVTVIASHSLESIVRQPPDRWMTNARMTHYQSLLLNERVSFAPPAVLNPATLLPVESEATPVHRCSEILAEETGTRRDLEDQPLPGVPTWYTDGSSFITEGKRRAGAPIVDGKRTVWASSLPEGTSAQKAELVALTQALRLAEGKNINIYTDSRYAFATAHIHGAIYKQRGWLTSAGKDIKNKEEILALLEAIHLPRRVAIIHCPGHQRGSNPVATGNRRADEAAKQAALSTRVLAGTTKPAGKRTADGSEFEKRTADGSEFESPKKKAKVE

SEQ ID NO: 1478 - protein, 2007 aa, synthetic construct
MPAAKRVKLDGGDKKYSIGLDIGTNSVGWAVITDEYKVPSKKFKVLGNTDRHSIKKNLIGALLFDSGETAEATRLKRTARRRYTRRKNRICYLQEIFSNEMAKVDDSFFHRLEESFLVEEDKKHERHPIFGNIVDEVAYHEKYPTIYHLRKKLVDSTDKADLRLIYLALAHMIKFRGHFLIEGDLNPDNSDVDKLFIQLVQTYNQLFEENPINASGVDAKAILSARLSKSRRLENLIAQLPGEKKNGLFGNLIALSLGLTPNFKSNFDLAEDAKLQLSKDTYDDDLDNLLAQIGDQYADLFLAAKNLSDAILLSDILRVNTEITKAPLSASMIKRYDEHHQDLTLLKALVRQQLPEKYKEIFFDQSKNGYAGYIDGGASQEEFYKFIKPILEKMDGTEELLVKLNREDLLRKQRTFDNGSIPHQIHLGELHAILRRQEDFYPFLKDNREKIEKILTFRIPYYVGPLARGNSRFAWMTRKSEETITPWNFEEVVDKGASAQSFIERMTNFDKNLPNEKVLPKHSLLYEYFTVYNELTKVKYVTEGMRKPAFLSGEQKKAIVDLLFKTNRKVTVKQLKEDYFKKIECFDSVEISGVEDRFNASLGTYHDLLKIIKDKDFLDNEENEDILEDIVLTLTLFEDREMIEERLKTYAHLFDDKVMKQLKRRRYTGWGRLSRKLINGIRDKQSGKTILDFLKSDGFANRNFMQLIHDDSLTFKEDIQKAQVSGQGDSLHEHIANLAGSPAIKKGILQTVKVVDELVKVMGRHKPENIVIEMARENQTTQKGQKNSRERMKRIEEGIKELGSQILKEHPVENTQLQNEKLYLYYLQNGRDMYVDQELDINRLSDYDVDHIVPQSFLKDDSIDNKVLTRSDKARGKSDNVPSEEVVKKMKNYWRQLLNAKLITQRKFDNLTKAERGGLSELDKAGFIKRQLVETRQITKHVAQILDSRMNTKYDENDKLIREVKVITLKSKLVSDFRKDFQFYKVREINNYHHAHDAYLNAVVGTALIKKYPKLESEFVYGDYKVYDVRKMIAKSEQEIGKATAKYFFYSNIMNFFKTEITLANGEIRKRPLIETNGETGEIVWDKGRDFATVRKVLSMPQVNIVKKTEVQTGGFSKESILPKRNSDKLIARKKDWDPKKYGGFDSPTVAYSVLVVAKVEKGKSKKLKSVKELLGITIMERSSFEKNPIDFLEAKGYKEVKKDLIIKLPKYSLFELENGRKRMLASAGELQKGNELALPSKYVNFLYLASHYEKLKGSPEDNEQKQLFVEQHKHYLDEIIEQISEFSKRVILADANLDKVLSAYNKHRDKPIREQAENIIHLFTLTNLGAPAAFKYFDTTIDRKRYTSTKEVLDATLIHQSITGLYETRIDLSQLGGDGGGGGGGGGAVLGLEHLPRPPQISQFPLNPERLQALQHLVRKALEAGHIEPYTGPGNNPVFPVKKANGTWRFIHDLRATNSLTIDLSSSSPGPPDLSSLPTTLAHLQTIDLRDAFFQIPLPKQFQPYFAFTVPQQCNYGPGTRYAWKVLPQGFKNSPTLFEMQLAHILQPIRQAFPQCTILQYMDDILLASPSHEDLLLLSEATMASLISHGLPVSENKTQQTPGTIKFLGQIISPNHLTYDAVPTVPIRSRWALPELQALLGEIQWVSKGTPTLRQPLHSLYCALQRHTDPRDQIYLNPSQVQSLVQLRQALSQNCRSRLVQTLPLLGAIMLTLTGTTTVVFQSKEQWPLVWLHAPLPHTSQCPWGQLLASAVLLLDKYTLQSYGLLCQTIHHNISTQTFNQFIQTSDHPSVPILLHHSHRFKNLGAQTGELWNTFLKTAAPLAPVKALMPVFTLSPVIINTAPCLFSDGSTSRAAYILWDKQILSQRSFPLPPPHKSAQRAELLGLLHGLSSARSWRCLNIFLDSKYLYHYLRTLALGTFQGRSSQAPFQALLPRLLSRKVVYLHHVRSHTNLPDPISRLNALTDALLITPVLQLAGKRTADGSEFEKRTADGSEFESPKKKAKVE

SEQ ID NO: 1479 - protein, 2013 aa, synthetic construct
MPAAKRVKLDGGDKKYSIGLDIGTNSVGWAVITDEYKVPSKKFKVLGNTDRHSIKKNLIGALLFDSGETAEATRLKRTARRRYTRRKNRICYLQEIFSNEMAKVDDSFFHRLEESFLVEEDKKHERHPIFGNIVDEVAYHEKYPTIYHLRKKLVDSTDKADLRLIYLALAHMIKFRGHFLIEGDLNPDNSDVDKLFIQLVQTYNQLFEENPINASGVDAKAILSARLSKSRRLENLIAQLPGEKKNGLFGNLIALSLGLTPNFKSNFDLAEDAKLQLSKDTYDDDLDNLLAQIGDQYADLFLAAKNLSDAILLSDILRVNTEITKAPLSASMIKRYDEHHQDLTLLKALVRQQLPEKYKEIFFDQSKNGYAGYIDGGASQEEFYKFIKPILEKMDGTEELLVKLNREDLLRKQRTFDNGSIPHQIHLGELHAILRRQEDFYPFLKDNREKIEKILTFRIPYYVGPLARGNSRFAWMTRKSEETITPWNFEEVVDKGASAQSFIERMTNFDKNLPNEKVLPKHSLLYEYFTVYNELTKVKYVTEGMRKPAFLSGEQKKAIVDLLFKTNRKVTVKQLKEDYFKKIECFDSVEISGVEDRFNASLGTYHDLLKIIKDKDFLDNEENEDILEDIVLTLTLFEDREMIEERLKTYAHLFDDKVMKQLKRRRYTGWGRLSRKLINGIRDKQSGKTILDFLKSDGFANRNFMQLIHDDSLTFKEDIQKAQVSGQGDSLHEHIANLAGSPAIKKGILQTVKVVDELVKVMGRHKPENIVIEMARENQTTQKGQKNSRERMKRIEEGIKELGSQILKEHPVENTQLQNEKLYLYYLQNGRDMYVDQELDINRLSDYDVDHIVPQSFLKDDSIDNKVLTRSDKARGKSDNVPSEEVVKKMKNYWRQLLNAKLITQRKFDNLTKAERGGLSELDKAGFIKRQLVETRQITKHVAQILDSRMNTKYDENDKLIREVKVITLKSKLVSDFRKDFQFYKVREINNYHHAHDAYLNAVVGTALIKKYPKLESEFVYGDYKVYDVRKMIAKSEQEIGKATAKYFFYSNIMNFFKTEITLANGEIRKRPLIETNGETGEIVWDKGRDFATVRKVLSMPQVNIVKKTEVQTGGFSKESILPKRNSDKLIARKKDWDPKKYGGFDSPTVAYSVLVVAKVEKGKSKKLKSVKELLGITIMERSSFEKNPIDFLEAKGYKEVKKDLIIKLPKYSLFELENGRKRMLASAGELQKGNELALPSKYVNFLYLASHYEKLKGSPEDNEQKQLFVEQHKHYLDEIIEQISEFSKRVILADANLDKVLSAYNKHRDKPIREQAENIIHLFTLTNLGAPAAFKYFDTTIDRKRYTSTKEVLDATLIHQSITGLYETRIDLSQLGGDGGPAPAPAPAPAPGGAVLGLEHLPRPPQISQFPLNPERLQALQHLVRKALEAGHIEPYTGPGNNPVFPVKKANGTWRFIHDLRATNSLTIDLSSSSPGPPDLSSLPTTLAHLQTIDLRDAFFQIPLPKQFQPYFAFTVPQQCNYGPGTRYAWKVLPQGFKNSPTLFEMQLAHILQPIRQAFPQCTILQYMDDILLASPSHEDLLLLSEATMASLISHGLPVSENKTQQTPGTIKFLGQIISPNHLTYDAVPTVPIRSRWALPELQALLGEIQWVSKGTPTLRQPLHSLYCALQRHTDPRDQIYLNPSQVQSLVQLRQALSQNCRSRLVQTLPLLGAIMLTLTGTTTVVFQSKEQWPLVWLHAPLPHTSQCPWGQLLASAVLLLDKYTLQSYGLLCQTIHHNISTQTFNQFIQTSDHPSVPILLHHSHRFKNLGAQTGELWNTFLKTAAPLAPVKALMPVFTLSPVIINTAPCLFSDGSTSRAAYILWDKQILSQRSFPLPPPHKSAQRAELLGLLHGLSSARSWRCLNIFLDSKYLYHYLRTLALGTFQGRSSQAPFQALLPRLLSRKVVYLHHVRSHTNLPDPISRLNALTDALLITPVLQLAGKRTADGSEFEKRTADGSEFESPKKKAKVE

SEQ ID NO: 1480 - protein, 2013 aa, synthetic construct
MPAAKRVKLDGGDKKYSIGLDIGTNSVGWAVITDEYKVPSKKFKVLGNTDRHSIKKNLIGALLFDSGETAEATRLKRTARRRYTRRKNRICYLQEIFSNEMAKVDDSFFHRLEESFLVEEDKKHERHPIFGNIVDEVAYHEKYPTIYHLRKKLVDSTDKADLRLIYLALAHMIKFRGHFLIEGDLNPDNSDVDKLFIQLVQTYNQLFEENPINASGVDAKAILSARLSKSRRLENLIAQLPGEKKNGLFGNLIALSLGLTPNFKSNFDLAEDAKLQLSKDTYDDDLDNLLAQIGDQYADLFLAAKNLSDAILLSDILRVNTEITKAPLSASMIKRYDEHHQDLTLLKALVRQQLPEKYKEIFFDQSKNGYAGYIDGGASQEEFYKFIKPILEKMDGTEELLVKLNREDLLRKQRTFDNGSIPHQIHLGELHAILRRQEDFYPFLKDNREKIEKILTFRIPYYVGPLARGNSRFAWMTRKSEETITPWNFEEVVDKGASAQSFIERMTNFDKNLPNEKVLPKHSLLYEYFTVYNELTKVKYVTEGMRKPAFLSGEQKKAIVDLLFKTNRKVTVKQLKEDYFKKIECFDSVEISGVEDRFNASLGTYHDLLKIIKDKDFLDNEENEDILEDIVLTLTLFEDREMIEERLKTYAHLFDDKVMKQLKRRRYTGWGRLSRKLINGIRDKQSGKTILDFLKSDGFANRNFMQLIHDDSLTFKEDIQKAQVSGQGDSLHEHIANLAGSPAIKKGILQTVKVVDELVKVMGRHKPENIVIEMARENQTTQKGQKNSRERMKRIEEGIKELGSQILKEHPVENTQLQNEKLYLYYLQNGRDMYVDQELDINRLSDYDVDHIVPQSFLKDDSIDNKVLTRSDKARGKSDNVPSEEVVKKMKNYWRQLLNAKLITQRKFDNLTKAERGGLSELDKAGFIKRQLVETRQITKHVAQILDSRMNTKYDENDKLIREVKVITLKSKLVSDFRKDFQFYKVREINNYHHAHDAYLNAVVGTALIKKYPKLESEFVYGDYKVYDVRKMIAKSEQEIGKATAKYFFYSNIMNFFKTEITLANGEIRKRPLIETNGETGEIVWDKGRDFATVRKVLSMPQVNIVKKTEVQTGGFSKESILPKRNSDKLIARKKDWDPKKYGGFDSPTVAYSVLVVAKVEKGKSKKLKSVKELLGITIMERSSFEKNPIDFLEAKGYKEVKKDLIIKLPKYSLFELENGRKRMLASAGELQKGNELALPSKYVNFLYLASHYEKLKGSPEDNEQKQLFVEQHKHYLDEIIEQISEFSKRVILADANLDKVLSAYNKHRDKPIREQAENIIHLFTLTNLGAPAAFKYFDTTIDRKRYTSTKEVLDATLIHQSITGLYETRIDLSQLGGDGGPAPEAAAKGGSGGAVLGLEHLPRPPQISQFPLNPERLQALQHLVRKALEAGHIEPYTGPGNNPVFPVKKANGTWRFIHDLRATNSLTIDLSSSSPGPPDLSSLPTTLAHLQTIDLRDAFFQIPLPKQFQPYFAFTVPQQCNYGPGTRYAWKVLPQGFKNSPTLFEMQLAHILQPIRQAFPQCTILQYMDDILLASPSHEDLLLLSEATMASLISHGLPVSENKTQQTPGTIKFLGQIISPNHLTYDAVPTVPIRSRWALPELQALLGEIQWVSKGTPTLRQPLHSLYCALQRHTDPRDQIYLNPSQVQSLVQLRQALSQNCRSRLVQTLPLLGAIMLTLTGTTTVVFQSKEQWPLVWLHAPLPHTSQCPWGQLLASAVLLLDKYTLQSYGLLCQTIHHNISTQTFNQFIQTSDHPSVPILLHHSHRFKNLGAQTGELWNTFLKTAAPLAPVKALMPVFTLSPVIINTAPCLFSDGSTSRAAYILWDKQILSQRSFPLPPPHKSAQRAELLGLLHGLSSARSWRCLNIFLDSKYLYHYLRTLALGTFQGRSSQAPFQALLPRLLSRKVVYLHHVRSHTNLPDPISRLNALTDALLITPVLQLAGKRTADGSEFEKRTADGSEFESPKKKAKVE

SEQ ID NO: 1481 - protein, 2011 aa, synthetic construct
MPAAKRVKLDGGDKKYSIGLDIGTNSVGWAVITDEYKVPSKKFKVLGNTDRHSIKKNLIGALLFDSGETAEATRLKRTARRRYTRRKNRICYLQEIFSNEMAKVDDSFFHRLEESFLVEEDKKHERHPIFGNIVDEVAYHEKYPTIYHLRKKLVDSTDKADLRLIYLALAHMIKFRGHFLIEGDLNPDNSDVDKLFIQLVQTYNQLFEENPINASGVDAKAILSARLSKSRRLENLIAQLPGEKKNGLFGNLIALSLGLTPNFKSNFDLAEDAKLQLSKDTYDDDLDNLLAQIGDQYADLFLAAKNLSDAILLSDILRVNTEITKAPLSASMIKRYDEHHQDLTLLKALVRQQLPEKYKEIFFDQSKNGYAGYIDGGASQEEFYKFIKPILEKMDGTEELLVKLNREDLLRKQRTFDNGSIPHQIHLGELHAILRRQEDFYPFLKDNREKIEKILTFRIPYYVGPLARGNSRFAWMTRKSEETITPWNFEEVVDKGASAQSFIERMTNFDKNLPNEKVLPKHSLLYEYFTVYNELTKVKYVTEGMRKPAFLSGEQKKAIVDLLFKTNRKVTVKQLKEDYFKKIECFDSVEISGVEDRFNASLGTYHDLLKIIKDKDFLDNEENEDILEDIVLTLTLFEDREMIEERLKTYAHLFDDKVMKQLKRRRYTGWGRLSRKLINGIRDKQSGKTILDFLKSDGFANRNFMQLIHDDSLTFKEDIQKAQVSGQGDSLHEHIANLAGSPAIKKGILQTVKVVDELVKVMGRHKPENIVIEMARENQTTQKGQKNSRERMKRIEEGIKELGSQILKEHPVENTQLQNEKLYLYYLQNGRDMYVDQELDINRLSDYDVDHIVPQSFLKDDSIDNKVLTRSDKARGKSDNVPSEEVVKKMKNYWRQLLNAKLITQRKFDNLTKAERGGLSELDKAGFIKRQLVETRQITKHVAQILDSRMNTKYDENDKLIREVKVITLKSKLVSDFRKDFQFYKVREINNYHHAHDAYLNAVVGTALIKKYPKLESEFVYGDYKVYDVRKMIAKSEQEIGKATAKYFFYSNIMNFFKTEITLANGEIRKRPLIETNGETGEIVWDKGRDFATVRKVLSMPQVNIVKKTEVQTGGFSKESILPKRNSDKLIARKKDWDPKKYGGFDSPTVAYSVLVVAKVEKGKSKKLKSVKELLGITIMERSSFEKNPIDFLEAKGYKEVKKDLIIKLPKYSLFELENGRKRMLASAGELQKGNELALPSKYVNFLYLASHYEKLKGSPEDNEQKQLFVEQHKHYLDEIIEQISEFSKRVILADANLDKVLSAYNKHRDKPIREQAENIIHLFTLTNLGAPAAFKYFDTTIDRKRYTSTKEVLDATLIHQSITGLYETRIDLSQLGGDGGPAPGSSGGGGGAVLGLEHLPRPPQISQFPLNPERLQALQHLVRKALEAGHIEPYTGPGNNPVFPVKKANGTWRFIHDLRATNSLTIDLSSSSPGPPDLSSLPTTLAHLQTIDLRDAFFQIPLPKQFQPYFAFTVPQQCNYGPGTRYAWKVLPQGFKNSPTLFEMQLAHILQPIRQAFPQCTILQYMDDILLASPSHEDLLLLSEATMASLISHGLPVSENKTQQTPGTIKFLGQIISPNHLTYDAVPTVPIRSRWALPELQALLGEIQWVSKGTPTLRQPLHSLYCALQRHTDPRDQIYLNPSQVQSLVQLRQALSQNCRSRLVQTLPLLGAIMLTLTGTTTVVFQSKEQWPLVWLHAPLPHTSQCPWGQLLASAVLLLDKYTLQSYGLLCQTIHHNISTQTFNQFIQTSDHPSVPILLHHSHRFKNLGAQTGELWNTFLKTAAPLAPVKALMPVFTLSPVIINTAPCLFSDGSTSRAAYILWDKQILSQRSFPLPPPHKSAQRAELLGLLHGLSSARSWRCLNIFLDSKYLYHYLRTLALGTFQGRSSQAPFQALLPRLLSRKVVYLHHVRSHTNLPDPISRLNALTDALLITPVLQLAGKRTADGSEFEKRTADGSEFESPKKKAKVE

SEQ ID NO: 1482 - protein, 2013 aa, synthetic construct
MPAAKRVKLDGGDKKYSIGLDIGTNSVGWAVITDEYKVPSKKFKVLGNTDRHSIKKNLIGALLFDSGETAEATRLKRTARRRYTRRKNRICYLQEIFSNEMAKVDDSFFHRLEESFLVEEDKKHERHPIFGNIVDEVAYHEKYPTIYHLRKKLVDSTDKADLRLIYLALAHMIKFRGHFLIEGDLNPDNSDVDKLFIQLVQTYNQLFEENPINASGVDAKAILSARLSKSRRLENLIAQLPGEKKNGLFGNLIALSLGLTPNFKSNFDLAEDAKLQLSKDTYDDDLDNLLAQIGDQYADLFLAAKNLSDAILLSDILRVNTEITKAPLSASMIKRYDEHHQDLTLLKALVRQQLPEKYKEIFFDQSKNGYAGYIDGGASQEEFYKFIKPILEKMDGTEELLVKLNREDLLRKQRTFDNGSIPHQIHLGELHAILRRQEDFYPFLKDNREKIEKILTFRIPYYVGPLARGNSRFAWMTRKSEETITPWNFEEVVDKGASAQSFIERMTNFDKNLPNEKVLPKHSLLYEYFTVYNELTKVKYVTEGMRKPAFLSGEQKKAIVDLLFKTNRKVTVKQLKEDYFKKIECFDSVEISGVEDRFNASLGTYHDLLKIIKDKDFLDNEENEDILEDIVLTLTLFEDREMIEERLKTYAHLFDDKVMKQLKRRRYTGWGRLSRKLINGIRDKQSGKTILDFLKSDGFANRNFMQLIHDDSLTFKEDIQKAQVSGQGDSLHEHIANLAGSPAIKKGILQTVKVVDELVKVMGRHKPENIVIEMARENQTTQKGQKNSRERMKRIEEGIKELGSQILKEHPVENTQLQNEKLYLYYLQNGRDMYVDQELDINRLSDYDVDHIVPQSFLKDDSIDNKVLTRSDKARGKSDNVPSEEVVKKMKNYWRQLLNAKLITQRKFDNLTKAERGGLSELDKAGFIKRQLVETRQITKHVAQILDSRMNTKYDENDKLIREVKVITLKSKLVSDFRKDFQFYKVREINNYHHAHDAYLNAVVGTALIKKYPKLESEFVYGDYKVYDVRKMIAKSEQEIGKATAKYFFYSNIMNFFKTEITLANGEIRKRPLIETNGETGEIVWDKGRDFATVRKVLSMPQVNIVKKTEVQTGGFSKESILPKRNSDKLIARKKDWDPKKYGGFDSPTVAYSVLVVAKVEKGKSKKLKSVKELLGITIMERSSFEKNPIDFLEAKGYKEVKKDLIIKLPKYSLFELENGRKRMLASAGELQKGNELALPSKYVNFLYLASHYEKLKGSPEDNEQKQLFVEQHKHYLDEIIEQISEFSKRVILADANLDKVLSAYNKHRDKPIREQAENIIHLFTLTNLGAPAAFKYFDTTIDRKRYTSTKEVLDATLIHQSITGLYETRIDLSQLGGDGGEAAAKGSSGGSGGAVLGLEHLPRPPQISQFPLNPERLQALQHLVRKALEAGHIEPYTGPGNNPVFPVKKANGTWRFIHDLRATNSLTIDLSSSSPGPPDLSSLPTTLAHLQTIDLRDAFFQIPLPKQFQPYFAFTVPQQCNYGPGTRYAWKVLPQGFKNSPTLFQMQLAHILQPIRQAFPQCTILQYMDDILLASPSHEDLLLLSEATMASLISHGLPVSENKTQQTPGTIKFLGQIISPNHLTYDAVPTVPIRSRWALPELQALLGEIQWVSKGTPTLRQPLHSLYCALQPHTDPRDQIYLNPSQVQSLVQLRQALSQNCRSRLVQTLPLLGAIMLTLTGTTTVVFQSKEQWPLVWLHAPLPHTSQCPWGQLLASAVLLLDKYTLQSYGLLCQTIHHNISTQTFNQFIQTSDHPSVPILLHHSHRFKNLGAQTGELWNTFLKTAAPLAPVKALMPVFTLSPVIINTAPCLFSDGSTSRAAYILWDKQILSQRSFPLPPPHKSAQRAELLGLLHGLSSARSWRCLNIFLDSKYLYHYLRTLALGTFQGRSSQAPFQALLPRLLSRKVVYLHHVRSHTNLPDPISRLNALTDALLITPVLQLAGKRTADGSEFEKRTADGSEFESPKKKAKVE

SEQ ID NO: 1483 - protein, 2010 aa, synthetic construct
MPAAKRVKLDGGDKKYSIGLDIGTNSVGWAVITDEYKVPSKKFKVLGNTDRHSIKKNLIGALLFDSGETAEATRLKRTARRRYTRRKNRICYLQEIFSNEMAKVDDSFFHRLEESFLVEEDKKHERHPIFGNIVDEVAYHEKYPTIYHLRKKLVDSTDKADLRLIYLALAHMIKFRGHFLIEGDLNPDNSDVDKLFIQLVQTYNQLFEENPINASGVDAKAILSARLSKSRRLENLIAQLPGEKKNGLFGNLIALSLGLTPNFKSNFDLAEDAKLQLSKDTYDDDLDNLLAQIGDQYADLFLAAKNLSDAILLSDILRVNTEITKAPLSASMIKRYDEHHQDLTLLKALVRQQLPEKYKEIFFDQSKNGYAGYIDGGASQEEFYKFIKPILEKMDGTEELLVKLNREDLLRKQRTFDNGSIPHQIHLGELHAILRRQEDFYPFLKDNREKIEKILTFRIPYYVGPLARGNSRFAWMTRKSEETITPWNFEEVVDKGASAQSFIERMTNFDKNLPNEKVLPKHSLLYEYFTVYNELTKVKYVTEGMRKPAFLSGEQKKAIVDLLFKTNRKVTVKQLKEDYFKKIECFDSVEISGVEDRFNASLGTYHDLLKIIKDKDFLDNEENEDILEDIVLTLTLFEDREMIEERLKTYAHLFDDKVMKQLKRRRYTGWGRLSRKLINGIRDKQSGKTILDFLKSDGFANRNFMQLIHDDSLTFKEDIQKAQVSGQGDSLHEHIANLAGSPAIKKGILQTVKVVDELVKVMGRHKPENIVIEMARENQTTQKGQKNSRERMKRIEEGIKELGSQILKEHPVENTQLQNEKLYLYYLQNGRDMYVDQELDINRLSDYDVDHIVPQSFLKDDSIDNKVLTRSDKARGKSDNVPSEEVVKKMKNYWRQLLNAKLITQRKFDNLTKAERGGLSELDKAGFIKRQLVETRQITKHVAQILDSRMNTKYDENDKLIREVKVITLKSKLVSDFRKDFQFYKVREINNYHHAHDAYLNAVVGTALIKKYPKLESEFVYGDYKVYDVRKMIAKSEQEIGKATAKYFFYSNIMNFFKTEITLANGEIRKRPLIETNGETGEIVWDKGRDFATVRKVLSMPQVNIVKKTEVQTGGFSKESILPKRNSDKLIARKKDWDPKKYGGFDSPTVAYSVLVVAKVEKGKSKKLKSVKELLGITIMERSSFEKNPIDFLEAKGYKEVKKDLIIKLPKYSLFELENGRKRMLASAGELQKGNELALPSKYVNFLYLASHYEKLKGSPEDNEQKQLFVEQHKHYLDEIIEQISEFSKRVILADANLDKVLSAYNKHRDKPIREQAENIIHLFTLTNLGAPAAFKYFDTTIDRKRYTSTKEVLDATLIHQSITGLYETRIDLSQLGGDGGEAAAKGGSGGAVLGLEHLPRPPQISQFPLNPERLQALQHLVRKALEAGHIEPYTGPGNNPVFPVKKANGTWRFIHDLRATNSLTIDLSSSSPGPPDLSSLPTTLAHLQTIDLRDAFFQIPLPKQFQPYFAFTVPQQCNYGPGTRYAWKVLPQGFKNSPTLFQMQLAHILQPIRQAFPQCTILQYMDDILLASPSHEDLLLLSEATMASLISHGLPVSENKTQQTPGTIKFLGQIISPNHLTYDAVPTVPIRSRWALPELQALLGEIQWVSKGTPTLRQPLHSLYCALQPHTDPRDQIYLNPSQVQSLVQLRQALSQNCRSRLVQTLPLLGAIMLTLTGTTTVVFQSKEQWPLVWLHAPLPHTSQCPWGQLLASAVLLLDKYTLQSYGLLCQTIHHNISTQTFNQFIQTSDHPSVPILLHHSHRFKNLGAQTGELWNTFLKTAAPLAPVKALMPVFTLSPVIINTAPCLFSDGSTSRAAYILWDKQILSQRSFPLPPPHKSAQRAELLGLLHGLSSARSWRCLNIFLDSKYLYHYLRTLALGTFQGRSSQAPFQALLPRLLSRKVVYLHHVRSHTNLPDPISRLNALTDALLITPVLQLAGKRTADGSEFEKRTADGSEFESPKKKAKVE

SEQ ID NO: 1484 - protein, 2013 aa, synthetic construct
MPAAKRVKLDGGDKKYSIGLDIGTNSVGWAVITDEYKVPSKKFKVLGNTDRHSIKKNLIGALLFDSGETAEATRLKRTARRRYTRRKNRICYLQEIFSNEMAKVDDSFFHRLEESFLVEEDKKHERHPIFGNIVDEVAYHEKYPTIYHLRKKLVDSTDKADLRLIYLALAHMIKFRGHFLIEGDLNPDNSDVDKLFIQLVQTYNQLFEENPINASGVDAKAILSARLSKSRRLENLIAQLPGEKKNGLFGNLIALSLGLTPNFKSNFDLAEDAKLQLSKDTYDDDLDNLLAQIGDQYADLFLAAKNLSDAILLSDILRVNTEITKAPLSASMIKRYDEHHQDLTLLKALVRQQLPEKYKEIFFDQSKNGYAGYIDGGASQEEFYKFIKPILEKMDGTEELLVKLNREDLLRKQRTFDNGSIPHQIHLGELHAILRRQEDFYPFLKDNREKIEKILTFRIPYYVGPLARGNSRFAWMTRKSEETITPWNFEEVVDKGASAQSFIERMTNFDKNLPNEKVLPKHSLLYEYFTVYNELTKVKYVTEGMRKPAFLSGEQKKAIVDLLFKTNRKVTVKQLKEDYFKKIECFDSVEISGVEDRFNASLGTYHDLLKIIKDKDFLDNEENEDILEDIVLTLTLFEDREMIEERLKTYAHLFDDKVMKQLKRRRYTGWGRLSRKLINGIRDKQSGKTILDFLKSDGFANRNFMQLIHDDSLTFKEDIQKAQVSGQGDSLHEHIANLAGSPAIKKGILQTVKVVDELVKVMGRHKPENIVIEMARENQTTQKGQKNSRERMKRIEEGIKELGSQILKEHPVENTQLQNEKLYLYYLQNGRDMYVDQELDINRLSDYDVDHIVPQSFLKDDSIDNKVLTRSDKARGKSDNVPSEEVVKKMKNYWRQLLNAKLITQRKFDNLTKAERGGLSELDKAGFIKRQLVETRQITKHVAQILDSRMNTKYDENDKLIREVKVITLKSKLVSDFRKDFQFYKVREINNYHHAHDAYLNAVVGTALIKKYPKLESEFVYGDYKVYDVRKMIAKSEQEIGKATAKYFFYSNIMNFFKTEITLANGEIRKRPLIETNGETGEIVWDKGRDFATVRKVLSMPQVNIVKKTEVQTGGFSKESILPKRNSDKLIARKKDWDPKKYGGFDSPTVAYSVLVVAKVEKGKSKKLKSVKELLGITIMERSSFEKNPIDFLEAKGYKEVKKDLIIKLPKYSLFELENGRKRMLASAGELQKGNELALPSKYVNFLYLASHYEKLKGSPEDNEQKQLFVEQHKHYLDEIIEQISEFSKRVILADANLDKVLSAYNKHRDKPIREQAENIIHLFTLTNLGAPAAFKYFDTTIDRKRYTSTKEVLDATLIHQSITGLYETRIDLSQLGGDGGGGSEAAAKPAPGGAVLGLEHLPRPPQISQFPLNPERLQALQHLVRKALEAGHIEPYTGPGNNPVFPVKKANGTWRFIHDLRATNSLTIDLSSSSPGPPDLSSLPTTLAHLQTIDLRDAFFQIPLPKQFQPYFAFTVPQQCNYGPGTRYAWKVLPQGFKNSPTLFQMQLAHILQPIRQAFPQCTILQYMDDILLASPSHEDLLLLSEATMASLISHGLPVSENKTQQTPGTIKFLGQIISPNHLTYDAVPTVPIRSRWALPELQALLGEIQWVSKGTPTLRQPLHSLYCALQPHTDPRDQIYLNPSQVQSLVQLRQALSQNCRSRLVQTLPLLGAIMLTLTGTTTVVFQSKEQWPLVWLHAPLPHTSQCPWGQLLASAVLLLDKYTLQSYGLLCQTIHHNISTQTFNQFIQTSDHPSVPILLHHSHRFKNLGAQTGELWNTFLKTAAPLAPVKALMPVFTLSPVIINTAPCLFSDGSTSRAAYILWDKQILSQRSFPLPPPHKSAQRAELLGLLHGLSSARSWRCLNIFLDSKYLYHYLRTLALGTFQGRSSQAPFQALLPRLLSRKVVYLHHVRSHTNLPDPISRLNALTDALLITPVLQLAGKRTADGSEFEKRTADGSEFESPKKKAKVE

SEQ ID NO: 1485 - protein, 2011 aa, synthetic construct
MPAAKRVKLDGGDKKYSIGLDIGTNSVGWAVITDEYKVPSKKFKVLGNTDRHSIKKNLIGALLFDSGETAEATRLKRTARRRYTRRKNRICYLQEIFSNEMAKVDDSFFHRLEESFLVEEDKKHERHPIFGNIVDEVAYHEKYPTIYHLRKKLVDSTDKADLRLIYLALAHMIKFRGHFLIEGDLNPDNSDVDKLFIQLVQTYNQLFEENPINASGVDAKAILSARLSKSRRLENLIAQLPGEKKNGLFGNLIALSLGLTPNFKSNFDLAEDAKLQLSKDTYDDDLDNLLAQIGDQYADLFLAAKNLSDAILLSDILRVNTEITKAPLSASMIKRYDEHHQDLTLLKALVRQQLPEKYKEIFFDQSKNGYAGYIDGGASQEEFYKFIKPILEKMDGTEELLVKLNREDLLRKQRTFDNGSIPHQIHLGELHAILRRQEDFYPFLKDNREKIEKILTFRIPYYVGPLARGNSRFAWMTRKSEETITPWNFEEVVDKGASAQSFIERMTNFDKNLPNEKVLPKHSLLYEYFTVYNELTKVKYVTEGMRKPAFLSGEQKKAIVDLLFKTNRKVTVKQLKEDYFKKIECFDSVEISGVEDRFNASLGTYHDLLKIIKDKDFLDNEENEDILEDIVLTLTLFEDREMIEERLKTYAHLFDDKVMKQLKRRRYTGWGRLSRKLINGIRDKQSGKTILDFLKSDGFANRNFMQLIHDDSLTFKEDIQKAQVSGQGDSLHEHIANLAGSPAIKKGILQTVKVVDELVKVMGRHKPENIVIEMARENQTTQKGQKNSRERMKRIEEGIKELGSQILKEHPVENTQLQNEKLYLYYLQNGRDMYVDQELDINRLSDYDVDHIVPQSFLKDDSIDNKVLTRSDKARGKSDNVPSEEVVKKMKNYWRQLLNAKLITQRKFDNLTKAERGGLSELDKAGFIKRQLVETRQITKHVAQILDSRMNTKYDENDKLIREVKVITLKSKLVSDFRKDFQFYKVREINNYHHAHDAYLNAVVGTALIKKYPKLESEFVYGDYKVYDVRKMIAKSEQEIGKATAKYFFYSNIMNFFKTEITLANGEIRKRPLIETNGETGEIVWDKGRDFATVRKVLSMPQVNIVKKTEVQTGGFSKESILPKRNSDKLIARKKDWDPKKYGGFDSPTVAYSVLVVAKVEKGKSKKLKSVKELLGITIMERSSFEKNPIDFLEAKGYKEVKKDLIIKLPKYSLFELENGRKRMLASAGELQKGNELALPSKYVNFLYLASHYEKLKGSPEDNEQKQLFVEQHKHYLDEIIEQISEFSKRVILADANLDKVLSAYNKHRDKPIREQAENIIHLFTLTNLGAPAAFKYFDTTIDRKRYTSTKEVLDATLIHQSITGLYETRIDLSQLGGDGGGGGGGSGSSGGAVLGLEHLPRPPQISQFPLNPERLQALQHLVRKALEAGHIEPYTGPGNNPVFPVKKANGTWRFIHDLRATNSLTIDLSSSSPGPPDLSSPPTTLAHLQTIDLRDAFFQIPLPKQFQPYFAFTVPQQCNYGPGTRYAWKVLPQGFKNSPTLFQMQLAHILQPIRQAFPQCTILQYMDDILLASPSHEDLLLLSEATMASLISHGLPVSENKTQQTPGTIKFLGQIISPNHLTYDAVPTVPIRSRWALPELQALLGEIQWVSKGTPTLRQPLHSLYCALQPHTDPRDQIYLNPSQVQSLVQLRQALSQNCRSRLVQTLPLLGAIMLTLTGTTTVVFQSKEQWPLVWLHAPLPHTSQCPWGQLLASAVLLLDKYTLQSYGLLCQTIHHNISTQTFNQFIQTSDHPSVPILLHHSHRFKNLGAQTGELWNTFLKTAAPLAPVKALMPVFTLSPVIINTAPCLFSDGSTSRAAYILWDKQILSQRSFPLPPPHKSAQRAELLGLLHGLSSARSWRCLNIFLDSKYLYHYLRTLALGTFQGRSSQAPFQALLPRLLSRKVVYLHHVRSHTNLPDPISRLNALTDALLITPVLQLAGKRTADGSEFEKRTADGSEFESPKKKAKVE

SEQ ID NO: 1486 - protein, 2013 aa, synthetic construct
MPAAKRVKLDGGDKKYSIGLDIGTNSVGWAVITDEYKVPSKKFKVLGNTDRHSIKKNLIGALLFDSGETAEATRLKRTARRRYTRRKNRICYLQEIFSNEMAKVDDSFFHRLEESFLVEEDKKHERHPIFGNIVDEVAYHEKYPTIYHLRKKLVDSTDKADLRLIYLALAHMIKFRGHFLIEGDLNPDNSDVDKLFIQLVQTYNQLFEENPINASGVDAKAILSARLSKSRRLENLIAQLPGEKKNGLFGNLIALSLGLTPNFKSNFDLAEDAKLQLSKDTYDDDLDNLLAQIGDQYADLFLAAKNLSDAILLSDILRVNTEITKAPLSASMIKRYDEHHQDLTLLKALVRQQLPEKYKEIFFDQSKNGYAGYIDGGASQEEFYKFIKPILEKMDGTEELLVKLNREDLLRKQRTFDNGSIPHQIHLGELHAILRRQEDFYPFLKDNREKIEKILTFRIPYYVGPLARGNSRFAWMTRKSEETITPWNFEEVVDKGASAQSFIERMTNFDKNLPNEKVLPKHSLLYEYFTVYNELTKVKYVTEGMRKPAFLSGEQKKAIVDLLFKTNRKVTVKQLKEDYFKKIECFDSVEISGVEDRFNASLGTYHDLLKIIKDKDFLDNEENEDILEDIVLTLTLFEDREMIEERLKTYAHLFDDKVMKQLKRRRYTGWGRLSRKLINGIRDKQSGKTILDFLKSDGFANRNFMQLIHDDSLTFKEDIQKAQVSGQGDSLHEHIANLAGSPAIKKGILQTVKVVDELVKVMGRHKPENIVIEMARENQTTQKGQKNSRERMKRIEEGIKELGSQILKEHPVENTQLQNEKLYLYYLQNGRDMYVDQELDINRLSDYDVDHIVPQSFLKDDSIDNKVLTRSDKARGKSDNVPSEEVVKKMKNYWRQLLNAKLITQRKFDNLTKAERGGLSELDKAGFIKRQLVETRQITKHVAQILDSRMNTKYDENDKLIREVKVITLKSKLVSDFRKDFQFYKVREINNYHHAHDAYLNAVVGTALIKKYPKLESEFVYGDYKVYDVRKMIAKSEQEIGKATAKYFFYSNIMNFFKTEITLANGEIRKRPLIETNGETGEIVWDKGRDFATVRKVLSMPQVNIVKKTEVQTGGFSKESILPKRNSDKLIARKKDWDPKKYGGFDSPTVAYSVLVVAKVEKGKSKKLKSVKELLGITIMERSSFEKNPIDFLEAKGYKEVKKDLIIKLPKYSLFELENGRKRMLASAGELQKGNELALPSKYVNFLYLASHYEKLKGSPEDNEQKQLFVEQHKHYLDEIIEQISEFSKRVILADANLDKVLSAYNKHRDKPIREQAENIIHLFTLTNLGAPAAFKYFDTTIDRKRYTSTKEVLDATLIHQSITGLYETRIDLSQLGGDGGEAAAKGSSGGSGGAVLGLEHLPRPPQISQFPLNPERLQALQHLVRKALEAGHIEPYTGPGNNPVFPVKKANGTWRFIHDLRATNSLTIDLSSSSPGPPDLSSPPTTLAHLQTIDLRDAFFQIPLPKQFQPYFAFTVPQQCNYGPGTRYAWKVLPQGFKNSPTLFQMQLAHILQPIRQAFPQCTILQYMDDILLASPSHEDLLLLSEATMASLISHGLPVSENKTQQTPGTIKFLGQIISPNHLTYDAVPTVPIRSRWALPELQALLGEIQWVSKGTPTLRQPLHSLYCALQPHTDPRDQIYLNPSQVQSLVQLRQALSQNCRSRLVQTLPLLGAIMLTLTGTTTVVFQSKEQWPLVWLHAPLPHTSQCPWGQLLASAVLLLDKYTLQSYGLLCQTIHHNISTQTFNQFIQTSDHPSVPILLHHSHRFKNLGAQTGELWNTFLKTAAPLAPVKALMPVFTLSPVIINTAPCLFSDGSTSRAAYILWDKQILSQRSFPLPPPHKSAQRAELLGLLHGLSSARSWRCLNIFLDSKYLYHYLRTLALGTFQGRSSQAPFQALLPRLLSRKVVYLHHVRSHTNLPDPISRLNALTDALLITPVLQLAGKRTADGSEFEKRTADGSEFESPKKKAKVE

SEQ ID NO: 1487 - protein, 2013 aa, synthetic construct
MPAAKRVKLDGGDKKYSIGLDIGTNSVGWAVITDEYKVPSKKFKVLGNTDRHSIKKNLIGALLFDSGETAEATRLKRTARRRYTRRKNRICYLQEIFSNEMAKVDDSFFHRLEESFLVEEDKKHERHPIFGNIVDEVAYHEKYPTIYHLRKKLVDSTDKADLRLIYLALAHMIKFRGHFLIEGDLNPDNSDVDKLFIQLVQTYNQLFEENPINASGVDAKAILSARLSKSRRLENLIAQLPGEKKNGLFGNLIALSLGLTPNFKSNFDLAEDAKLQLSKDTYDDDLDNLLAQIGDQYADLFLAAKNLSDAILLSDILRVNTEITKAPLSASMIKRYDEHHQDLTLLKALVRQQLPEKYKEIFFDQSKNGYAGYIDGGASQEEFYKFIKPILEKMDGTEELLVKLNREDLLRKQRTFDNGSIPHQIHLGELHAILRRQEDFYPFLKDNREKIEKILTFRIPYYVGPLARGNSRFAWMTRKSEETITPWNFEEVVDKGASAQSFIERMTNFDKNLPNEKVLPKHSLLYEYFTVYNELTKVKYVTEGMRKPAFLSGEQKKAIVDLLFKTNRKVTVKQLKEDYFKKIECFDSVEISGVEDRFNASLGTYHDLLKIIKDKDFLDNEENEDILEDIVLTLTLFEDREMIEERLKTYAHLFDDKVMKQLKRRRYTGWGRLSRKLINGIRDKQSGKTILDFLKSDGFANRNFMQLIHDDSLTFKEDIQKAQVSGQGDSLHEHIANLAGSPAIKKGILQTVKVVDELVKVMGRHKPENIVIEMARENQTTQKGQKNSRERMKRIEEGIKELGSQILKEHPVENTQLQNEKLYLYYLQNGRDMYVDQELDINRLSDYDVDHIVPQSFLKDDSIDNKVLTRSDKARGKSDNVPSEEVVKKMKNYWRQLLNAKLITQRKFDNLTKAERGGLSELDKAGFIKRQLVETRQITKHVAQILDSRMNTKYDENDKLIREVKVITLKSKLVSDFRKDFQFYKVREINNYHHAHDAYLNAVVGTALIKKYPKLESEFVYGDYKVYDVRKMIAKSEQEIGKATAKYFFYSNIMNFFKTEITLANGEIRKRPLIETNGETGEIVWDKGRDFATVRKVLSMPQVNIVKKTEVQTGGFSKESILPKRNSDKLIARKKDWDPKKYGGFDSPTVAYSVLVVAKVEKGKSKKLKSVKELLGITIMERSSFEKNPIDFLEAKGYKEVKKDLIIKLPKYSLFELENGRKRMLASAGELQKGNELALPSKYVNFLYLASHYEKLKGSPEDNEQKQLFVEQHKHYLDEIIEQISEFSKRVILADANLDKVLSAYNKHRDKPIREQAENIIHLFTLTNLGAPAAFKYFDTTIDRKRYTSTKEVLDATLIHQSITGLYETRIDLSQLGGDGGPAPEAAAKGGGGGAVLGLEHLPRPPQISQFPLNPERLQALQHLVRKALEAGHIEPYTGPGNNPVFPVKKANGTWRFIHDLRATNSLTIDLSSSSPGPPDLSSPPTTLAHLQTIDLRDAFFQIPLPKQFQPYFAFTVPQQCNYGPGTRYAWKVLPQGFKNSPTLFQMQLAHILQPIRQAFPQCTILQYMDDILLASPSHEDLLLLSEATMASLISHGLPVSENKTQQTPGTIKFLGQIISPNHLTYDAVPTVPIRSRWALPELQALLGEIQWVSKGTPTLRQPLHSLYCALQPHTDPRDQIYLNPSQVQSLVQLRQALSQNCRSRLVQTLPLLGAIMLTLTGTTTVVFQSKEQWPLVWLHAPLPHTSQCPWGQLLASAVLLLDKYTLQSYGLLCQTIHHNISTQTFNQFIQTSDHPSVPILLHHSHRFKNLGAQTGELWNTFLKTAAPLAPVKALMPVFTLSPVIINTAPCLFSDGSTSRAAYILWDKQILSQRSFPLPPPHKSAQRAELLGLLHGLSSARSWRCLNIFLDSKYLYHYLRTLALGTFQGRSSQAPFQALLPRLLSRKVVYLHHVRSHTNLPDPISRLNALTDALLITPVLQLAGKRTADGSEFEKRTADGSEFESPKKKAKVE

SEQ ID NO: 1488 - protein, 2017 aa, synthetic construct
MPAAKRVKLDGGDKKYSIGLDIGTNSVGWAVITDEYKVPSKKFKVLGNTDRHSIKKNLIGALLFDSGETAEATRLKRTARRRYTRRKNRICYLQEIFSNEMAKVDDSFFHRLEESFLVEEDKKHERHPIFGNIVDEVAYHEKYPTIYHLRKKLVDSTDKADLRLIYLALAHMIKFRGHFLIEGDLNPDNSDVDKLFIQLVQTYNQLFEENPINASGVDAKAILSARLSKSRRLENLIAQLPGEKKNGLFGNLIALSLGLTPNFKSNFDLAEDAKLQLSKDTYDDDLDNLLAQIGDQYADLFLAAKNLSDAILLSDILRVNTEITKAPLSASMIKRYDEHHQDLTLLKALVRQQLPEKYKEIFFDQSKNGYAGYIDGGASQEEFYKFIKPILEKMDGTEELLVKLNREDLLRKQRTFDNGSIPHQIHLGELHAILRRQEDFYPFLKDNREKIEKILTFRIPYYVGPLARGNSRFAWMTRKSEETITPWNFEEVVDKGASAQSFIERMTNFDKNLPNEKVLPKHSLLYEYFTVYNELTKVKYVTEGMRKPAFLSGEQKKAIVDLLFKTNRKVTVKQLKEDYFKKIECFDSVEISGVEDRFNASLGTYHDLLKIIKDKDFLDNEENEDILEDIVLTLTLFEDREMIEERLKTYAHLFDDKVMKQLKRRRYTGWGRLSRKLINGIRDKQSGKTILDFLKSDGFANRNFMQLIHDDSLTFKEDIQKAQVSGQGDSLHEHIANLAGSPAIKKGILQTVKVVDELVKVMGRHKPENIVIEMARENQTTQKGQKNSRERMKRIEEGIKELGSQILKEHPVENTQLQNEKLYLYYLQNGRDMYVDQELDINRLSDYDVDHIVPQSFLKDDSIDNKVLTRSDKARGKSDNVPSEEVVKKMKNYWRQLLNAKLITQRKFDNLTKAERGGLSELDKAGFIKRQLVETRQITKHVAQILDSRMNTKYDENDKLIREVKVITLKSKLVSDFRKDFQFYKVREINNYHHAHDAYLNAVVGTALIKKYPKLESEFVYGDYKVYDVRKMIAKSEQEIGKATAKYFFYSNIMNFFKTEITLANGEIRKRPLIETNGETGEIVWDKGRDFATVRKVLSMPQVNIVKKTEVQTGGFSKESILPKRNSDKLIARKKDWDPKKYGGFDSPTVAYSVLVVAKVEKGKSKKLKSVKELLGITIMERSSFEKNPIDFLEAKGYKEVKKDLIIKLPKYSLFELENGRKRMLASAGELQKGNELALPSKYVNFLYLASHYEKLKGSPEDNEQKQLFVEQHKHYLDEIIEQISEFSKRVILADANLDKVLSAYNKHRDKPIREQAENIIHLFTLTNLGAPAAFKYFDTTIDRKRYTSTKEVLDATLIHQSITGLYETRIDLSQLGGDGGGGGGSEAAAKGGGGSGGAVLGLEHLPRPPEISQFPLNPERLQALQHLVRKALEAGHIEPYTGPGNNPVFPVKKANGTWRFIHDLRATNSLTIDLSSSSPGPPDLSSLPTTLAHLQTIDLKDAFFQIPLPKQFQPYFAFTVPQQCNYGPGTRYAWRVLPQGFKNSPTLFEMQLAHILQPIRQAFPQCTILQYMDDILLASPSHADLQLLSEATMASLISHGLPVSENKTQQTPGTIKFLGQIISPNHLTYDAVPKVPIRSRWALPELQALLGEIQWVSKGTPTLRQPLHSLYCALQRHTDPRDQIYLNPSQVQSLVQLRQALSQNCRSRLVQTLPLLGAIMLTLTGTTTVVFQSKQQWPLVWLHAPLPHTSQCPWGQLLASAVLLLDKYTLQSYGLLCQTIHHNISTQTFNQFIQTSDHPSVPILLHHSHRFKNLGAQTGELWNTFLKTTAPLAPVKALMPVFTLSPVIINTAPCLFSDGSTSQAAYILWDKHILSQRSFPLPPPHKSAQRAELLGLLHGLSSARSWRCLNIFLDSKYLYHYLRTLALGTFQGRSSQAPFQALLPRLLSRKVVYLHHVRSHTNLPDPISRLNALTDALLITPVLQLAGKRTADGSEFEKRTADGSEFESPKKKAKVE

SEQ ID NO: 1489 - protein, 2017 aa, synthetic construct
MPAAKRVKLDGGDKKYSIGLDIGTNSVGWAVITDEYKVPSKKFKVLGNTDRHSIKKNLIGALLFDSGETAEATRLKRTARRRYTRRKNRICYLQEIFSNEMAKVDDSFFHRLEESFLVEEDKKHERHPIFGNIVDEVAYHEKYPTIYHLRKKLVDSTDKADLRLIYLALAHMIKFRGHFLIEGDLNPDNSDVDKLFIQLVQTYNQLFEENPINASGVDAKAILSARLSKSRRLENLIAQLPGEKKNGLFGNLIALSLGLTPNFKSNFDLAEDAKLQLSKDTYDDDLDNLLAQIGDQYADLFLAAKNLSDAILLSDILRVNTEITKAPLSASMIKRYDEHHQDLTLLKALVRQQLPEKYKEIFFDQSKNGYAGYIDGGASQEEFYKFIKPILEKMDGTEELLVKLNREDLLRKQRTFDNGSIPHQIHLGELHAILRRQEDFYPFLKDNREKIEKILTFRIPYYVGPLARGNSRFAWMTRKSEETITPWNFEEVVDKGASAQSFIERMTNFDKNLPNEKVLPKHSLLYEYFTVYNELTKVKYVTEGMRKPAFLSGEQKKAIVDLLFKTNRKVTVKQLKEDYFKKIECFDSVEISGVEDRFNASLGTYHDLLKIIKDKDFLDNEENEDILEDIVLTLTLFEDREMIEERLKTYAHLFDDKVMKQLKRRRYTGWGRLSRKLINGIRDKQSGKTILDFLKSDGFANRNFMQLIHDDSLTFKEDIQKAQVSGQGDSLHEHIANLAGSPAIKKGILQTVKVVDELVKVMGRHKPENIVIEMARENQTTQKGQKNSRERMKRIEEGIKELGSQILKEHPVENTQLQNEKLYLYYLQNGRDMYVDQELDINRLSDYDVDHIVPQSFLKDDSIDNKVLTRSDKARGKSDNVPSEEVVKKMKNYWRQLLNAKLITQRKFDNLTKAERGGLSELDKAGFIKRQLVETRQITKHVAQILDSRMNTKYDENDKLIREVKVITLKSKLVSDFRKDFQFYKVREINNYHHAHDAYLNAVVGTALIKKYPKLESEFVYGDYKVYDVRKMIAKSEQEIGKATAKYFFYSNIMNFFKTEITLANGEIRKRPLIETNGETGEIVWDKGRDFATVRKVLSMPQVNIVKKTEVQTGGFSKESILPKRNSDKLIARKKDWDPKKYGGFDSPTVAYSVLVVAKVEKGKSKKLKSVKELLGITIMERSSFEKNPIDFLEAKGYKEVKKDLIIKLPKYSLFELENGRKRMLASAGELQKGNELALPSKYVNFLYLASHYEKLKGSPEDNEQKQLFVEQHKHYLDEIIEQISEFSKRVILADANLDKVLSAYNKHRDKPIREQAENIIHLFTLTNLGAPAAFKYFDTTIDRKRYTSTKEVLDATLIHQSITGLYETRIDLSQLGGDGGEAAAKEAAAKEAAAKGGAVLGLEHLPRPPEISQFPLNPERLQALQHLVRKALEAGHIEPYTGPGNNPVFPVKKANGTWRFIHDLRATNSLTIDLSSSSPGPPDLSSLPTTLAHLQTIDLKDAFFQIPLPKQFQPYFAFTVPQQCNYGPGTRYAWRVLPQGFKNSPTLFEMQLAHILQPIRQAFPQCTILQYMDDILLASPSHADLQLLSEATMASLISHGLPVSENKTQQTPGTIKFLGQIISPNHLTYDAVPKVPIRSRWALPELQALLGEIQWVSKGTPTLRQPLHSLYCALQRHTDPRDQIYLNPSQVQSLVQLRQALSQNCRSRLVQTLPLLGAIMLTLTGTTTVVFQSKQQWPLVWLHAPLPHTSQCPWGQLLASAVLLLDKYTLQSYGLLCQTIHHNISTQTFNQFIQTSDHPSVPILLHHSHRFKNLGAQTGELWNTFLKTTAPLAPVKALMPVFTLSPVIINTAPCLFSDGSTSQAAYILWDKHILSQRSFPLPPPHKSAQRAELLGLLHGLSSARSWRCLNIFLDSKYLYHYLRTLALGTFQGRSSQAPFQALLPRLLSRKVVYLHHVRSHTNLPDPISRLNALTDALLITPVLQLAGKRTADGSEFEKRTADGSEFESPKKKAKVE

SEQ ID NO: 1490 - protein, 2010 aa, synthetic construct
MPAAKRVKLDGGDKKYSIGLDIGTNSVGWAVITDEYKVPSKKFKVLGNTDRHSIKKNLIGALLFDSGETAEATRLKRTARRRYTRRKNRICYLQEIFSNEMAKVDDSFFHRLEESFLVEEDKKHERHPIFGNIVDEVAYHEKYPTIYHLRKKLVDSTDKADLRLIYLALAHMIKFRGHFLIEGDLNPDNSDVDKLFIQLVQTYNQLFEENPINASGVDAKAILSARLSKSRRLENLIAQLPGEKKNGLFGNLIALSLGLTPNFKSNFDLAEDAKLQLSKDTYDDDLDNLLAQIGDQYADLFLAAKNLSDAILLSDILRVNTEITKAPLSASMIKRYDEHHQDLTLLKALVRQQLPEKYKEIFFDQSKNGYAGYIDGGASQEEFYKFIKPILEKMDGTEELLVKLNREDLLRKQRTFDNGSIPHQIHLGELHAILRRQEDFYPFLKDNREKIEKILTFRIPYYVGPLARGNSRFAWMTRKSEETITPWNFEEVVDKGASAQSFIERMTNFDKNLPNEKVLPKHSLLYEYFTVYNELTKVKYVTEGMRKPAFLSGEQKKAIVDLLFKTNRKVTVKQLKEDYFKKIECFDSVEISGVEDRFNASLGTYHDLLKIIKDKDFLDNEENEDILEDIVLTLTLFEDREMIEERLKTYAHLFDDKVMKQLKRRRYTGWGRLSRKLINGIRDKQSGKTILDFLKSDGFANRNFMQLIHDDSLTFKEDIQKAQVSGQGDSLHEHIANLAGSPAIKKGILQTVKVVDELVKVMGRHKPENIVIEMARENQTTQKGQKNSRERMKRIEEGIKELGSQILKEHPVENTQLQNEKLYLYYLQNGRDMYVDQELDINRLSDYDVDHIVPQSFLKDDSIDNKVLTRSDKARGKSDNVPSEEVVKKMKNYWRQLLNAKLITQRKFDNLTKAERGGLSELDKAGFIKRQLVETRQITKHVAQILDSRMNTKYDENDKLIREVKVITLKSKLVSDFRKDFQFYKVREINNYHHAHDAYLNAVVGTALIKKYPKLESEFVYGDYKVYDVRKMIAKSEQEIGKATAKYFFYSNIMNFFKTEITLANGEIRKRPLIETNGETGEIVWDKGRDFATVRKVLSMPQVNIVKKTEVQTGGFSKESILPKRNSDKLIARKKDWDPKKYGGFDSPTVAYSVLVVAKVEKGKSKKLKSVKELLGITIMERSSFEKNPIDFLEAKGYKEVKKDLIIKLPKYSLFELENGRKRMLASAGELQKGNELALPSKYVNFLYLASHYEKLKGSPEDNEQKQLFVEQHKHYLDEIIEQISEFSKRVILADANLDKVLSAYNKHRDKPIREQAENIIHLFTLTNLGAPAAFKYFDTTIDRKRYTSTKEVLDATLIHQSITGLYETRIDLSQLGGDGGGGGEAAAKGGAVLGLEHLPRPPEISQFPLNPERLQALQHLVRKALEAGHIEPYTGPGNNPVFPVKKANGTWRFIHDLRATNSLTIDLSSSSPGPPDLSSLPTTLAHLQTIDLKDAFFQIPLPKQFQPYFAFTVPQQCNYGPGTRYAWRVLPQGFKNSPTLFEMQLAHILQPIRQAFPQCTILQYMDDILLASPSHADLQLLSEATMASLISHGLPVSENKTQQTPGTIKFLGQIISPNHLTYDAVPKVPIRSRWALPELQALLGEIQWVSKGTPTLRQPLHSLYCALQRHTDPRDQIYLNPSQVQSLVQLRQALSQNCRSRLVQTLPLLGAIMLTLTGTTTVVFQSKQQWPLVWLHAPLPHTSQCPWGQLLASAVLLLDKYTLQSYGLLCQTIHHNISTQTFNQFIQTSDHPSVPILLHHSHRFKNLGAQTGELWNTFLKTTAPLAPVKALMPVFTLSPVIINTAPCLFSDGSTSQAAYILWDKHILSQRSFPLPPPHKSAQRAELLGLLHGLSSARSWRCLNIFLDSKYLYHYLRTLALGTFQGRSSQAPFQALLPRLLSRKVVYLHHVRSHTNLPDPISRLNALTDALLITPVLQLAGKRTADGSEFEKRTADGSEFESPKKKAKVE

SEQ ID NO: 1491 - protein, 2027 aa, synthetic construct
MPAAKRVKLDGGDKKYSIGLDIGTNSVGWAVITDEYKVPSKKFKVLGNTDRHSIKKNLIGALLFDSGETAEATRLKRTARRRYTRRKNRICYLQEIFSNEMAKVDDSFFHRLEESFLVEEDKKHERHPIFGNIVDEVAYHEKYPTIYHLRKKLVDSTDKADLRLIYLALAHMIKFRGHFLIEGDLNPDNSDVDKLFIQLVQTYNQLFEENPINASGVDAKAILSARLSKSRRLENLIAQLPGEKKNGLFGNLIALSLGLTPNFKSNFDLAEDAKLQLSKDTYDDDLDNLLAQIGDQYADLFLAAKNLSDAILLSDILRVNTEITKAPLSASMIKRYDEHHQDLTLLKALVRQQLPEKYKEIFFDQSKNGYAGYIDGGASQEEFYKFIKPILEKMDGTEELLVKLNREDLLRKQRTFDNGSIPHQIHLGELHAILRRQEDFYPFLKDNREKIEKILTFRIPYYVGPLARGNSRFAWMTRKSEETITPWNFEEVVDKGASAQSFIERMTNFDKNLPNEKVLPKHSLLYEYFTVYNELTKVKYVTEGMRKPAFLSGEQKKAIVDLLFKTNRKVTVKQLKEDYFKKIECFDSVEISGVEDRFNASLGTYHDLLKIIKDKDFLDNEENEDILEDIVLTLTLFEDREMIEERLKTYAHLFDDKVMKQLKRRRYTGWGRLSRKLINGIRDKQSGKTILDFLKSDGFANRNFMQLIHDDSLTFKEDIQKAQVSGQGDSLHEHIANLAGSPAIKKGILQTVKVVDELVKVMGRHKPENIVIEMARENQTTQKGQKNSRERMKRIEEGIKELGSQILKEHPVENTQLQNEKLYLYYLQNGRDMYVDQELDINRLSDYDVDHIVPQSFLKDDSIDNKVLTRSDKARGKSDNVPSEEVVKKMKNYWRQLLNAKLITQRKFDNLTKAERGGLSELDKAGFIKRQLVETRQITKHVAQILDSRMNTKYDENDKLIREVKVITLKSKLVSDFRKDFQFYKVREINNYHHAHDAYLNAVVGTALIKKYPKLESEFVYGDYKVYDVRKMIAKSEQEIGKATAKYFFYSNIMNFFKTEITLANGEIRKRPLIETNGETGEIVWDKGRDFATVRKVLSMPQVNIVKKTEVQTGGFSKESILPKRNSDKLIARKKDWDPKKYGGFDSPTVAYSVLVVAKVEKGKSKKLKSVKELLGITIMERSSFEKNPIDFLEAKGYKEVKKDLIIKLPKYSLFELENGRKRMLASAGELQKGNELALPSKYVNFLYLASHYEKLKGSPEDNEQKQLFVEQHKHYLDEIIEQISEFSKRVILADANLDKVLSAYNKHRDKPIREQAENIIHLFTLTNLGAPAAFKYFDTTIDRKRYTSTKEVLDATLIHQSITGLYETRIDLSQLGGDGGGGGGSGGGGSGGGGSGGGGSGGGGSGGAVLGLEHLPRPPEISQFPLNPERLQALQHLVRKALEAGHIEPYTGPGNNPVFPVKKANGTWRFIHDLRATNSLTIDLSSSSPGPPDLSSLPTTLAHLQTIDLKDAFFQIPLPKQFQPYFAFTVPQQCNYGPGTRYAWRVLPQGFKNSPTLFEMQLAHILQPIRQAFPQCTILQYMDDILLASPSHADLQLLSEATMASLISHGLPVSENKTQQTPGTIKFLGQIISPNHLTYDAVPKVPIRSRWALPELQALLGEIQWVSKGTPTLRQPLHSLYCALQRHTDPRDQIYLNPSQVQSLVQLRQALSQNCRSRLVQTLPLLGAIMLTLTGTTTVVFQSKQQWPLVWLHAPLPHTSQCPWGQLLASAVLLLDKYTLQSYGLLCQTIHHNISTQTFNQFIQTSDHPSVPILLHHSHRFKNLGAQTGELWNTFLKTTAPLAPVKALMPVFTLSPVIINTAPCLFSDGSTSQAAYILWDKHILSQRSFPLPPPHKSAQRAELLGLLHGLSSARSWRCLNIFLDSKYLYHYLRTLALGTFQGRSSQAPFQALLPRLLSRKVVYLHHVRSHTNLPDPISRLNALTDALLITPVLQLAGKRTADGSEFEKRTADGSEFESPKKKAKVE

SEQ ID NO: 1492 - protein, 2011 aa, synthetic construct
MPAAKRVKLDGGDKKYSIGLDIGTNSVGWAVITDEYKVPSKKFKVLGNTDRHSIKKNLIGALLFDSGETAEATRLKRTARRRYTRRKNRICYLQEIFSNEMAKVDDSFFHRLEESFLVEEDKKHERHPIFGNIVDEVAYHEKYPTIYHLRKKLVDSTDKADLRLIYLALAHMIKFRGHFLIEGDLNPDNSDVDKLFIQLVQTYNQLFEENPINASGVDAKAILSARLSKSRRLENLIAQLPGEKKNGLFGNLIALSLGLTPNFKSNFDLAEDAKLQLSKDTYDDDLDNLLAQIGDQYADLFLAAKNLSDAILLSDILRVNTEITKAPLSASMIKRYDEHHQDLTLLKALVRQQLPEKYKEIFFDQSKNGYAGYIDGGASQEEFYKFIKPILEKMDGTEELLVKLNREDLLRKQRTFDNGSIPHQIHLGELHAILRRQEDFYPFLKDNREKIEKILTFRIPYYVGPLARGNSRFAWMTRKSEETITPWNFEEVVDKGASAQSFIERMTNFDKNLPNEKVLPKHSLLYEYFTVYNELTKVKYVTEGMRKPAFLSGEQKKAIVDLLFKTNRKVTVKQLKEDYFKKIECFDSVEISGVEDRFNASLGTYHDLLKIIKDKDFLDNEENEDILEDIVLTLTLFEDREMIEERLKTYAHLFDDKVMKQLKRRRYTGWGRLSRKLINGIRDKQSGKTILDFLKSDGFANRNFMQLIHDDSLTFKEDIQKAQVSGQGDSLHEHIANLAGSPAIKKGILQTVKVVDELVKVMGRHKPENIVIEMARENQTTQKGQKNSRERMKRIEEGIKELGSQILKEHPVENTQLQNEKLYLYYLQNGRDMYVDQELDINRLSDYDVDHIVPQSFLKDDSIDNKVLTRSDKARGKSDNVPSEEVVKKMKNYWRQLLNAKLITQRKFDNLTKAERGGLSELDKAGFIKRQLVETRQITKHVAQILDSRMNTKYDENDKLIREVKVITLKSKLVSDFRKDFQFYKVREINNYHHAHDAYLNAVVGTALIKKYPKLESEFVYGDYKVYDVRKMIAKSEQEIGKATAKYFFYSNIMNFFKTEITLANGEIRKRPLIETNGETGEIVWDKGRDFATVRKVLSMPQVNIVKKTEVQTGGFSKESILPKRNSDKLIARKKDWDPKKYGGFDSPTVAYSVLVVAKVEKGKSKKLKSVKELLGITIMERSSFEKNPIDFLEAKGYKEVKKDLIIKLPKYSLFELENGRKRMLASAGELQKGNELALPSKYVNFLYLASHYEKLKGSPEDNEQKQLFVEQHKHYLDEIIEQISEFSKRVILADANLDKVLSAYNKHRDKPIREQAENIIHLFTLTNLGAPAAFKYFDTTIDRKRYTSTKEVLDATLIHQSITGLYETRIDLSQLGGDGGGGGGGSPAPGGAVLGLEHLPRPPEISQFPLNPERLQALQHLVRKALEAGHIEPYTGPGNNPVFPVKKANGTWRFIHDLRATNSLTIDLSSSSPGPPDLSSLPTTLAHLQTIDLKDAFFQIPLPKQFQPYFAFTVPQQCNYGPGTRYAWRVLPQGFKNSPTLFQMQLAHILQPIRQAFPQCTILQYMDDILLASPSHADLQLLSEATMASLISHGLPVSENKTQQTPGTIKFLGQIISPNHLTYDAVPKVPIRSRWALPELQALLGEIQWVSKGTPTLRQPLHSLYCALQPHTDPRDQIYLNPSQVQSLVQLRQALSQNCRSRLVQTLPLLGAIMLTLTGTTTVVFQSKQQWPLVWLHAPLPHTSQCPWGQLLASAVLLLDKYTLQSYGLLCQTIHHNISTQTFNQFIQTSDHPSVPILLHHSHRFKNLGAQTGELWNTFLKTTAPLAPVKALMPVFTLSPVIINTAPCLFSDGSTSQAAYILWDKHILSQRSFPLPPPHKSAQRAELLGLLHGLSSARSWRCLNIFLDSKYLYHYLRTLALGTFQGRSSQAPFQALLPRLLSRKVVYLHHVRSHTNLPDPISRLNALTDALLITPVLQLAGKRTADGSEFEKRTADGSEFESPKKKAKVE

SEQ ID NO: 1493 - protein, 2008 aa, synthetic construct
MPAAKRVKLDGGDKKYSIGLDIGTNSVGWAVITDEYKVPSKKFKVLGNTDRHSIKKNLIGALLFDSGETAEATRLKRTARRRYTRRKNRICYLQEIFSNEMAKVDDSFFHRLEESFLVEEDKKHERHPIFGNIVDEVAYHEKYPTIYHLRKKLVDSTDKADLRLIYLALAHMIKFRGHFLIEGDLNPDNSDVDKLFIQLVQTYNQLFEENPINASGVDAKAILSARLSKSRRLENLIAQLPGEKKNGLFGNLIALSLGLTPNFKSNFDLAEDAKLQLSKDTYDDDLDNLLAQIGDQYADLFLAAKNLSDAILLSDILRVNTEITKAPLSASMIKRYDEHHQDLTLLKALVRQQLPEKYKEIFFDQSKNGYAGYIDGGASQEEFYKFIKPILEKMDGTEELLVKLNREDLLRKQRTFDNGSIPHQIHLGELHAILRRQEDFYPFLKDNREKIEKILTFRIPYYVGPLARGNSRFAWMTRKSEETITPWNFEEVVDKGASAQSFIERMTNFDKNLPNEKVLPKHSLLYEYFTVYNELTKVKYVTEGMRKPAFLSGEQKKAIVDLLFKTNRKVTVKQLKEDYFKKIECFDSVEISGVEDRFNASLGTYHDLLKIIKDKDFLDNEENEDILEDIVLTLTLFEDREMIEERLKTYAHLFDDKVMKQLKRRRYTGWGRLSRKLINGIRDKQSGKTILDFLKSDGFANRNFMQLIHDDSLTFKEDIQKAQVSGQGDSLHEHIANLAGSPAIKKGILQTVKVVDELVKVMGRHKPENIVIEMARENQTTQKGQKNSRERMKRIEEGIKELGSQILKEHPVENTQLQNEKLYLYYLQNGRDMYVDQELDINRLSDYDVDHIVPQSFLKDDSIDNKVLTRSDKARGKSDNVPSEEVVKKMKNYWRQLLNAKLITQRKFDNLTKAERGGLSELDKAGFIKRQLVETRQITKHVAQILDSRMNTKYDENDKLIREVKVITLKSKLVSDFRKDFQFYKVREINNYHHAHDAYLNAVVGTALIKKYPKLESEFVYGDYKVYDVRKMIAKSEQEIGKATAKYFFYSNIMNFFKTEITLANGEIRKRPLIETNGETGEIVWDKGRDFATVRKVLSMPQVNIVKKTEVQTGGFSKESILPKRNSDKLIARKKDWDPKKYGGFDSPTVAYSVLVVAKVEKGKSKKLKSVKELLGITIMERSSFEKNPIDFLEAKGYKEVKKDLIIKLPKYSLFELENGRKRMLASAGELQKGNELALPSKYVNFLYLASHYEKLKGSPEDNEQKQLFVEQHKHYLDEIIEQISEFSKRVILADANLDKVLSAYNKHRDKPIREQAENIIHLFTLTNLGAPAAFKYFDTTIDRKRYTSTKEVLDATLIHQSITGLYETRIDLSQLGGDGGPAPGGSGGAVLGLEHLPRPPEISQFPLNPERLQALQHLVRKALEAGHIEPYTGPGNNPVFPVKKANGTWRFIHDLRATNSLTIDLSSSSPGPPDLSSLPTTLAHLQTIDLKDAFFQIPLPKQFQPYFAFTVPQQCNYGPGTRYAWRVLPQGFKNSPTLFQMQLAHILQPIRQAFPQCTILQYMDDILLASPSHADLQLLSEATMASLISHGLPVSENKTQQTPGTIKFLGQIISPNHLTYDAVPKVPIRSRWALPELQALLGEIQWVSKGTPTLRQPLHSLYCALQPHTDPRDQIYLNPSQVQSLVQLRQALSQNCRSRLVQTLPLLGAIMLTLTGTTTVVFQSKQQWPLVWLHAPLPHTSQCPWGQLLASAVLLLDKYTLQSYGLLCQTIHHNISTQTFNQFIQTSDHPSVPILLHHSHRFKNLGAQTGELWNTFLKTTAPLAPVKALMPVFTLSPVIINTAPCLFSDGSTSQAAYILWDKHILSQRSFPLPPPHKSAQRAELLGLLHGLSSARSWRCLNIFLDSKYLYHYLRTLALGTFQGRSSQAPFQALLPRLLSRKVVYLHHVRSHTNLPDPISRLNALTDALLITPVLQLAGKRTADGSEFEKRTADGSEFESPKKKAKVE

SEQ ID NO: 1494 - protein, 2011 aa, synthetic construct
MPAAKRVKLDGGDKKYSIGLDIGTNSVGWAVITDEYKVPSKKFKVLGNTDRHSIKKNLIGALLFDSGETAEATRLKRTARRRYTRRKNRICYLQEIFSNEMAKVDDSFFHRLEESFLVEEDKKHERHPIFGNIVDEVAYHEKYPTIYHLRKKLVDSTDKADLRLIYLALAHMIKFRGHFLIEGDLNPDNSDVDKLFIQLVQTYNQLFEENPINASGVDAKAILSARLSKSRRLENLIAQLPGEKKNGLFGNLIALSLGLTPNFKSNFDLAEDAKLQLSKDTYDDDLDNLLAQIGDQYADLFLAAKNLSDAILLSDILRVNTEITKAPLSASMIKRYDEHHQDLTLLKALVRQQLPEKYKEIFFDQSKNGYAGYIDGGASQEEFYKFIKPILEKMDGTEELLVKLNREDLLRKQRTFDNGSIPHQIHLGELHAILRRQEDFYPFLKDNREKIEKILTFRIPYYVGPLARGNSRFAWMTRKSEETITPWNFEEVVDKGASAQSFIERMTNFDKNLPNEKVLPKHSLLYEYFTVYNELTKVKYVTEGMRKPAFLSGEQKKAIVDLLFKTNRKVTVKQLKEDYFKKIECFDSVEISGVEDRFNASLGTYHDLLKIIKDKDFLDNEENEDILEDIVLTLTLFEDREMIEERLKTYAHLFDDKVMKQLKRRRYTGWGRLSRKLINGIRDKQSGKTILDFLKSDGFANRNFMQLIHDDSLTFKEDIQKAQVSGQGDSLHEHIANLAGSPAIKKGILQTVKVVDELVKVMGRHKPENIVIEMARENQTTQKGQKNSRERMKRIEEGIKELGSQILKEHPVENTQLQNEKLYLYYLQNGRDMYVDQELDINRLSDYDVDHIVPQSFLKDDSIDNKVLTRSDKARGKSDNVPSEEVVKKMKNYWRQLLNAKLITQRKFDNLTKAERGGLSELDKAGFIKRQLVETRQITKHVAQILDSRMNTKYDENDKLIREVKVITLKSKLVSDFRKDFQFYKVREINNYHHAHDAYLNAVVGTALIKKYPKLESEFVYGDYKVYDVRKMIAKSEQEIGKATAKYFFYSNIMNFFKTEITLANGEIRKRPLIETNGETGEIVWDKGRDFATVRKVLSMPQVNIVKKTEVQTGGFSKESILPKRNSDKLIARKKDWDPKKYGGFDSPTVAYSVLVVAKVEKGKSKKLKSVKELLGITIMERSSFEKNPIDFLEAKGYKEVKKDLIIKLPKYSLFELENGRKRMLASAGELQKGNELALPSKYVNFLYLASHYEKLKGSPEDNEQKQLFVEQHKHYLDEIIEQISEFSKRVILADANLDKVLSAYNKHRDKPIREQAENIIHLFTLTNLGAPAAFKYFDTTIDRKRYTSTKEVLDATLIHQSITGLYETRIDLSQLGGDGGGGGPAPGGSGGAVLGLEHLPRPPEISQFPLNPERLQALQHLVRKALEAGHIEPYTGPGNNPVFPVKKANGTWRFIHDLRATNSLTIDLSSSSPGPPDLSSLPTTLAHLQTIDLKDAFFQIPLPKQFQPYFAFTVPQQCNYGPGTRYAWRVLPQGFKNSPTLFQMQLAHILQPIRQAFPQCTILQYMDDILLASPSHADLQLLSEATMASLISHGLPVSENKTQQTPGTIKFLGQIISPNHLTYDAVPKVPIRSRWALPELQALLGEIQWVSKGTPTLRQPLHSLYCALQPHTDPRDQIYLNPSQVQSLVQLRQALSQNCRSRLVQTLPLLGAIMLTLTGTTTVVFQSKQQWPLVWLHAPLPHTSQCPWGQLLASAVLLLDKYTLQSYGLLCQTIHHNISTQTFNQFIQTSDHPSVPILLHHSHRFKNLGAQTGELWNTFLKTTAPLAPVKALMPVFTLSPVIINTAPCLFSDGSTSQAAYILWDKHILSQRSFPLPPPHKSAQRAELLGLLHGLSSARSWRCLNIFLDSKYLYHYLRTLALGTFQGRSSQAPFQALLPRLLSRKVVYLHHVRSHTNLPDPISRLNALTDALLITPVLQLAGKRTADGSEFEKRTADGSEFESPKKKAKVE

SEQ ID NO: 1495 - protein, 2017 aa, synthetic construct
MPAAKRVKLDGGDKKYSIGLDIGTNSVGWAVITDEYKVPSKKFKVLGNTDRHSIKKNLIGALLFDSGETAEATRLKRTARRRYTRRKNRICYLQEIFSNEMAKVDDSFFHRLEESFLVEEDKKHERHPIFGNIVDEVAYHEKYPTIYHLRKKLVDSTDKADLRLIYLALAHMIKFRGHFLIEGDLNPDNSDVDKLFIQLVQTYNQLFEENPINASGVDAKAILSARLSKSRRLENLIAQLPGEKKNGLFGNLIALSLGLTPNFKSNFDLAEDAKLQLSKDTYDDDLDNLLAQIGDQYADLFLAAKNLSDAILLSDILRVNTEITKAPLSASMIKRYDEHHQDLTLLKALVRQQLPEKYKEIFFDQSKNGYAGYIDGGASQEEFYKFIKPILEKMDGTEELLVKLNREDLLRKQRTFDNGSIPHQIHLGELHAILRRQEDFYPFLKDNREKIEKILTFRIPYYVGPLARGNSRFAWMTRKSEETITPWNFEEVVDKGASAQSFIERMTNFDKNLPNEKVLPKHSLLYEYFTVYNELTKVKYVTEGMRKPAFLSGEQKKAIVDLLFKTNRKVTVKQLKEDYFKKIECFDSVEISGVEDRFNASLGTYHDLLKIIKDKDFLDNEENEDILEDIVLTLTLFEDREMIEERLKTYAHLFDDKVMKQLKRRRYTGWGRLSRKLINGIRDKQSGKTILDFLKSDGFANRNFMQLIHDDSLTFKEDIQKAQVSGQGDSLHEHIANLAGSPAIKKGILQTVKVVDELVKVMGRHKPENIVIEMARENQTTQKGQKNSRERMKRIEEGIKELGSQILKEHPVENTQLQNEKLYLYYLQNGRDMYVDQELDINRLSDYDVDHIVPQSFLKDDSIDNKVLTRSDKARGKSDNVPSEEVVKKMKNYWRQLLNAKLITQRKFDNLTKAERGGLSELDKAGFIKRQLVETRQITKHVAQILDSRMNTKYDENDKLIREVKVITLKSKLVSDFRKDFQFYKVREINNYHHAHDAYLNAVVGTALIKKYPKLESEFVYGDYKVYDVRKMIAKSEQEIGKATAKYFFYSNIMNFFKTEITLANGEIRKRPLIETNGETGEIVWDKGRDFATVRKVLSMPQVNIVKKTEVQTGGFSKESILPKRNSDKLIARKKDWDPKKYGGFDSPTVAYSVLVVAKVEKGKSKKLKSVKELLGITIMERSSFEKNPIDFLEAKGYKEVKKDLIIKLPKYSLFELENGRKRMLASAGELQKGNELALPSKYVNFLYLASHYEKLKGSPEDNEQKQLFVEQHKHYLDEIIEQISEFSKRVILADANLDKVLSAYNKHRDKPIREQAENIIHLFTLTNLGAPAAFKYFDTTIDRKRYTSTKEVLDATLIHQSITGLYETRIDLSQLGGDGGGSSGSSGSSGSSGSSGGAVLGLEHLPRPPEISQFPLNPERLQALQHLVRKALEAGHIEPYTGPGNNPVFPVKKANGTWRFIHDLRATNSLTIDLSSSSPGPPDLSSLPTTLAHLQTIDLKDAFFQIPLPKQFQPYFAFTVPQQCNYGPGTRYAWRVLPQGFKNSPTLFQMQLAHILQPIRQAFPQCTILQYMDDILLASPSHADLQLLSEATMASLISHGLPVSENKTQQTPGTIKFLGQIISPNHLTYDAVPKVPIRSRWALPELQALLGEIQWVSKGTPTLRQPLHSLYCALQPHTDPRDQIYLNPSQVQSLVQLRQALSQNCRSRLVQTLPLLGAIMLTLTGTTTVVFQSKQQWPLVWLHAPLPHTSQCPWGQLLASAVLLLDKYTLQSYGLLCQTIHHNISTQTFNQFIQTSDHPSVPILLHHSHRFKNLGAQTGELWNTFLKTTAPLAPVKALMPVFTLSPVIINTAPCLFSDGSTSQAAYILWDKHILSQRSFPLPPPHKSAQRAELLGLLHGLSSARSWRCLNIFLDSKYLYHYLRTLALGTFQGRSSQAPFQALLPRLLSRKVVYLHHVRSHTNLPDPISRLNALTDALLITPVLQLAGKRTADGSEFEKRTADGSEFESPKKKAKVE

SEQ ID NO: 1496 - protein, 2002 aa, synthetic construct
MPAAKRVKLDGGDKKYSIGLDIGTNSVGWAVITDEYKVPSKKFKVLGNTDRHSIKKNLIGALLFDSGETAEATRLKRTARRRYTRRKNRICYLQEIFSNEMAKVDDSFFHRLEESFLVEEDKKHERHPIFGNIVDEVAYHEKYPTIYHLRKKLVDSTDKADLRLIYLALAHMIKFRGHFLIEGDLNPDNSDVDKLFIQLVQTYNQLFEENPINASGVDAKAILSARLSKSRRLENLIAQLPGEKKNGLFGNLIALSLGLTPNFKSNFDLAEDAKLQLSKDTYDDDLDNLLAQIGDQYADLFLAAKNLSDAILLSDILRVNTEITKAPLSASMIKRYDEHHQDLTLLKALVRQQLPEKYKEIFFDQSKNGYAGYIDGGASQEEFYKFIKPILEKMDGTEELLVKLNREDLLRKQRTFDNGSIPHQIHLGELHAILRRQEDFYPFLKDNREKIEKILTFRIPYYVGPLARGNSRFAWMTRKSEETITPWNFEEVVDKGASAQSFIERMTNFDKNLPNEKVLPKHSLLYEYFTVYNELTKVKYVTEGMRKPAFLSGEQKKAIVDLLFKTNRKVTVKQLKEDYFKKIECFDSVEISGVEDRFNASLGTYHDLLKIIKDKDFLDNEENEDILEDIVLTLTLFEDREMIEERLKTYAHLFDDKVMKQLKRRRYTGWGRLSRKLINGIRDKQSGKTILDFLKSDGFANRNFMQLIHDDSLTFKEDIQKAQVSGQGDSLHEHIANLAGSPAIKKGILQTVKVVDELVKVMGRHKPENIVIEMARENQTTQKGQKNSRERMKRIEEGIKELGSQILKEHPVENTQLQNEKLYLYYLQNGRDMYVDQELDINRLSDYDVDHIVPQSFLKDDSIDNKVLTRSDKARGKSDNVPSEEVVKKMKNYWRQLLNAKLITQRKFDNLTKAERGGLSELDKAGFIKRQLVETRQITKHVAQILDSRMNTKYDENDKLIREVKVITLKSKLVSDFRKDFQFYKVREINNYHHAHDAYLNAVVGTALIKKYPKLESEFVYGDYKVYDVRKMIAKSEQEIGKATAKYFFYSNIMNFFKTEITLANGEIRKRPLIETNGETGEIVWDKGRDFATVRKVLSMPQVNIVKKTEVQTGGFSKESILPKRNSDKLIARKKDWDPKKYGGFDSPTVAYSVLVVAKVEKGKSKKLKSVKELLGITIMERSSFEKNPIDFLEAKGYKEVKKDLIIKLPKYSLFELENGRKRMLASAGELQKGNELALPSKYVNFLYLASHYEKLKGSPEDNEQKQLFVEQHKHYLDEIIEQISEFSKRVILADANLDKVLSAYNKHRDKPIREQAENIIHLFTLTNLGAPAAFKYFDTTIDRKRYTSTKEVLDATLIHQSITGLYETRIDLSQLGGDGGEAAAKGGGLEHLPRPPEISQFPLNPERLQALQHLVRKALEAGHIEPYTGPGNNPVFPVKKANGTWRFIHDLRATNSLTVDLSSSSPGPPDLSSLPTTLAHLQTIDLKDAFFQIPLPKQFQPYFAFTVPQQCNYGPGTRYAWKVLPQGFKNSPTLFEMQLASILQPIRQAFPQCVILQYMDDILLASPSPEDLQQLSEATMASLISHGLPVSQDKTQQTPGTIKFLGQIISPNHITYDAVPTVPIRSRWALPELQALLGEIQWVSKGTPTLRQPLHSLYCALQGHTDPRDQIYLNPSQVQSLMQLQQALSQNCRSRLAQTLPLLGAIMLTLTGTTTVVFQSKQQWPLVWLHAPLPHTSQCPWGQLLASAVLLLDKYTLQSYGLLCQTIHHNISIQTFNQFIQTSDHPSVPILLHHSHRFKNLGAQTGELWNTFLKTAAPLAPVKALTPVFTLSPIIINTAPCLFSDGSTSQAAYILWDKHILSQRSFPLPPPHKSAQQAELLGLLHGLSSARSWHCLNIFLDSKYLYHYLRTLALGTFQGKSSQAPFQALLPRLLAHKVIYLHHVRSHTNLPDPISKLNALTDALLITPILAGKRTADGSEFEKRTADGSEFESPKKKAKVE

SEQ ID NO: 1497 - protein, 2015 aa, synthetic construct
MPAAKRVKLDGGDKKYSIGLDIGTNSVGWAVITDEYKVPSKKFKVLGNTDRHSIKKNLIGALLFDSGETAEATRLKRTARRRYTRRKNRICYLQEIFSNEMAKVDDSFFHRLEESFLVEEDKKHERHPIFGNIVDEVAYHEKYPTIYHLRKKLVDSTDKADLRLIYLALAHMIKFRGHFLIEGDLNPDNSDVDKLFIQLVQTYNQLFEENPINASGVDAKAILSARLSKSRRLENLIAQLPGEKKNGLFGNLIALSLGLTPNFKSNFDLAEDAKLQLSKDTYDDDLDNLLAQIGDQYADLFLAAKNLSDAILLSDILRVNTEITKAPLSASMIKRYDEHHQDLTLLKALVRQQLPEKYKEIFFDQSKNGYAGYIDGGASQEEFYKFIKPILEKMDGTEELLVKLNREDLLRKQRTFDNGSIPHQIHLGELHAILRRQEDFYPFLKDNREKIEKILTFRIPYYVGPLARGNSRFAWMTRKSEETITPWNFEEVVDKGASAQSFIERMTNFDKNLPNEKVLPKHSLLYEYFTVYNELTKVKYVTEGMRKPAFLSGEQKKAIVDLLFKTNRKVTVKQLKEDYFKKIECFDSVEISGVEDRFNASLGTYHDLLKIIKDKDFLDNEENEDILEDIVLTLTLFEDREMIEERLKTYAHLFDDKVMKQLKRRRYTGWGRLSRKLINGIRDKQSGKTILDFLKSDGFANRNFMQLIHDDSLTFKEDIQKAQVSGQGDSLHEHIANLAGSPAIKKGILQTVKVVDELVKVMGRHKPENIVIEMARENQTTQKGQKNSRERMKRIEEGIKELGSQILKEHPVENTQLQNEKLYLYYLQNGRDMYVDQELDINRLSDYDVDHIVPQSFLKDDSIDNKVLTRSDKARGKSDNVPSEEVVKKMKNYWRQLLNAKLITQRKFDNLTKAERGGLSELDKAGFIKRQLVETRQITKHVAQILDSRMNTKYDENDKLIREVKVITLKSKLVSDFRKDFQFYKVREINNYHHAHDAYLNAVVGTALIKKYPKLESEFVYGDYKVYDVRKMIAKSEQEIGKATAKYFFYSNIMNFFKTEITLANGEIRKRPLIETNGETGEIVWDKGRDFATVRKVLSMPQVNIVKKTEVQTGGFSKESILPKRNSDKLIARKKDWDPKKYGGFDSPTVAYSVLVVAKVEKGKSKKLKSVKELLGITIMERSSFEKNPIDFLEAKGYKEVKKDLIIKLPKYSLFELENGRKRMLASAGELQKGNELALPSKYVNFLYLASHYEKLKGSPEDNEQKQLFVEQHKHYLDEIIEQISEFSKRVILADANLDKVLSAYNKHRDKPIREQAENIIHLFTLTNLGAPAAFKYFDTTIDRKRYTSTKEVLDATLIHQSITGLYETRIDLSQLGGDGGGSSGSSGSSGSSGSSGSSGGGLEHLPRPPEISQFPLNPERLQALQHLVRKALEAGHIEPYTGPGNNPVFPVKKANGTWRFIHDLRATNSLTVDLSSSSPGPPDLSSLPTTLAHLQTIDLKDAFFQIPLPKQFQPYFAFTVPQQCNYGPGTRYAWKVLPQGFKNSPTLFEMQLASILQPIRQAFPQCVILQYMDDILLASPSPEDLQQLSEATMASLISHGLPVSQDKTQQTPGTIKFLGQIISPNHITYDAVPTVPIRSRWALPELQALLGEIQWVSKGTPTLRQPLHSLYCALQGHTDPRDQIYLNPSQVQSLMQLQQALSQNCRSRLAQTLPLLGAIMLTLTGTTTVVFQSKQQWPLVWLHAPLPHTSQCPWGQLLASAVLLLDKYTLQSYGLLCQTIHHNISIQTFNQFIQTSDHPSVPILLHHSHRFKNLGAQTGELWNTFLKTAAPLAPVKALTPVFTLSPIIINTAPCLFSDGSTSQAAYILWDKHILSQRSFPLPPPHKSAQQAELLGLLHGLSSARSWHCLNIFLDSKYLYHYLRTLALGTFQGKSSQAPFQALLPRLLAHKVIYLHHVRSHTNLPDPISKLNALTDALLITPILAGKRTADGSEFEKRTADGSEFESPKKKAKVE

SEQ ID NO: 1498 - protein, 2008 aa, synthetic construct
MPAAKRVKLDGGDKKYSIGLDIGTNSVGWAVITDEYKVPSKKFKVLGNTDRHSIKKNLIGALLFDSGETAEATRLKRTARRRYTRRKNRICYLQEIFSNEMAKVDDSFFHRLEESFLVEEDKKHERHPIFGNIVDEVAYHEKYPTIYHLRKKLVDSTDKADLRLIYLALAHMIKFRGHFLIEGDLNPDNSDVDKLFIQLVQTYNQLFEENPINASGVDAKAILSARLSKSRRLENLIAQLPGEKKNGLFGNLIALSLGLTPNFKSNFDLAEDAKLQLSKDTYDDDLDNLLAQIGDQYADLFLAAKNLSDAILLSDILRVNTEITKAPLSASMIKRYDEHHQDLTLLKALVRQQLPEKYKEIFFDQSKNGYAGYIDGGASQEEFYKFIKPILEKMDGTEELLVKLNREDLLRKQRTFDNGSIPHQIHLGELHAILRRQEDFYPFLKDNREKIEKILTFRIPYYVGPLARGNSRFAWMTRKSEETITPWNFEEVVDKGASAQSFIERMTNFDKNLPNEKVLPKHSLLYEYFTVYNELTKVKYVTEGMRKPAFLSGEQKKAIVDLLFKTNRKVTVKQLKEDYFKKIECFDSVEISGVEDRFNASLGTYHDLLKIIKDKDFLDNEENEDILEDIVLTLTLFEDREMIEERLKTYAHLFDDKVMKQLKRRRYTGWGRLSRKLINGIRDKQSGKTILDFLKSDGFANRNFMQLIHDDSLTFKEDIQKAQVSGQGDSLHEHIANLAGSPAIKKGILQTVKVVDELVKVMGRHKPENIVIEMARENQTTQKGQKNSRERMKRIEEGIKELGSQILKEHPVENTQLQNEKLYLYYLQNGRDMYVDQELDINRLSDYDVDHIVPQSFLKDDSIDNKVLTRSDKARGKSDNVPSEEVVKKMKNYWRQLLNAKLITQRKFDNLTKAERGGLSELDKAGFIKRQLVETRQITKHVAQILDSRMNTKYDENDKLIREVKVITLKSKLVSDFRKDFQFYKVREINNYHHAHDAYLNAVVGTALIKKYPKLESEFVYGDYKVYDVRKMIAKSEQEIGKATAKYFFYSNIMNFFKTEITLANGEIRKRPLIETNGETGEIVWDKGRDFATVRKVLSMPQVNIVKKTEVQTGGFSKESILPKRNSDKLIARKKDWDPKKYGGFDSPTVAYSVLVVAKVEKGKSKKLKSVKELLGITIMERSSFEKNPIDFLEAKGYKEVKKDLIIKLPKYSLFELENGRKRMLASAGELQKGNELALPSKYVNFLYLASHYEKLKGSPEDNEQKQLFVEQHKHYLDEIIEQISEFSKRVILADANLDKVLSAYNKHRDKPIREQAENIIHLFTLTNLGAPAAFKYFDTTIDRKRYTSTKEVLDATLIHQSITGLYETRIDLSQLGGDGGEAAAKGGGGGSGGGLEHLPRPPEISQFPLNPERLQALQHLVRKALEAGHIEPYTGPGNNPVFPVKKANGTWRFIHDLRATNSLTVDLSSSSPGPPDLSSLPTTLAHLQTIDLKDAFFQIPLPKQFQPYFAFTVPQQCNYGPGTRYAWKVLPQGFKNSPTLFEMQLASILQPIRQAFPQCVILQYMDDILLASPSPEDLQQLSEATMASLISHGLPVSQDKTQQTPGTIKFLGQIISPNHITYDAVPTVPIRSRWALPELQALLGEIQWVSKGTPTLRQPLHSLYCALQGHTDPRDQIYLNPSQVQSLMQLQQALSQNCRSRLAQTLPLLGAIMLTLTGTTTVVFQSKQQWPLVWLHAPLPHTSQCPWGQLLASAVLLLDKYTLQSYGLLCQTIHHNISIQTFNQFIQTSDHPSVPILLHHSHRFKNLGAQTGELWNTFLKTAAPLAPVKALTPVFTLSPIIINTAPCLFSDGSTSQAAYILWDKHILSQRSFPLPPPHKSAQQAELLGLLHGLSSARSWHCLNIFLDSKYLYHYLRTLALGTFQGKSSQAPFQALLPRLLAHKVIYLHHVRSHTNLPDPISKLNALTDALLITPILAGKRTADGSEFEKRTADGSEFESPKKKAKVE

SEQ ID NO: 1499 - protein, 2008 aa, synthetic construct
MPAAKRVKLDGGDKKYSIGLDIGTNSVGWAVITDEYKVPSKKFKVLGNTDRHSIKKNLIGALLFDSGETAEATRLKRTARRRYTRRKNRICYLQEIFSNEMAKVDDSFFHRLEESFLVEEDKKHERHPIFGNIVDEVAYHEKYPTIYHLRKKLVDSTDKADLRLIYLALAHMIKFRGHFLIEGDLNPDNSDVDKLFIQLVQTYNQLFEENPINASGVDAKAILSARLSKSRRLENLIAQLPGEKKNGLFGNLIALSLGLTPNFKSNFDLAEDAKLQLSKDTYDDDLDNLLAQIGDQYADLFLAAKNLSDAILLSDILRVNTEITKAPLSASMIKRYDEHHQDLTLLKALVRQQLPEKYKEIFFDQSKNGYAGYIDGGASQEEFYKFIKPILEKMDGTEELLVKLNREDLLRKQRTFDNGSIPHQIHLGELHAILRRQEDFYPFLKDNREKIEKILTFRIPYYVGPLARGNSRFAWMTRKSEETITPWNFEEVVDKGASAQSFIERMTNFDKNLPNEKVLPKHSLLYEYFTVYNELTKVKYVTEGMRKPAFLSGEQKKAIVDLLFKTNRKVTVKQLKEDYFKKIECFDSVEISGVEDRFNASLGTYHDLLKIIKDKDFLDNEENEDILEDIVLTLTLFEDREMIEERLKTYAHLFDDKVMKQLKRRRYTGWGRLSRKLINGIRDKQSGKTILDFLKSDGFANRNFMQLIHDDSLTFKEDIQKAQVSGQGDSLHEHIANLAGSPAIKKGILQTVKVVDELVKVMGRHKPENIVIEMARENQTTQKGQKNSRERMKRIEEGIKELGSQILKEHPVENTQLQNEKLYLYYLQNGRDMYVDQELDINRLSDYDVDHIVPQSFLKDDSIDNKVLTRSDKARGKSDNVPSEEVVKKMKNYWRQLLNAKLITQRKFDNLTKAERGGLSELDKAGFIKRQLVETRQITKHVAQILDSRMNTKYDENDKLIREVKVITLKSKLVSDFRKDFQFYKVREINNYHHAHDAYLNAVVGTALIKKYPKLESEFVYGDYKVYDVRKMIAKSEQEIGKATAKYFFYSNIMNFFKTEITLANGEIRKRPLIETNGETGEIVWDKGRDFATVRKVLSMPQVNIVKKTEVQTGGFSKESILPKRNSDKLIARKKDWDPKKYGGFDSPTVAYSVLVVAKVEKGKSKKLKSVKELLGITIMERSSFEKNPIDFLEAKGYKEVKKDLIIKLPKYSLFELENGRKRMLASAGELQKGNELALPSKYVNFLYLASHYEKLKGSPEDNEQKQLFVEQHKHYLDEIIEQISEFSKRVILADANLDKVLSAYNKHRDKPIREQAENIIHLFTLTNLGAPAAFKYFDTTIDRKRYTSTKEVLDATLIHQSITGLYETRIDLSQLGGDGGEAAAKGGSGGGGGGLEHLPRPPEISQFPLNPERLQALQHLVRKALEAGHIEPYTGPGNNPVFPVKKANGTWRFIHDLRATNSLTVDLSSSSPGPPDLSSLPTTLAHLQTIDLKDAFFQIPLPKQFQPYFAFTVPQQCNYGPGTRYAWKVLPQGFKNSPTLFEMQLASILQPIRQAFPQCVILQYMDDILLASPSPEDLQQLSEATMASLISHGLPVSQDKTQQTPGTIKFLGQIISPNHITYDAVPTVPIRSRWALPELQALLGEIQWVSKGTPTLRQPLHSLYCALQGHTDPRDQIYLNPSQVQSLMQLQQALSQNCRSRLAQTLPLLGAIMLTLTGTTTVVFQSKQQWPLVWLHAPLPHTSQCPWGQLLASAVLLLDKYTLQSYGLLCQTIHHNISIQTFNQFIQTSDHPSVPILLHHSHRFKNLGAQTGELWNTFLKTAAPLAPVKALTPVFTLSPIIINTAPCLFSDGSTSQAAYILWDKHILSQRSFPLPPPHKSAQQAELLGLLHGLSSARSWHCLNIFLDSKYLYHYLRTLALGTFQGKSSQAPFQALLPRLLAHKVIYLHHVRSHTNLPDPISKLNALTDALLITPILAGKRTADGSEFEKRTADGSEFESPKKKAKVE

SEQ ID NO: 1500 - protein, 2008 aa, synthetic construct
MPAAKRVKLDGGDKKYSIGLDIGTNSVGWAVITDEYKVPSKKFKVLGNTDRHSIKKNLIGALLFDSGETAEATRLKRTARRRYTRRKNRICYLQEIFSNEMAKVDDSFFHRLEESFLVEEDKKHERHPIFGNIVDEVAYHEKYPTIYHLRKKLVDSTDKADLRLIYLALAHMIKFRGHFLIEGDLNPDNSDVDKLFIQLVQTYNQLFEENPINASGVDAKAILSARLSKSRRLENLIAQLPGEKKNGLFGNLIALSLGLTPNFKSNFDLAEDAKLQLSKDTYDDDLDNLLAQIGDQYADLFLAAKNLSDAILLSDILRVNTEITKAPLSASMIKRYDEHHQDLTLLKALVRQQLPEKYKEIFFDQSKNGYAGYIDGGASQEEFYKFIKPILEKMDGTEELLVKLNREDLLRKQRTFDNGSIPHQIHLGELHAILRRQEDFYPFLKDNREKIEKILTFRIPYYVGPLARGNSRFAWMTRKSEETITPWNFEEVVDKGASAQSFIERMTNFDKNLPNEKVLPKHSLLYEYFTVYNELTKVKYVTEGMRKPAFLSGEQKKAIVDLLFKTNRKVTVKQLKEDYFKKIECFDSVEISGVEDRFNASLGTYHDLLKIIKDKDFLDNEENEDILEDIVLTLTLFEDREMIEERLKTYAHLFDDKVMKQLKRRRYTGWGRLSRKLINGIRDKQSGKTILDFLKSDGFANRNFMQLIHDDSLTFKEDIQKAQVSGQGDSLHEHIANLAGSPAIKKGILQTVKVVDELVKVMGRHKPENIVIEMARENQTTQKGQKNSRERMKRIEEGIKELGSQILKEHPVENTQLQNEKLYLYYLQNGRDMYVDQELDINRLSDYDVDHIVPQSFLKDDSIDNKVLTRSDKARGKSDNVPSEEVVKKMKNYWRQLLNAKLITQRKFDNLTKAERGGLSELDKAGFIKRQLVETRQITKHVAQILDSRMNTKYDENDKLIREVKVITLKSKLVSDFRKDFQFYKVREINNYHHAHDAYLNAVVGTALIKKYPKLESEFVYGDYKVYDVRKMIAKSEQEIGKATAKYFFYSNIMNFFKTEITLANGEIRKRPLIETNGETGEIVWDKGRDFATVRKVLSMPQVNIVKKTEVQTGGFSKESILPKRNSDKLIARKKDWDPKKYGGFDSPTVAYSVLVVAKVEKGKSKKLKSVKELLGITIMERSSFEKNPIDFLEAKGYKEVKKDLIIKLPKYSLFELENGRKRMLASAGELQKGNELALPSKYVNFLYLASHYEKLKGSPEDNEQKQLFVEQHKHYLDEIIEQISEFSKRVILADANLDKVLSAYNKHRDKPIREQAENIIHLFTLTNLGAPAAFKYFDTTIDRKRYTSTKEVLDATLIHQSITGLYETRIDLSQLGGDGGPAPAPAPAPAPGGGLEHLPRPPEISQFPLNPERLQALQHLVRKALEAGHIEPYTGPGNNPVFPVKKANGTWRFIHDLRATNSLTVDLSSSSPGPPDLSSLPTTLAHLQTIDLKDAFFQIPLPKQFQPYFAFTVPQQCNYGPGTRYAWKVLPQGFKNSPTLFQMQLASILQPIRQAFPQCVILQYMDDILLASPSPEDLQQLSEATMASLISHGLPVSQDKTQQTPGTIKFLGQIISPNHITYDAVPTVPIRSRWALPELQALLGEIQWVSKGTPTLRQPLHSLYCALQGHTDPRDQIYLNPSQVQSLMQLQQALSQNCRSRLAQTLPLLGAIMLTLTGTTTVVFQSKQQWPLVWLHAPLPHTSQCPWGQLLASAVLLLDKYTLQSYGLLCQTIHHNISIQTFNQFIQTSDHPSVPILLHHSHRFKNLGAQTGELWNTFLKTAAPLAPVKALTPVFTLSPIIINTAPCLFSDGSTSQAAYILWDKHILSQRSFPLPPPHKSAQQAELLGLLHGLSSARSWHCLNIFLDSKYLYHYLRTLAWGTFQGKSSQAPFQALLPRLLAHKVIYLHHVRSHTNLPDPISKLNALTDALLITPILAGKRTADGSEFEKRTADGSEFESPKKKAKVE

SEQ ID NO: 1501 - protein, 2006 aa, synthetic construct
MPAAKRVKLDGGDKKYSIGLDIGTNSVGWAVITDEYKVPSKKFKVLGNTDRHSIKKNLIGALLFDSGETAEATRLKRTARRRYTRRKNRICYLQEIFSNEMAKVDDSFFHRLEESFLVEEDKKHERHPIFGNIVDEVAYHEKYPTIYHLRKKLVDSTDKADLRLIYLALAHMIKFRGHFLIEGDLNPDNSDVDKLFIQLVQTYNQLFEENPINASGVDAKAILSARLSKSRRLENLIAQLPGEKKNGLFGNLIALSLGLTPNFKSNFDLAEDAKLQLSKDTYDDDLDNLLAQIGDQYADLFLAAKNLSDAILLSDILRVNTEITKAPLSASMIKRYDEHHQDLTLLKALVRQQLPEKYKEIFFDQSKNGYAGYIDGGASQEEFYKFIKPILEKMDGTEELLVKLNREDLLRKQRTFDNGSIPHQIHLGELHAILRRQEDFYPFLKDNREKIEKILTFRIPYYVGPLARGNSRFAWMTRKSEETITPWNFEEVVDKGASAQSFIERMTNFDKNLPNEKVLPKHSLLYEYFTVYNELTKVKYVTEGMRKPAFLSGEQKKAIVDLLFKTNRKVTVKQLKEDYFKKIECFDSVEISGVEDRFNASLGTYHDLLKIIKDKDFLDNEENEDILEDIVLTLTLFEDREMIEERLKTYAHLFDDKVMKQLKRRRYTGWGRLSRKLINGIRDKQSGKTILDFLKSDGFANRNFMQLIHDDSLTFKEDIQKAQVSGQGDSLHEHIANLAGSPAIKKGILQTVKVVDELVKVMGRHKPENIVIEMARENQTTQKGQKNSRERMKRIEEGIKELGSQILKEHPVENTQLQNEKLYLYYLQNGRDMYVDQELDINRLSDYDVDHIVPQSFLKDDSIDNKVLTRSDKARGKSDNVPSEEVVKKMKNYWRQLLNAKLITQRKFDNLTKAERGGLSELDKAGFIKRQLVETRQITKHVAQILDSRMNTKYDENDKLIREVKVITLKSKLVSDFRKDFQFYKVREINNYHHAHDAYLNAVVGTALIKKYPKLESEFVYGDYKVYDVRKMIAKSEQEIGKATAKYFFYSNIMNFFKTEITLANGEIRKRPLIETNGETGEIVWDKGRDFATVRKVLSMPQVNIVKKTEVQTGGFSKESILPKRNSDKLIARKKDWDPKKYGGFDSPTVAYSVLVVAKVEKGKSKKLKSVKELLGITIMERSSFEKNPIDFLEAKGYKEVKKDLIIKLPKYSLFELENGRKRMLASAGELQKGNELALPSKYVNFLYLASHYEKLKGSPEDNEQKQLFVEQHKHYLDEIIEQISEFSKRVILADANLDKVLSAYNKHRDKPIREQAENIIHLFTLTNLGAPAAFKYFDTTIDRKRYTSTKEVLDATLIHQSITGLYETRIDLSQLGGDGGGGGGGSPAPGGGLEHLPRPPEISQFPLNPERLQALQHLVRKALEAGHIEPYTGPGNNPVFPVKKANGTWRFIHDLRATNSLTVDLSSSSPGPPDLSSLPTTLAHLQTIDLKDAFFQIPLPKQFQPYFAFTVPQQCNYGPGTRYAWKVLPQGFKNSPTLFQMQLASILQPIRQAFPQCVILQYMDDILLASPSPEDLQQLSEATMASLISHGLPVSQDKTQQTPGTIKFLGQIISPNHITYDAVPTVPIRSRWALPELQALLGEIQWVSKGTPTLRQPLHSLYCALQGHTDPRDQIYLNPSQVQSLMQLQQALSQNCRSRLAQTLPLLGAIMLTLTGTTTVVFQSKQQWPLVWLHAPLPHTSQCPWGQLLASAVLLLDKYTLQSYGLLCQTIHHNISIQTFNQFIQTSDHPSVPILLHHSHRFKNLGAQTGELWNTFLKTAAPLAPVKALTPVFTLSPIIINTAPCLFSDGSTSQAAYILWDKHILSQRSFPLPPPHKSAQQAELLGLLHGLSSARSWHCLNIFLDSKYLYHYLRTLAWGTFQGKSSQAPFQALLPRLLAHKVIYLHHVRSHTNLPDPISKLNALTDALLITPILAGKRTADGSEFEKRTADGSEFESPKKKAKVE

SEQ ID NO: 1502 - protein, 2012 aa, synthetic construct
MPAAKRVKLDGGDKKYSIGLDIGTNSVGWAVITDEYKVPSKKFKVLGNTDRHSIKKNLIGALLFDSGETAEATRLKRTARRRYTRRKNRICYLQEIFSNEMAKVDDSFFHRLEESFLVEEDKKHERHPIFGNIVDEVAYHEKYPTIYHLRKKLVDSTDKADLRLIYLALAHMIKFRGHFLIEGDLNPDNSDVDKLFIQLVQTYNQLFEENPINASGVDAKAILSARLSKSRRLENLIAQLPGEKKNGLFGNLIALSLGLTPNFKSNFDLAEDAKLQLSKDTYDDDLDNLLAQIGDQYADLFLAAKNLSDAILLSDILRVNTEITKAPLSASMIKRYDEHHQDLTLLKALVRQQLPEKYKEIFFDQSKNGYAGYIDGGASQEEFYKFIKPILEKMDGTEELLVKLNREDLLRKQRTFDNGSIPHQIHLGELHAILRRQEDFYPFLKDNREKIEKILTFRIPYYVGPLARGNSRFAWMTRKSEETITPWNFEEVVDKGASAQSFIERMTNFDKNLPNEKVLPKHSLLYEYFTVYNELTKVKYVTEGMRKPAFLSGEQKKAIVDLLFKTNRKVTVKQLKEDYFKKIECFDSVEISGVEDRFNASLGTYHDLLKIIKDKDFLDNEENEDILEDIVLTLTLFEDREMIEERLKTYAHLFDDKVMKQLKRRRYTGWGRLSRKLINGIRDKQSGKTILDFLKSDGFANRNFMQLIHDDSLTFKEDIQKAQVSGQGDSLHEHIANLAGSPAIKKGILQTVKVVDELVKVMGRHKPENIVIEMARENQTTQKGQKNSRERMKRIEEGIKELGSQILKEHPVENTQLQNEKLYLYYLQNGRDMYVDQELDINRLSDYDVDHIVPQSFLKDDSIDNKVLTRSDKARGKSDNVPSEEVVKKMKNYWRQLLNAKLITQRKFDNLTKAERGGLSELDKAGFIKRQLVETRQITKHVAQILDSRMNTKYDENDKLIREVKVITLKSKLVSDFRKDFQFYKVREINNYHHAHDAYLNAVVGTALIKKYPKLESEFVYGDYKVYDVRKMIAKSEQEIGKATAKYFFYSNIMNFFKTEITLANGEIRKRPLIETNGETGEIVWDKGRDFATVRKVLSMPQVNIVKKTEVQTGGFSKESILPKRNSDKLIARKKDWDPKKYGGFDSPTVAYSVLVVAKVEKGKSKKLKSVKELLGITIMERSSFEKNPIDFLEAKGYKEVKKDLIIKLPKYSLFELENGRKRMLASAGELQKGNELALPSKYVNFLYLASHYEKLKGSPEDNEQKQLFVEQHKHYLDEIIEQISEFSKRVILADANLDKVLSAYNKHRDKPIREQAENIIHLFTLTNLGAPAAFKYFDTTIDRKRYTSTKEVLDATLIHQSITGLYETRIDLSQLGGDGGGGSGGSGGSGGSGGSGGGLEHLPRPPEISQFPLNPERLQALQHLVRKALEAGHIEPYTGPGNNPVFPVKKANGTWRFIHDLRATNSLTVDLSSSSPGPPDLSSLPTTLAHLQTIDLKDAFFQIPLPKQFQPYFAFTVPQQCNYGPGTRYAWKVLPQGFKNSPTLFQMQLASILQPIRQAFPQCVILQYMDDILLASPSPEDLQQLSEATMASLISHGLPVSQDKTQQTPGTIKFLGQIISPNHITYDAVPTVPIRSRWALPELQALLGEIQWVSKGTPTLRQPLHSLYCALQGHTDPRDQIYLNPSQVQSLMQLQQALSQNCRSRLAQTLPLLGAIMLTLTGTTTVVFQSKQQWPLVWLHAPLPHTSQCPWGQLLASAVLLLDKYTLQSYGLLCQTIHHNISIQTFNQFIQTSDHPSVPILLHHSHRFKNLGAQTGELWNTFLKTAAPLAPVKALTPVFTLSPIIINTAPCLFSDGSTSQAAYILWDKHILSQRSFPLPPPHKSAQQAELLGLLHGLSSARSWHCLNIFLDSKYLYHYLRTLAWGTFQGKSSQAPFQALLPRLLAHKVIYLHHVRSHTNLPDPISKLNALTDALLITPILAGKRTADGSEFEKRTADGSEFESPKKKAKVE

SEQ ID NO: 1503 - protein, 2015 aa, synthetic construct
MPAAKRVKLDGGDKKYSIGLDIGTNSVGWAVITDEYKVPSKKFKVLGNTDRHSIKKNLIGALLFDSGETAEATRLKRTARRRYTRRKNRICYLQEIFSNEMAKVDDSFFHRLEESFLVEEDKKHERHPIFGNIVDEVAYHEKYPTIYHLRKKLVDSTDKADLRLIYLALAHMIKFRGHFLIEGDLNPDNSDVDKLFIQLVQTYNQLFEENPINASGVDAKAILSARLSKSRRLENLIAQLPGEKKNGLFGNLIALSLGLTPNFKSNFDLAEDAKLQLSKDTYDDDLDNLLAQIGDQYADLFLAAKNLSDAILLSDILRVNTEITKAPLSASMIKRYDEHHQDLTLLKALVRQQLPEKYKEIFFDQSKNGYAGYIDGGASQEEFYKFIKPILEKMDGTEELLVKLNREDLLRKQRTFDNGSIPHQIHLGELHAILRRQEDFYPFLKDNREKIEKILTFRIPYYVGPLARGNSRFAWMTRKSEETITPWNFEEVVDKGASAQSFIERMTNFDKNLPNEKVLPKHSLLYEYFTVYNELTKVKYVTEGMRKPAFLSGEQKKAIVDLLFKTNRKVTVKQLKEDYFKKIECFDSVEISGVEDRFNASLGTYHDLLKIIKDKDFLDNEENEDILEDIVLTLTLFEDREMIEERLKTYAHLFDDKVMKQLKRRRYTGWGRLSRKLINGIRDKQSGKTILDFLKSDGFANRNFMQLIHDDSLTFKEDIQKAQVSGQGDSLHEHIANLAGSPAIKKGILQTVKVVDELVKVMGRHKPENIVIEMARENQTTQKGQKNSRERMKRIEEGIKELGSQILKEHPVENTQLQNEKLYLYYLQNGRDMYVDQELDINRLSDYDVDHIVPQSFLKDDSIDNKVLTRSDKARGKSDNVPSEEVVKKMKNYWRQLLNAKLITQRKFDNLTKAERGGLSELDKAGFIKRQLVETRQITKHVAQILDSRMNTKYDENDKLIREVKVITLKSKLVSDFRKDFQFYKVREINNYHHAHDAYLNAVVGTALIKKYPKLESEFVYGDYKVYDVRKMIAKSEQEIGKATAKYFFYSNIMNFFKTEITLANGEIRKRPLIETNGETGEIVWDKGRDFATVRKVLSMPQVNIVKKTEVQTGGFSKESILPKRNSDKLIARKKDWDPKKYGGFDSPTVAYSVLVVAKVEKGKSKKLKSVKELLGITIMERSSFEKNPIDFLEAKGYKEVKKDLIIKLPKYSLFELENGRKRMLASAGELQKGNELALPSKYVNFLYLASHYEKLKGSPEDNEQKQLFVEQHKHYLDEIIEQISEFSKRVILADANLDKVLSAYNKHRDKPIREQAENIIHLFTLTNLGAPAAFKYFDTTIDRKRYTSTKEVLDATLIHQSITGLYETRIDLSQLGGDGGGGSGGSGGSGGSGGSGGSGGGLEHLPRPPEISQFPLNPERLQALQHLVRKALEAGHIEPYTGPGNNPVFPVKKANGTWRFIHDLRATNSLTVDLSSSSPGPPDLSSPPTTLAHLQTIDLKDAFFQIPLPKQFQPYFAFTVPQQCNYGPGTRYAWKVLPQGFKNSPTLFQMQLASILQPIRQAFPQCVILQYMDDILLASPSPEDLQQLSEATMASLISHGLPVSQDKTQQTPGTIKFLGQIISPNHITYDAVPTVPIRSRWALPELQALLGEIQWVSKGTPTLRQPLHSLYCALQGHTDPRDQIYLNPSQVQSLMQLQQALSQNCRSRLAQTLPLLGAIMLTLTGTTTVVFQSKQQWPLVWLHAPLPHTSQCPWGQLLASAVLLLDKYTLQSYGLLCQTIHHNISIQTFNQFIQTSDHPSVPILLHHSHRFKNLGAQTGELWNTFLKTAAPLAPVKALTPVFTLSPIIINTAPCLFSDGSTSQAAYILWDKHILSQRSFPLPPPHKSAQQAELLGLLHGLSSARSWHCLNIFLDSKYLYHYLRTLAWGTFQGKSSQAPFQALLPRLLAHKVIYLHHVRSHTNLPDPISKLNALTDALLITPILAGKRTADGSEFEKRTADGSEFESPKKKAKVE

SEQ ID NO: 1504 - protein, 2099 aa, synthetic construct
MPAAKRVKLDGGDKKYSIGLDIGTNSVGWAVITDEYKVPSKKFKVLGNTDRHSIKKNLIGALLFDSGETAEATRLKRTARRRYTRRKNRICYLQEIFSNEMAKVDDSFFHRLEESFLVEEDKKHERHPIFGNIVDEVAYHEKYPTIYHLRKKLVDSTDKADLRLIYLALAHMIKFRGHFLIEGDLNPDNSDVDKLFIQLVQTYNQLFEENPINASGVDAKAILSARLSKSRRLENLIAQLPGEKKNGLFGNLIALSLGLTPNFKSNFDLAEDAKLQLSKDTYDDDLDNLLAQIGDQYADLFLAAKNLSDAILLSDILRVNTEITKAPLSASMIKRYDEHHQDLTLLKALVRQQLPEKYKEIFFDQSKNGYAGYIDGGASQEEFYKFIKPILEKMDGTEELLVKLNREDLLRKQRTFDNGSIPHQIHLGELHAILRRQEDFYPFLKDNREKIEKILTFRIPYYVGPLARGNSRFAWMTRKSEETITPWNFEEVVDKGASAQSFIERMTNFDKNLPNEKVLPKHSLLYEYFTVYNELTKVKYVTEGMRKPAFLSGEQKKAIVDLLFKTNRKVTVKQLKEDYFKKIECFDSVEISGVEDRFNASLGTYHDLLKIIKDKDFLDNEENEDILEDIVLTLTLFEDREMIEERLKTYAHLFDDKVMKQLKRRRYTGWGRLSRKLINGIRDKQSGKTILDFLKSDGFANRNFMQLIHDDSLTFKEDIQKAQVSGQGDSLHEHIANLAGSPAIKKGILQTVKVVDELVKVMGRHKPENIVIEMARENQTTQKGQKNSRERMKRIEEGIKELGSQILKEHPVENTQLQNEKLYLYYLQNGRDMYVDQELDINRLSDYDVDHIVPQSFLKDDSIDNKVLTRSDKARGKSDNVPSEEVVKKMKNYWRQLLNAKLITQRKFDNLTKAERGGLSELDKAGFIKRQLVETRQITKHVAQILDSRMNTKYDENDKLIREVKVITLKSKLVSDFRKDFQFYKVREINNYHHAHDAYLNAVVGTALIKKYPKLESEFVYGDYKVYDVRKMIAKSEQEIGKATAKYFFYSNIMNFFKTEITLANGEIRKRPLIETNGETGEIVWDKGRDFATVRKVLSMPQVNIVKKTEVQTGGFSKESILPKRNSDKLIARKKDWDPKKYGGFDSPTVAYSVLVVAKVEKGKSKKLKSVKELLGITIMERSSFEKNPIDFLEAKGYKEVKKDLIIKLPKYSLFELENGRKRMLASAGELQKGNELALPSKYVNFLYLASHYEKLKGSPEDNEQKQLFVEQHKHYLDEIIEQISEFSKRVILADANLDKVLSAYNKHRDKPIREQAENIIHLFTLTNLGAPAAFKYFDTTIDRKRYTSTKEVLDATLIHQSITGLYETRIDLSQLGGDGGEAAAKPAPGGTVSLQDEHRLFDIPVTTSLPDVWLQDFPQAWAETGGLGRAKCQAPIIIDLKPTAVPVSIKQYPMSLEAHMGIRQHIIKFLELGVLRPCRSPWNTPLLPVKKPGTQDYRPVQDLREINKRTVDIHPTVPNPYNLLSTLKPDYSWYTVLDLKDAFFCLPLAPQSQELFAFEWKDPERGISGQLTWTRLPQGFKNSPTLFDEALHRDLTDFRTQHPEVTLLQYVDDLLLAAPTKKACTQGTRHLLQELGEKGYRASAKKAQICQTKVTYLGYILSEGKRWLTPGRIETVARIPPPRNPREVREFLGTAGFCRLWIPGFAELAAPLYALTKESTPFTWQTEHQLAFEALKKALLSAPALGLPDTSKPFTLFLDERQGIAKGVLTQKLGPWKRPVAYLSKKLDPVAAGWPPCLRIMAATAMLVKDSAKLTLGQPLTVITPHTLEAIVRQPPDRWITNARLTHYQALLLDTDRVQFGPPVTLNPATLLPVPENQPSPHDCRQVLAETHGTREDLKDQELPDADHTWYTDGSSYLDSGTRRAGAAVVDGHNTIWAQSLPPGTSAQKAELIALTKALELSKGKKANIYTDSRYAFATAHTHGSIYERRGLLTSEGKEIKNKAEIIALLKALFLPQEVAIIHCPGHQKGQDPVAVGNRQADRVARQAAMAEVLTLATEPDNTSHITAGKRTADGSEFEKRTADGSEFESPKKKAKVE

SEQ ID NO: 1505 - protein, 2100 aa, synthetic construct
MPAAKRVKLDGGDKKYSIGLDIGTNSVGWAVITDEYKVPSKKFKVLGNTDRHSIKKNLIGALLFDSGETAEATRLKRTARRRYTRRKNRICYLQEIFSNEMAKVDDSFFHRLEESFLVEEDKKHERHPIFGNIVDEVAYHEKYPTIYHLRKKLVDSTDKADLRLIYLALAHMIKFRGHFLIEGDLNPDNSDVDKLFIQLVQTYNQLFEENPINASGVDAKAILSARLSKSRRLENLIAQLPGEKKNGLFGNLIALSLGLTPNFKSNFDLAEDAKLQLSKDTYDDDLDNLLAQIGDQYADLFLAAKNLSDAILLSDILRVNTEITKAPLSASMIKRYDEHHQDLTLLKALVRQQLPEKYKEIFFDQSKNGYAGYIDGGASQEEFYKFIKPILEKMDGTEELLVKLNREDLLRKQRTFDNGSIPHQIHLGELHAILRRQEDFYPFLKDNREKIEKILTFRIPYYVGPLARGNSRFAWMTRKSEETITPWNFEEVVDKGASAQSFIERMTNFDKNLPNEKVLPKHSLLYEYFTVYNELTKVKYVTEGMRKPAFLSGEQKKAIVDLLFKTNRKVTVKQLKEDYFKKIECFDSVEISGVEDRFNASLGTYHDLLKIIKDKDFLDNEENEDILEDIVLTLTLFEDREMIEERLKTYAHLFDDKVMKQLKRRRYTGWGRLSRKLINGIRDKQSGKTILDFLKSDGFANRNFMQLIHDDSLTFKEDIQKAQVSGQGDSLHEHIANLAGSPAIKKGILQTVKVVDELVKVMGRHKPENIVIEMARENQTTQKGQKNSRERMKRIEEGIKELGSQILKEHPVENTQLQNEKLYLYYLQNGRDMYVDQELDINRLSDYDVDHIVPQSFLKDDSIDNKVLTRSDKARGKSDNVPSEEVVKKMKNYWRQLLNAKLITQRKFDNLTKAERGGLSELDKAGFIKRQLVETRQITKHVAQILDSRMNTKYDENDKLIREVKVITLKSKLVSDFRKDFQFYKVREINNYHHAHDAYLNAVVGTALIKKYPKLESEFVYGDYKVYDVRKMIAKSEQEIGKATAKYFFYSNIMNFFKTEITLANGEIRKRPLIETNGETGEIVWDKGRDFATVRKVLSMPQVNIVKKTEVQTGGFSKESILPKRNSDKLIARKKDWDPKKYGGFDSPTVAYSVLVVAKVEKGKSKKLKSVKELLGITIMERSSFEKNPIDFLEAKGYKEVKKDLIIKLPKYSLFELENGRKRMLASAGELQKGNELALPSKYVNFLYLASHYEKLKGSPEDNEQKQLFVEQHKHYLDEIIEQISEFSKRVILADANLDKVLSAYNKHRDKPIREQAENIIHLFTLTNLGAPAAFKYFDTTIDRKRYTSTKEVLDATLIHQSITGLYETRIDLSQLGGDGGGGGGSSPAPGGTVSLQDEHRLFDIPVTTSLPDVWLQDFPQAWAETGGLGRAKCQAPIIIDLKPTAVPVSIKQYPMSLEAHMGIRQHIIKFLELGVLRPCRSPWNTPLLPVKKPGTQDYRPVQDLREINKRTVDIHPTVPNPYNLLSTLKPDYSWYTVLDLKDAFFCLPLAPQSQELFAFEWKDPERGISGQLTWTRLPQGFKNSPTLFDEALHRDLTDFRTQHPEVTLLQYVDDLLLAAPTKKACTQGTRHLLQELGEKGYRASAKKAQICQTKVTYLGYILSEGKRWLTPGRIETVARIPPPRNPREVREFLGTAGFCRLWIPGFAELAAPLYALTKESTPFTWQTEHQLAFEALKKALLSAPALGLPDTSKPFTLFLDERQGIAKGVLTQKLGPWKRPVAYLSKKLDPVAAGWPPCLRIMAATAMLVKDSAKLTLGQPLTVITPHTLEAIVRQPPDRWITNARLTHYQALLLDTDRVQFGPPVTLNPATLLPVPENQPSPHDCRQVLAETHGTREDLKDQELPDADHTWYTDGSSYLDSGTRRAGAAVVDGHNTIWAQSLPPGTSAQKAELIALTKALELSKGKKANIYTDSRYAFATAHTHGSIYERRGLLTSEGKEIKNKAEIIALLKALFLPQEVAIIHCPGHQKGQDPVAVGNRQADRVARQAAMAEVLTLATEPDNTSHITAGKRTADGSEFEKRTADGSEFESPKKKAKVE

SEQ ID NO: 1506 - protein, 2100 aa, synthetic construct
MPAAKRVKLDGGDKKYSIGLDIGTNSVGWAVITDEYKVPSKKFKVLGNTDRHSIKKNLIGALLFDSGETAEATRLKRTARRRYTRRKNRICYLQEIFSNEMAKVDDSFFHRLEESFLVEEDKKHERHPIFGNIVDEVAYHEKYPTIYHLRKKLVDSTDKADLRLIYLALAHMIKFRGHFLIEGDLNPDNSDVDKLFIQLVQTYNQLFEENPINASGVDAKAILSARLSKSRRLENLIAQLPGEKKNGLFGNLIALSLGLTPNFKSNFDLAEDAKLQLSKDTYDDDLDNLLAQIGDQYADLFLAAKNLSDAILLSDILRVNTEITKAPLSASMIKRYDEHHQDLTLLKALVRQQLPEKYKEIFFDQSKNGYAGYIDGGASQEEFYKFIKPILEKMDGTEELLVKLNREDLLRKQRTFDNGSIPHQIHLGELHAILRRQEDFYPFLKDNREKIEKILTFRIPYYVGPLARGNSRFAWMTRKSEETITPWNFEEVVDKGASAQSFIERMTNFDKNLPNEKVLPKHSLLYEYFTVYNELTKVKYVTEGMRKPAFLSGEQKKAIVDLLFKTNRKVTVKQLKEDYFKKIECFDSVEISGVEDRFNASLGTYHDLLKIIKDKDFLDNEENEDILEDIVLTLTLFEDREMIEERLKTYAHLFDDKVMKQLKRRRYTGWGRLSRKLINGIRDKQSGKTILDFLKSDGFANRNFMQLIHDDSLTFKEDIQKAQVSGQGDSLHEHIANLAGSPAIKKGILQTVKVVDELVKVMGRHKPENIVIEMARENQTTQKGQKNSRERMKRIEEGIKELGSQILKEHPVENTQLQNEKLYLYYLQNGRDMYVDQELDINRLSDYDVDHIVPQSFLKDDSIDNKVLTRSDKARGKSDNVPSEEVVKKMKNYWRQLLNAKLITQRKFDNLTKAERGGLSELDKAGFIKRQLVETRQITKHVAQILDSRMNTKYDENDKLIREVKVITLKSKLVSDFRKDFQFYKVREINNYHHAHDAYLNAVVGTALIKKYPKLESEFVYGDYKVYDVRKMIAKSEQEIGKATAKYFFYSNIMNFFKTEITLANGEIRKRPLIETNGETGEIVWDKGRDFATVRKVLSMPQVNIVKKTEVQTGGFSKESILPKRNSDKLIARKKDWDPKKYGGFDSPTVAYSVLVVAKVEKGKSKKLKSVKELLGITIMERSSFEKNPIDFLEAKGYKEVKKDLIIKLPKYSLFELENGRKRMLASAGELQKGNELALPSKYVNFLYLASHYEKLKGSPEDNEQKQLFVEQHKHYLDEIIEQISEFSKRVILADANLDKVLSAYNKHRDKPIREQAENIIHLFTLTNLGAPAAFKYFDTTIDRKRYTSTKEVLDATLIHQSITGLYETRIDLSQLGGDGGPAPGGSGGGGGTVSLQDEHRLFDIPVTTSLPDVWLQDFPQAWAETGGLGRAKCQAPIIIDLKPTAVPVSIKQYPMSLEAHMGIRQHIIKFLELGVLRPCRSPWNTPLLPVKKPGTQDYRPVQDLREINKRTVDIHPTVPNPYNLLSTLKPDYSWYTVLDLKDAFFCLPLAPQSQELFAFEWKDPERGISGQLTWTRLPQGFKNSPTLFDEALHRDLTDFRTQHPEVTLLQYVDDLLLAAPTKKACTQGTRHLLQELGEKGYRASAKKAQICQTKVTYLGYILSEGKRWLTPGRIETVARIPPPRNPREVREFLGTAGFCRLWIPGFAELAAPLYALTKESTPFTWQTEHQLAFEALKKALLSAPALGLPDTSKPFTLFLDERQGIAKGVLTQKLGPWKRPVAYLSKKLDPVAAGWPPCLRIMAATAMLVKDSAKLTLGQPLTVITPHTLEAIVRQPPDRWITNARLTHYQALLLDTDRVQFGPPVTLNPATLLPVPENQPSPHDCRQVLAETHGTREDLKDQELPDADHTWYTDGSSYLDSGTRRAGAAVVDGHNTIWAQSLPPGTSAQKAELIALTKALELSKGKKANIYTDSRYAFATAHTHGSIYERRGLLTSEGKEIKNKAEIIALLKALFLPQEVAIIHCPGHQKGQDPVAVGNRQADRVARQAAMAEVLTLATEPDNTSHITAGKRTADGSEFEKRTADGSEFESPKKKAKVE

SEQ ID NO: 1507 - protein, 2106 aa, synthetic construct
MPAAKRVKLDGGDKKYSIGLDIGTNSVGWAVITDEYKVPSKKFKVLGNTDRHSIKKNLIGALLFDSGETAEATRLKRTARRRYTRRKNRICYLQEIFSNEMAKVDDSFFHRLEESFLVEEDKKHERHPIFGNIVDEVAYHEKYPTIYHLRKKLVDSTDKADLRLIYLALAHMIKFRGHFLIEGDLNPDNSDVDKLFIQLVQTYNQLFEENPINASGVDAKAILSARLSKSRRLENLIAQLPGEKKNGLFGNLIALSLGLTPNFKSNFDLAEDAKLQLSKDTYDDDLDNLLAQIGDQYADLFLAAKNLSDAILLSDILRVNTEITKAPLSASMIKRYDEHHQDLTLLKALVRQQLPEKYKEIFFDQSKNGYAGYIDGGASQEEFYKFIKPILEKMDGTEELLVKLNREDLLRKQRTFDNGSIPHQIHLGELHAILRRQEDFYPFLKDNREKIEKILTFRIPYYVGPLARGNSRFAWMTRKSEETITPWNFEEVVDKGASAQSFIERMTNFDKNLPNEKVLPKHSLLYEYFTVYNELTKVKYVTEGMRKPAFLSGEQKKAIVDLLFKTNRKVTVKQLKEDYFKKIECFDSVEISGVEDRFNASLGTYHDLLKIIKDKDFLDNEENEDILEDIVLTLTLFEDREMIEERLKTYAHLFDDKVMKQLKRRRYTGWGRLSRKLINGIRDKQSGKTILDFLKSDGFANRNFMQLIHDDSLTFKEDIQKAQVSGQGDSLHEHIANLAGSPAIKKGILQTVKVVDELVKVMGRHKPENIVIEMARENQTTQKGQKNSRERMKRIEEGIKELGSQILKEHPVENTQLQNEKLYLYYLQNGRDMYVDQELDINRLSDYDVDHIVPQSFLKDDSIDNKVLTRSDKARGKSDNVPSEEVVKKMKNYWRQLLNAKLITQRKFDNLTKAERGGLSELDKAGFIKRQLVETRQITKHVAQILDSRMNTKYDENDKLIREVKVITLKSKLVSDFRKDFQFYKVREINNYHHAHDAYLNAVVGTALIKKYPKLESEFVYGDYKVYDVRKMIAKSEQEIGKATAKYFFYSNIMNFFKTEITLANGEIRKRPLIETNGETGEIVWDKGRDFATVRKVLSMPQVNIVKKTEVQTGGFSKESILPKRNSDKLIARKKDWDPKKYGGFDSPTVAYSVLVVAKVEKGKSKKLKSVKELLGITIMERSSFEKNPIDFLEAKGYKEVKKDLIIKLPKYSLFELENGRKRMLASAGELQKGNELALPSKYVNFLYLASHYEKLKGSPEDNEQKQLFVEQHKHYLDEIIEQISEFSKRVILADANLDKVLSAYNKHRDKPIREQAENIIHLFTLTNLGAPAAFKYFDTTIDRKRYTSTKEVLDATLIHQSITGLYETRIDLSQLGGDGGGGSGGSGGSGGSGGSGGTVSLQDEHRLFDIPVTTSLPDVWLQDFPQAWAETGGLGRAKCQAPIIIDLKPTAVPVSIKQYPMSLEAHMGIRQHIIKFLELGVLRPCRSPWNTPLLPVKKPGTQDYRPVQDLREINKRTVDIHPTVPNPYNLLSTLKPDYSWYTVLDLKDAFFCLPLAPQSQELFAFEWKDPERGISGQLTWTRLPQGFKNSPTLFDEALHRDLTDFRTQHPEVTLLQYVDDLLLAAPTKKACTQGTRHLLQELGEKGYRASAKKAQICQTKVTYLGYILSEGKRWLTPGRIETVARIPPPRNPREVREFLGTAGFCRLWIPGFAELAAPLYALTKESTPFTWQTEHQLAFEALKKALLSAPALGLPDTSKPFTLFLDERQGIAKGVLTQKLGPWKRPVAYLSKKLDPVAAGWPPCLRIMAATAMLVKDSAKLTLGQPLTVITPHTLEAIVRQPPDRWITNARLTHYQALLLDTDRVQFGPPVTLNPATLLPVPENQPSPHDCRQVLAETHGTREDLKDQELPDADHTWYTDGSSYLDSGTRRAGAAVVDGHNTIWAQSLPPGTSAQKAELIALTKALELSKGKKANIYTDSRYAFATAHTHGSIYERRGLLTSEGKEIKNKAEIIALLKALFLPQEVAIIHCPGHQKGQDPVAVGNRQADRVARQAAMAEVLTLATEPDNTSHITAGKRTADGSEFEKRTADGSEFESPKKKAKVE

SEQ ID NO: 1508 - protein, 2100 aa, synthetic construct
MPAAKRVKLDGGDKKYSIGLDIGTNSVGWAVITDEYKVPSKKFKVLGNTDRHSIKKNLIGALLFDSGETAEATRLKRTARRRYTRRKNRICYLQEIFSNEMAKVDDSFFHRLEESFLVEEDKKHERHPIFGNIVDEVAYHEKYPTIYHLRKKLVDSTDKADLRLIYLALAHMIKFRGHFLIEGDLNPDNSDVDKLFIQLVQTYNQLFEENPINASGVDAKAILSARLSKSRRLENLIAQLPGEKKNGLFGNLIALSLGLTPNFKSNFDLAEDAKLQLSKDTYDDDLDNLLAQIGDQYADLFLAAKNLSDAILLSDILRVNTEITKAPLSASMIKRYDEHHQDLTLLKALVRQQLPEKYKEIFFDQSKNGYAGYIDGGASQEEFYKFIKPILEKMDGTEELLVKLNREDLLRKQRTFDNGSIPHQIHLGELHAILRRQEDFYPFLKDNREKIEKILTFRIPYYVGPLARGNSRFAWMTRKSEETITPWNFEEVVDKGASAQSFIERMTNFDKNLPNEKVLPKHSLLYEYFTVYNELTKVKYVTEGMRKPAFLSGEQKKAIVDLLFKTNRKVTVKQLKEDYFKKIECFDSVEISGVEDRFNASLGTYHDLLKIIKDKDFLDNEENEDILEDIVLTLTLFEDREMIEERLKTYAHLFDDKVMKQLKRRRYTGWGRLSRKLINGIRDKQSGKTILDFLKSDGFANRNFMQLIHDDSLTFKEDIQKAQVSGQGDSLHEHIANLAGSPAIKKGILQTVKVVDELVKVMGRHKPENIVIEMARENQTTQKGQKNSRERMKRIEEGIKELGSQILKEHPVENTQLQNEKLYLYYLQNGRDMYVDQELDINRLSDYDVDHIVPQSFLKDDSIDNKVLTRSDKARGKSDNVPSEEVVKKMKNYWRQLLNAKLITQRKFDNLTKAERGGLSELDKAGFIKRQLVETRQITKHVAQILDSRMNTKYDENDKLIREVKVITLKSKLVSDFRKDFQFYKVREINNYHHAHDAYLNAVVGTALIKKYPKLESEFVYGDYKVYDVRKMIAKSEQEIGKATAKYFFYSNIMNFFKTEITLANGEIRKRPLIETNGETGEIVWDKGRDFATVRKVLSMPQVNIVKKTEVQTGGFSKESILPKRNSDKLIARKKDWDPKKYGGFDSPTVAYSVLVVAKVEKGKSKKLKSVKELLGITIMERSSFEKNPIDFLEAKGYKEVKKDLIIKLPKYSLFELENGRKRMLASAGELQKGNELALPSKYVNFLYLASHYEKLKGSPEDNEQKQLFVEQHKHYLDEIIEQISEFSKRVILADANLDKVLSAYNKHRDKPIREQAENIIHLFTLTNLGAPAAFKYFDTTIDRKRYTSTKEVLDATLIHQSITGLYETRIDLSQLGGDGGGSSGGSPAPGGTVSLQDEHRLFDIPVTTSLPDVWLQDFPQAWAETGGLGRAKCQAPIIIDLKPTAVPVSIKQYPMSLEAHMGIRQHIIKFLELGVLRPCRSPWNTPLLPVKKPGTQDYRPVQDLREINKRTVDIHPTVPNPYNLLSTLKPDYSWYTVLDLKDAFFCLPLAPQSQELFAFEWKDPERGISGQLTWTRLPQGFKNSPTLFDEALHRDLTDFRTQHPEVTLLQYVDDLLLAAPTKKACTQGTRHLLQELGEKGYRASAKKAQICQTKVTYLGYILSEGKRWLTPGRIETVARIPPPRNPREVREFLGTAGFCRLWIPGFAELAAPLYALTKESTPFTWQTEHQLAFEALKKALLSAPALGLPDTSKPFTLFLDERQGIAKGVLTQKLGPWKRPVAYLSKKLDPVAAGWPPCLRIMAATAMLVKDSAKLTLGQPLTVITPHTLEAIVRQPPDRWITNARLTHYQALLLDTDRVQFGPPVTLNPATLLPVPENQPSPHDCRQVLAETHGTREDLKDQELPDADHTWYTDGSSYLDSGTRRAGAAVVDGHNTIWAQSLPPGTSAQKAELIALTKALELSKGKKANIYTDSRYAFATAHTHGSIYERRGLLTSEGKEIKNKAEIIALLKALFLPQEVAIIHCPGHQKGQDPVAVGNRQADRVARQAAMAEVLTLATEPDNTSHITAGKRTADGSEFEKRTADGSEFESPKKKAKVE

SEQ ID NO: 1509 - protein, 2097 aa, synthetic construct
MPAAKRVKLDGGDKKYSIGLDIGTNSVGWAVITDEYKVPSKKFKVLGNTDRHSIKKNLIGALLFDSGETAEATRLKRTARRRYTRRKNRICYLQEIFSNEMAKVDDSFFHRLEESFLVEEDKKHERHPIFGNIVDEVAYHEKYPTIYHLRKKLVDSTDKADLRLIYLALAHMIKFRGHFLIEGDLNPDNSDVDKLFIQLVQTYNQLFEENPINASGVDAKAILSARLSKSRRLENLIAQLPGEKKNGLFGNLIALSLGLTPNFKSNFDLAEDAKLQLSKDTYDDDLDNLLAQIGDQYADLFLAAKNLSDAILLSDILRVNTEITKAPLSASMIKRYDEHHQDLTLLKALVRQQLPEKYKEIFFDQSKNGYAGYIDGGASQEEFYKFIKPILEKMDGTEELLVKLNREDLLRKQRTFDNGSIPHQIHLGELHAILRRQEDFYPFLKDNREKIEKILTFRIPYYVGPLARGNSRFAWMTRKSEETITPWNFEEVVDKGASAQSFIERMTNFDKNLPNEKVLPKHSLLYEYFTVYNELTKVKYVTEGMRKPAFLSGEQKKAIVDLLFKTNRKVTVKQLKEDYFKKIECFDSVEISGVEDRFNASLGTYHDLLKIIKDKDFLDNEENEDILEDIVLTLTLFEDREMIEERLKTYAHLFDDKVMKQLKRRRYTGWGRLSRKLINGIRDKQSGKTILDFLKSDGFANRNFMQLIHDDSLTFKEDIQKAQVSGQGDSLHEHIANLAGSPAIKKGILQTVKVVDELVKVMGRHKPENIVIEMARENQTTQKGQKNSRERMKRIEEGIKELGSQILKEHPVENTQLQNEKLYLYYLQNGRDMYVDQELDINRLSDYDVDHIVPQSFLKDDSIDNKVLTRSDKARGKSDNVPSEEVVKKMKNYWRQLLNAKLITQRKFDNLTKAERGGLSELDKAGFIKRQLVETRQITKHVAQILDSRMNTKYDENDKLIREVKVITLKSKLVSDFRKDFQFYKVREINNYHHAHDAYLNAVVGTALIKKYPKLESEFVYGDYKVYDVRKMIAKSEQEIGKATAKYFFYSNIMNFFKTEITLANGEIRKRPLIETNGETGEIVWDKGRDFATVRKVLSMPQVNIVKKTEVQTGGFSKESILPKRNSDKLIARKKDWDPKKYGGFDSPTVAYSVLVVAKVEKGKSKKLKSVKELLGITIMERSSFEKNPIDFLEAKGYKEVKKDLIIKLPKYSLFELENGRKRMLASAGELQKGNELALPSKYVNFLYLASHYEKLKGSPEDNEQKQLFVEQHKHYLDEIIEQISEFSKRVILADANLDKVLSAYNKHRDKPIREQAENIIHLFTLTNLGAPAAFKYFDTTIDRKRYTSTKEVLDATLIHQSITGLYETRIDLSQLGGDGGPAPGSSGGTVSLQDEHRLFDIPVTTSLPDVWLQDFPQAWAETGGLGRAKCQAPIIIDLKPTAVPVSIKQYPMSLEAHMGIRQHIIKFLELGVLRPCRSPWNTPLLPVKKPGTQDYRPVQDLREINKRTVDIHPTVPNPYNLLSTLKPDYSWYTVLDLKDAFFCLPLAPQSQELFAFEWKDPERGISGQLTWTRLPQGFKNSPTLFDEALHRDLTDFRTQHPEVTLLQYVDDLLLAAPTKKACTQGTRHLLQELGEKGYRASAKKAQICQTKVTYLGYILSEGKRWLTPGRIETVARIPPPRNPREVREFLGTAGFCRLWIPGFAELAAPLYALTKESTPFTWQTEHQLAFEALKKALLSAPALGLPDTSKPFTLFLDERQGIAKGVLTQKLGPWKRPVAYLSKKLDPVAAGWPPCLRIMAATAMLVKDSAKLTLGQPLTVITPHTLEAIVRQPPDRWITNARLTHYQALLLDTDRVQFGPPVTLNPATLLPVPENQPSPHDCRQVLAETHGTREDLKDQELPDADHTWYTDGSSYLDSGTRRAGAAVVDGHNTIWAQSLPPGTSAQKAELIALTKALELSKGKKANIYTDSRYAFATAHTHGSIYERRGLLTSEGKEIKNKAEIIALLKALFLPQEVAIIHCPGHQKGQDPVAVGNRQADRVARQAAMAEVLTLATEPDNTSHITAGKRTADGSEFEKRTADGSEFESPKKKAKVE

SEQ ID NO: 1510 - protein, 2009 aa, synthetic construct
MPAAKRVKLDGGDKKYSIGLDIGTNSVGWAVITDEYKVPSKKFKVLGNTDRHSIKKNLIGALLFDSGETAEATRLKRTARRRYTRRKNRICYLQEIFSNEMAKVDDSFFHRLEESFLVEEDKKHERHPIFGNIVDEVAYHEKYPTIYHLRKKLVDSTDKADLRLIYLALAHMIKFRGHFLIEGDLNPDNSDVDKLFIQLVQTYNQLFEENPINASGVDAKAILSARLSKSRRLENLIAQLPGEKKNGLFGNLIALSLGLTPNFKSNFDLAEDAKLQLSKDTYDDDLDNLLAQIGDQYADLFLAAKNLSDAILLSDILRVNTEITKAPLSASMIKRYDEHHQDLTLLKALVRQQLPEKYKEIFFDQSKNGYAGYIDGGASQEEFYKFIKPILEKMDGTEELLVKLNREDLLRKQRTFDNGSIPHQIHLGELHAILRRQEDFYPFLKDNREKIEKILTFRIPYYVGPLARGNSRFAWMTRKSEETITPWNFEEVVDKGASAQSFIERMTNFDKNLPNEKVLPKHSLLYEYFTVYNELTKVKYVTEGMRKPAFLSGEQKKAIVDLLFKTNRKVTVKQLKEDYFKKIECFDSVEISGVEDRFNASLGTYHDLLKIIKDKDFLDNEENEDILEDIVLTLTLFEDREMIEERLKTYAHLFDDKVMKQLKRRRYTGWGRLSRKLINGIRDKQSGKTILDFLKSDGFANRNFMQLIHDDSLTFKEDIQKAQVSGQGDSLHEHIANLAGSPAIKKGILQTVKVVDELVKVMGRHKPENIVIEMARENQTTQKGQKNSRERMKRIEEGIKELGSQILKEHPVENTQLQNEKLYLYYLQNGRDMYVDQELDINRLSDYDVDHIVPQSFLKDDSIDNKVLTRSDKARGKSDNVPSEEVVKKMKNYWRQLLNAKLITQRKFDNLTKAERGGLSELDKAGFIKRQLVETRQITKHVAQILDSRMNTKYDENDKLIREVKVITLKSKLVSDFRKDFQFYKVREINNYHHAHDAYLNAVVGTALIKKYPKLESEFVYGDYKVYDVRKMIAKSEQEIGKATAKYFFYSNIMNFFKTEITLANGEIRKRPLIETNGETGEIVWDKGRDFATVRKVLSMPQVNIVKKTEVQTGGFSKESILPKRNSDKLIARKKDWDPKKYGGFDSPTVAYSVLVVAKVEKGKSKKLKSVKELLGITIMERSSFEKNPIDFLEAKGYKEVKKDLIIKLPKYSLFELENGRKRMLASAGELQKGNELALPSKYVNFLYLASHYEKLKGSPEDNEQKQLFVEQHKHYLDEIIEQISEFSKRVILADANLDKVLSAYNKHRDKPIREQAENIIHLFTLTNLGAPAAFKYFDTTIDRKRYTSTKEVLDATLIHQSITGLYETRIDLSQLGGDGGEAAAKGGGPAPGGGLEHLPPPPEVSQFPLNPERLQALTDLVSRALEAKHIEPYQGPGNNPIFPVKKPNGKWRFIHDLRATNSVTRDLASPSPGPPDLTSLPQGLPHLRTIDLTDAFFQIPLPTIFQPYFAFTLPQPNNYGPGTRYSWRVLPQGFKNSPTLFEQQLSHILTPVRKTFPNSLIIQYMDDILLASPAPGELAALTDKVTNALTKEGLPLSPEKTQATPGPIHFLGQVISQDCITYETLPSINVKSTWSLAELQSMLGELQWVSKGTPVLRSSLHQLYLALRGHRDPRDTIKLTSIQVQALRTIQKALTLNCRSRLVNQLPILALIMLRPTGTTAVLFQTKQKWPLVWLHTPHPATSLRPWGQLLANAVIILDKYSLQHYGQVCKSFHHNISNQALTYYLHTSDQSSVAILLQHSHRFHNLGAQPSGPWRSLLQMPQIFQNIDVLRPPFTISPVVINHAPCLFSDGSASKAAFIIWDRQVIHQQVLSLPSTCSAQAGELFGLLAGLQKSQPWVALNIFLDSKFLIGHLRRMALGAFPGPSTQCELHTQLLPLLQGKTVYVHHVRSHTLLQDPISRLNEATDALMLAPLLPLAGKRTADGSEFEKRTADGSEFESPKKKAKVE

SEQ ID NO: 1511 - protein, 2001 aa, synthetic construct
MPAAKRVKLDGGDKKYSIGLDIGTNSVGWAVITDEYKVPSKKFKVLGNTDRHSIKKNLIGALLFDSGETAEATRLKRTARRRYTRRKNRICYLQEIFSNEMAKVDDSFFHRLEESFLVEEDKKHERHPIFGNIVDEVAYHEKYPTIYHLRKKLVDSTDKADLRLIYLALAHMIKFRGHFLIEGDLNPDNSDVDKLFIQLVQTYNQLFEENPINASGVDAKAILSARLSKSRRLENLIAQLPGEKKNGLFGNLIALSLGLTPNFKSNFDLAEDAKLQLSKDTYDDDLDNLLAQIGDQYADLFLAAKNLSDAILLSDILRVNTEITKAPLSASMIKRYDEHHQDLTLLKALVRQQLPEKYKEIFFDQSKNGYAGYIDGGASQEEFYKFIKPILEKMDGTEELLVKLNREDLLRKQRTFDNGSIPHQIHLGELHAILRRQEDFYPFLKDNREKIEKILTFRIPYYVGPLARGNSRFAWMTRKSEETITPWNFEEVVDKGASAQSFIERMTNFDKNLPNEKVLPKHSLLYEYFTVYNELTKVKYVTEGMRKPAFLSGEQKKAIVDLLFKTNRKVTVKQLKEDYFKKIECFDSVEISGVEDRFNASLGTYHDLLKIIKDKDFLDNEENEDILEDIVLTLTLFEDREMIEERLKTYAHLFDDKVMKQLKRRRYTGWGRLSRKLINGIRDKQSGKTILDFLKSDGFANRNFMQLIHDDSLTFKEDIQKAQVSGQGDSLHEHIANLAGSPAIKKGILQTVKVVDELVKVMGRHKPENIVIEMARENQTTQKGQKNSRERMKRIEEGIKELGSQILKEHPVENTQLQNEKLYLYYLQNGRDMYVDQELDINRLSDYDVDHIVPQSFLKDDSIDNKVLTRSDKARGKSDNVPSEEVVKKMKNYWRQLLNAKLITQRKFDNLTKAERGGLSELDKAGFIKRQLVETRQITKHVAQILDSRMNTKYDENDKLIREVKVITLKSKLVSDFRKDFQFYKVREINNYHHAHDAYLNAVVGTALIKKYPKLESEFVYGDYKVYDVRKMIAKSEQEIGKATAKYFFYSNIMNFFKTEITLANGEIRKRPLIETNGETGEIVWDKGRDFATVRKVLSMPQVNIVKKTEVQTGGFSKESILPKRNSDKLIARKKDWDPKKYGGFDSPTVAYSVLVVAKVEKGKSKKLKSVKELLGITIMERSSFEKNPIDFLEAKGYKEVKKDLIIKLPKYSLFELENGRKRMLASAGELQKGNELALPSKYVNFLYLASHYEKLKGSPEDNEQKQLFVEQHKHYLDEIIEQISEFSKRVILADANLDKVLSAYNKHRDKPIREQAENIIHLFTLTNLGAPAAFKYFDTTIDRKRYTSTKEVLDATLIHQSITGLYETRIDLSQLGGDGGGGSGGGLEHLPPPPEVSQFPLNPERLQALTDLVSRALEAKHIEPYQGPGNNPIFPVKKPNGKWRFIHDLRATNSVTRDLASPSPGPPDLTSLPQGLPHLRTIDLTDAFFQIPLPTIFQPYFAFTLPQPNNYGPGTRYSWRVLPQGFKNSPTLFQQQLSHILTPVRKTFPNSLIIQYMDDILLASPAPGELAALTDKVTNALTKEGLPLSPEKTQATPGPIHFLGQVISQDCITYETLPSINVKSTWSLAELQSMLGELQWVSKGTPVLRSSLHQLYLALRGHRDPRDTIKLTSIQVQALRTIQKALTLNCRSRLVNQLPILALIMLRPTGTTAVLFQTKQKWPLVWLHTPHPATSLRPWGQLLANAVIILDKYSLQHYGQVCKSFHHNISNQALTYYLHTSDQSSVAILLQHSHRFHNLGAQPSGPWRSLLQMPQIFQNIDVLRPPFTISPVVINHAPCLFSDGSASKAAFIIWDRQVIHQQVLSLPSTCSAQAGELFGLLAGLQKSQPWVALNIFLDSKFLIGHLRRMAWGAFPGPSTQCELHTQLLPLLQGKTVYVHHVRSHTLLQDPISRLNEATDALMLAPLLPLAGKRTADGSEFEKRTADGSEFESPKKKAKVE

SEQ ID NO: 1512 - protein, 2004 aa, synthetic construct
MPAAKRVKLDGGDKKYSIGLDIGTNSVGWAVITDEYKVPSKKFKVLGNTDRHSIKKNLIGALLFDSGETAEATRLKRTARRRYTRRKNRICYLQEIFSNEMAKVDDSFFHRLEESFLVEEDKKHERHPIFGNIVDEVAYHEKYPTIYHLRKKLVDSTDKADLRLIYLALAHMIKFRGHFLIEGDLNPDNSDVDKLFIQLVQTYNQLFEENPINASGVDAKAILSARLSKSRRLENLIAQLPGEKKNGLFGNLIALSLGLTPNFKSNFDLAEDAKLQLSKDTYDDDLDNLLAQIGDQYADLFLAAKNLSDAILLSDILRVNTEITKAPLSASMIKRYDEHHQDLTLLKALVRQQLPEKYKEIFFDQSKNGYAGYIDGGASQEEFYKFIKPILEKMDGTEELLVKLNREDLLRKQRTFDNGSIPHQIHLGELHAILRRQEDFYPFLKDNREKIEKILTFRIPYYVGPLARGNSRFAWMTRKSEETITPWNFEEVVDKGASAQSFIERMTNFDKNLPNEKVLPKHSLLYEYFTVYNELTKVKYVTEGMRKPAFLSGEQKKAIVDLLFKTNRKVTVKQLKEDYFKKIECFDSVEISGVEDRFNASLGTYHDLLKIIKDKDFLDNEENEDILEDIVLTLTLFEDREMIEERLKTYAHLFDDKVMKQLKRRRYTGWGRLSRKLINGIRDKQSGKTILDFLKSDGFANRNFMQLIHDDSLTFKEDIQKAQVSGQGDSLHEHIANLAGSPAIKKGILQTVKVVDELVKVMGRHKPENIVIEMARENQTTQKGQKNSRERMKRIEEGIKELGSQILKEHPVENTQLQNEKLYLYYLQNGRDMYVDQELDINRLSDYDVDHIVPQSFLKDDSIDNKVLTRSDKARGKSDNVPSEEVVKKMKNYWRQLLNAKLITQRKFDNLTKAERGGLSELDKAGFIKRQLVETRQITKHVAQILDSRMNTKYDENDKLIREVKVITLKSKLVSDFRKDFQFYKVREINNYHHAHDAYLNAVVGTALIKKYPKLESEFVYGDYKVYDVRKMIAKSEQEIGKATAKYFFYSNIMNFFKTEITLANGEIRKRPLIETNGETGEIVWDKGRDFATVRKVLSMPQVNIVKKTEVQTGGFSKESILPKRNSDKLIARKKDWDPKKYGGFDSPTVAYSVLVVAKVEKGKSKKLKSVKELLGITIMERSSFEKNPIDFLEAKGYKEVKKDLIIKLPKYSLFELENGRKRMLASAGELQKGNELALPSKYVNFLYLASHYEKLKGSPEDNEQKQLFVEQHKHYLDEIIEQISEFSKRVILADANLDKVLSAYNKHRDKPIREQAENIIHLFTLTNLGAPAAFKYFDTTIDRKRYTSTKEVLDATLIHQSITGLYETRIDLSQLGGDGGGGSGGGGGGLEHLPPPPEVSQFPLNPERLQALTDLVSRALEAKHIEPYQGPGNNPIFPVKKPNGKWRFIHDLRATNSVTRDLASPSPGPPDLTSLPQGLPHLRTIDLTDAFFQIPLPTIFQPYFAFTLPQPNNYGPGTRYSWRVLPQGFKNSPTLFQQQLSHILTPVRKTFPNSLIIQYMDDILLASPAPGELAALTDKVTNALTKEGLPLSPEKTQATPGPIHFLGQVISQDCITYETLPSINVKSTWSLAELQSMLGELQWVSKGTPVLRSSLHQLYLALRGHRDPRDTIKLTSIQVQALRTIQKALTLNCRSRLVNQLPILALIMLRPTGTTAVLFQTKQKWPLVWLHTPHPATSLRPWGQLLANAVIILDKYSLQHYGQVCKSFHHNISNQALTYYLHTSDQSSVAILLQHSHRFHNLGAQPSGPWRSLLQMPQIFQNIDVLRPPFTISPVVINHAPCLFSDGSASKAAFIIWDRQVIHQQVLSLPSTCSAQAGELFGLLAGLQKSQPWVALNIFLDSKFLIGHLRRMAWGAFPGPSTQCELHTQLLPLLQGKTVYVHHVRSHTLLQDPISRLNEATDALMLAPLLPLAGKRTADGSEFEKRTADGSEFESPKKKAKVE

SEQ ID NO: 1513 - protein, 2007 aa, synthetic construct
MPAAKRVKLDGGDKKYSIGLDIGTNSVGWAVITDEYKVPSKKFKVLGNTDRHSIKKNLIGALLFDSGETAEATRLKRTARRRYTRRKNRICYLQEIFSNEMAKVDDSFFHRLEESFLVEEDKKHERHPIFGNIVDEVAYHEKYPTIYHLRKKLVDSTDKADLRLIYLALAHMIKFRGHFLIEGDLNPDNSDVDKLFIQLVQTYNQLFEENPINASGVDAKAILSARLSKSRRLENLIAQLPGEKKNGLFGNLIALSLGLTPNFKSNFDLAEDAKLQLSKDTYDDDLDNLLAQIGDQYADLFLAAKNLSDAILLSDILRVNTEITKAPLSASMIKRYDEHHQDLTLLKALVRQQLPEKYKEIFFDQSKNGYAGYIDGGASQEEFYKFIKPILEKMDGTEELLVKLNREDLLRKQRTFDNGSIPHQIHLGELHAILRRQEDFYPFLKDNREKIEKILTFRIPYYVGPLARGNSRFAWMTRKSEETITPWNFEEVVDKGASAQSFIERMTNFDKNLPNEKVLPKHSLLYEYFTVYNELTKVKYVTEGMRKPAFLSGEQKKAIVDLLFKTNRKVTVKQLKEDYFKKIECFDSVEISGVEDRFNASLGTYHDLLKIIKDKDFLDNEENEDILEDIVLTLTLFEDREMIEERLKTYAHLFDDKVMKQLKRRRYTGWGRLSRKLINGIRDKQSGKTILDFLKSDGFANRNFMQLIHDDSLTFKEDIQKAQVSGQGDSLHEHIANLAGSPAIKKGILQTVKVVDELVKVMGRHKPENIVIEMARENQTTQKGQKNSRERMKRIEEGIKELGSQILKEHPVENTQLQNEKLYLYYLQNGRDMYVDQELDINRLSDYDVDHIVPQSFLKDDSIDNKVLTRSDKARGKSDNVPSEEVVKKMKNYWRQLLNAKLITQRKFDNLTKAERGGLSELDKAGFIKRQLVETRQITKHVAQILDSRMNTKYDENDKLIREVKVITLKSKLVSDFRKDFQFYKVREINNYHHAHDAYLNAVVGTALIKKYPKLESEFVYGDYKVYDVRKMIAKSEQEIGKATAKYFFYSNIMNFFKTEITLANGEIRKRPLIETNGETGEIVWDKGRDFATVRKVLSMPQVNIVKKTEVQTGGFSKESILPKRNSDKLIARKKDWDPKKYGGFDSPTVAYSVLVVAKVEKGKSKKLKSVKELLGITIMERSSFEKNPIDFLEAKGYKEVKKDLIIKLPKYSLFELENGRKRMLASAGELQKGNELALPSKYVNFLYLASHYEKLKGSPEDNEQKQLFVEQHKHYLDEIIEQISEFSKRVILADANLDKVLSAYNKHRDKPIREQAENIIHLFTLTNLGAPAAFKYFDTTIDRKRYTSTKEVLDATLIHQSITGLYETRIDLSQLGGDGGPAPGGGGSSGGGLEHLPPPPEVSQFPLNPERLQALTDLVSRALEAKHIEPYQGPGNNPIFPVKKPNGKWRFIHDLRATNSVTRDLASPSPGPPDLTSLPQGLPHLRTIDLTDAFFQIPLPTIFQPYFAFTLPQPNNYGPGTRYSWRVLPQGFKNSPTLFQQQLSHILTPVRKTFPNSLIIQYMDDILLASPAPGELAALTDKVTNALTKEGLPLSPEKTQATPGPIHFLGQVISQDCITYETLPSINVKSTWSLAELQSMLGELQWVSKGTPVLRSSLHQLYLALRGHRDPRDTIKLTSIQVQALRTIQKALTLNCRSRLVNQLPILALIMLRPTGTTAVLFQTKQKWPLVWLHTPHPATSLRPWGQLLANAVIILDKYSLQHYGQVCKSFHHNISNQALTYYLHTSDQSSVAILLQHSHRFHNLGAQPSGPWRSLLQMPQIFQNIDVLRPPFTISPVVINHAPCLFSDGSASKAAFIIWDRQVIHQQVLSLPSTCSAQAGELFGLLAGLQKSQPWVALNIFLDSKFLIGHLRRMAWGAFPGPSTQCELHTQLLPLLQGKTVYVHHVRSHTLLQDPISRLNEATDALMLAPLLPLAGKRTADGSEFEKRTADGSEFESPKKKAKVE

SEQ ID NO: 1514 - protein, 2007 aa, synthetic construct
MPAAKRVKLDGGDKKYSIGLDIGTNSVGWAVITDEYKVPSKKFKVLGNTDRHSIKKNLIGALLFDSGETAEATRLKRTARRRYTRRKNRICYLQEIFSNEMAKVDDSFFHRLEESFLVEEDKKHERHPIFGNIVDEVAYHEKYPTIYHLRKKLVDSTDKADLRLIYLALAHMIKFRGHFLIEGDLNPDNSDVDKLFIQLVQTYNQLFEENPINASGVDAKAILSARLSKSRRLENLIAQLPGEKKNGLFGNLIALSLGLTPNFKSNFDLAEDAKLQLSKDTYDDDLDNLLAQIGDQYADLFLAAKNLSDAILLSDILRVNTEITKAPLSASMIKRYDEHHQDLTLLKALVRQQLPEKYKEIFFDQSKNGYAGYIDGGASQEEFYKFIKPILEKMDGTEELLVKLNREDLLRKQRTFDNGSIPHQIHLGELHAILRRQEDFYPFLKDNREKIEKILTFRIPYYVGPLARGNSRFAWMTRKSEETITPWNFEEVVDKGASAQSFIERMTNFDKNLPNEKVLPKHSLLYEYFTVYNELTKVKYVTEGMRKPAFLSGEQKKAIVDLLFKTNRKVTVKQLKEDYFKKIECFDSVEISGVEDRFNASLGTYHDLLKIIKDKDFLDNEENEDILEDIVLTLTLFEDREMIEERLKTYAHLFDDKVMKQLKRRRYTGWGRLSRKLINGIRDKQSGKTILDFLKSDGFANRNFMQLIHDDSLTFKEDIQKAQVSGQGDSLHEHIANLAGSPAIKKGILQTVKVVDELVKVMGRHKPENIVIEMARENQTTQKGQKNSRERMKRIEEGIKELGSQILKEHPVENTQLQNEKLYLYYLQNGRDMYVDQELDINRLSDYDVDHIVPQSFLKDDSIDNKVLTRSDKARGKSDNVPSEEVVKKMKNYWRQLLNAKLITQRKFDNLTKAERGGLSELDKAGFIKRQLVETRQITKHVAQILDSRMNTKYDENDKLIREVKVITLKSKLVSDFRKDFQFYKVREINNYHHAHDAYLNAVVGTALIKKYPKLESEFVYGDYKVYDVRKMIAKSEQEIGKATAKYFFYSNIMNFFKTEITLANGEIRKRPLIETNGETGEIVWDKGRDFATVRKVLSMPQVNIVKKTEVQTGGFSKESILPKRNSDKLIARKKDWDPKKYGGFDSPTVAYSVLVVAKVEKGKSKKLKSVKELLGITIMERSSFEKNPIDFLEAKGYKEVKKDLIIKLPKYSLFELENGRKRMLASAGELQKGNELALPSKYVNFLYLASHYEKLKGSPEDNEQKQLFVEQHKHYLDEIIEQISEFSKRVILADANLDKVLSAYNKHRDKPIREQAENIIHLFTLTNLGAPAAFKYFDTTIDRKRYTSTKEVLDATLIHQSITGLYETRIDLSQLGGDGGGGGPAPGSSGGGLEHLPPPPEVSQFPLNPERLQALTDLVSRALEAKHIEPYQGPGNNPIFPVKKPNGKWRFIHDLRATNSVTRDLASPSPGPPDLTSPPQGLPHLRTIDLTDAFFQIPLPTIFQPYFAFTLPQPNNYGPGTRYSWRVLPQGFKNSPTLFQQQLSHILTPVRKTFPNSLIIQYMDDILLASPAPGELAALTDKVTNALTKEGLPLSPEKTQATPGPIHFLGQVISQDCITYETLPSINVKSTWSLAELQSMLGELQWVSKGTPVLRSSLHQLYLALRGHRDPRDTIKLTSIQVQALRTIQKALTLNCRSRLVNQLPILALIMLRPTGTTAVLFQTKQKWPLVWLHTPHPATSLRPWGQLLANAVIILDKYSLQHYGQVCKSFHHNISNQALTYYLHTSDQSSVAILLQHSHRFHNLGAQPSGPWRSLLQMPQIFQNIDVLRPPFTISPVVINHAPCLFSDGSASKAAFIIWDRQVIHQQVLSLPSTCSAQAGELFGLLAGLQKSQPWVALNIFLDSKFLIGHLRRMAWGAFPGPSTQCELHTQLLPLLQGKTVYVHHVRSHTLLQDPISRLNEATDALMLAPLLPLAGKRTADGSEFEKRTADGSEFESPKKKAKVE

SEQ ID NO: 1515 - protein, 2007 aa, synthetic construct
MPAAKRVKLDGGDKKYSIGLDIGTNSVGWAVITDEYKVPSKKFKVLGNTDRHSIKKNLIGALLFDSGETAEATRLKRTARRRYTRRKNRICYLQEIFSNEMAKVDDSFFHRLEESFLVEEDKKHERHPIFGNIVDEVAYHEKYPTIYHLRKKLVDSTDKADLRLIYLALAHMIKFRGHFLIEGDLNPDNSDVDKLFIQLVQTYNQLFEENPINASGVDAKAILSARLSKSRRLENLIAQLPGEKKNGLFGNLIALSLGLTPNFKSNFDLAEDAKLQLSKDTYDDDLDNLLAQIGDQYADLFLAAKNLSDAILLSDILRVNTEITKAPLSASMIKRYDEHHQDLTLLKALVRQQLPEKYKEIFFDQSKNGYAGYIDGGASQEEFYKFIKPILEKMDGTEELLVKLNREDLLRKQRTFDNGSIPHQIHLGELHAILRRQEDFYPFLKDNREKIEKILTFRIPYYVGPLARGNSRFAWMTRKSEETITPWNFEEVVDKGASAQSFIERMTNFDKNLPNEKVLPKHSLLYEYFTVYNELTKVKYVTEGMRKPAFLSGEQKKAIVDLLFKTNRKVTVKQLKEDYFKKIECFDSVEISGVEDRFNASLGTYHDLLKIIKDKDFLDNEENEDILEDIVLTLTLFEDREMIEERLKTYAHLFDDKVMKQLKRRRYTGWGRLSRKLINGIRDKQSGKTILDFLKSDGFANRNFMQLIHDDSLTFKEDIQKAQVSGQGDSLHEHIANLAGSPAIKKGILQTVKVVDELVKVMGRHKPENIVIEMARENQTTQKGQKNSRERMKRIEEGIKELGSQILKEHPVENTQLQNEKLYLYYLQNGRDMYVDQELDINRLSDYDVDHIVPQSFLKDDSIDNKVLTRSDKARGKSDNVPSEEVVKKMKNYWRQLLNAKLITQRKFDNLTKAERGGLSELDKAGFIKRQLVETRQITKHVAQILDSRMNTKYDENDKLIREVKVITLKSKLVSDFRKDFQFYKVREINNYHHAHDAYLNAVVGTALIKKYPKLESEFVYGDYKVYDVRKMIAKSEQEIGKATAKYFFYSNIMNFFKTEITLANGEIRKRPLIETNGETGEIVWDKGRDFATVRKVLSMPQVNIVKKTEVQTGGFSKESILPKRNSDKLIARKKDWDPKKYGGFDSPTVAYSVLVVAKVEKGKSKKLKSVKELLGITIMERSSFEKNPIDFLEAKGYKEVKKDLIIKLPKYSLFELENGRKRMLASAGELQKGNELALPSKYVNFLYLASHYEKLKGSPEDNEQKQLFVEQHKHYLDEIIEQISEFSKRVILADANLDKVLSAYNKHRDKPIREQAENIIHLFTLTNLGAPAAFKYFDTTIDRKRYTSTKEVLDATLIHQSITGLYETRIDLSQLGGDGGGSSGGGPAPGGGLEHLPPPPEVSQFPLNPERLQALTDLVSRALEAKHIEPYQGPGNNPIFPVKKPNGKWRFIHDLRATNSVTRDLASPSPGPPDLTSPPQGLPHLRTIDLTDAFFQIPLPTIFQPYFAFTLPQPNNYGPGTRYSWRVLPQGFKNSPTLFQQQLSHILTPVRKTFPNSLIIQYMDDILLASPAPGELAALTDKVTNALTKEGLPLSPEKTQATPGPIHFLGQVISQDCITYETLPSINVKSTWSLAELQSMLGELQWVSKGTPVLRSSLHQLYLALRGHRDPRDTIKLTSIQVQALRTIQKALTLNCRSRLVNQLPILALIMLRPTGTTAVLFQTKQKWPLVWLHTPHPATSLRPWGQLLANAVIILDKYSLQHYGQVCKSFHHNISNQALTYYLHTSDQSSVAILLQHSHRFHNLGAQPSGPWRSLLQMPQIFQNIDVLRPPFTISPVVINHAPCLFSDGSASKAAFIIWDRQVIHQQVLSLPSTCSAQAGELFGLLAGLQKSQPWVALNIFLDSKFLIGHLRRMAWGAFPGPSTQCELHTQLLPLLQGKTVYVHHVRSHTLLQDPISRLNEATDALMLAPLLPLAGKRTADGSEFEKRTADGSEFESPKKKAKVE

SEQ ID NO: 1516 - protein, 2006 aa, synthetic construct
MPAAKRVKLDGGDKKYSIGLDIGTNSVGWAVITDEYKVPSKKFKVLGNTDRHSIKKNLIGALLFDSGETAEATRLKRTARRRYTRRKNRICYLQEIFSNEMAKVDDSFFHRLEESFLVEEDKKHERHPIFGNIVDEVAYHEKYPTIYHLRKKLVDSTDKADLRLIYLALAHMIKFRGHFLIEGDLNPDNSDVDKLFIQLVQTYNQLFEENPINASGVDAKAILSARLSKSRRLENLIAQLPGEKKNGLFGNLIALSLGLTPNFKSNFDLAEDAKLQLSKDTYDDDLDNLLAQIGDQYADLFLAAKNLSDAILLSDILRVNTEITKAPLSASMIKRYDEHHQDLTLLKALVRQQLPEKYKEIFFDQSKNGYAGYIDGGASQEEFYKFIKPILEKMDGTEELLVKLNREDLLRKQRTFDNGSIPHQIHLGELHAILRRQEDFYPFLKDNREKIEKILTFRIPYYVGPLARGNSRFAWMTRKSEETITPWNFEEVVDKGASAQSFIERMTNFDKNLPNEKVLPKHSLLYEYFTVYNELTKVKYVTEGMRKPAFLSGEQKKAIVDLLFKTNRKVTVKQLKEDYFKKIECFDSVEISGVEDRFNASLGTYHDLLKIIKDKDFLDNEENEDILEDIVLTLTLFEDREMIEERLKTYAHLFDDKVMKQLKRRRYTGWGRLSRKLINGIRDKQSGKTILDFLKSDGFANRNFMQLIHDDSLTFKEDIQKAQVSGQGDSLHEHIANLAGSPAIKKGILQTVKVVDELVKVMGRHKPENIVIEMARENQTTQKGQKNSRERMKRIEEGIKELGSQILKEHPVENTQLQNEKLYLYYLQNGRDMYVDQELDINRLSDYDVDHIVPQSFLKDDSIDNKVLTRSDKARGKSDNVPSEEVVKKMKNYWRQLLNAKLITQRKFDNLTKAERGGLSELDKAGFIKRQLVETRQITKHVAQILDSRMNTKYDENDKLIREVKVITLKSKLVSDFRKDFQFYKVREINNYHHAHDAYLNAVVGTALIKKYPKLESEFVYGDYKVYDVRKMIAKSEQEIGKATAKYFFYSNIMNFFKTEITLANGEIRKRPLIETNGETGEIVWDKGRDFATVRKVLSMPQVNIVKKTEVQTGGFSKESILPKRNSDKLIARKKDWDPKKYGGFDSPTVAYSVLVVAKVEKGKSKKLKSVKELLGITIMERSSFEKNPIDFLEAKGYKEVKKDLIIKLPKYSLFELENGRKRMLASAGELQKGNELALPSKYVNFLYLASHYEKLKGSPEDNEQKQLFVEQHKHYLDEIIEQISEFSKRVILADANLDKVLSAYNKHRDKPIREQAENIIHLFTLTNLGAPAAFKYFDTTIDRKRYTSTKEVLDATLIHQSITGLYETRIDLSQLGGDGGGGSEAAAKGGGLEHLPPPPEVSQFPLNPERLQALTDLVSRALEAKHIEPYQGPGNNPIFPVKKPNGKWRFIHDLRATNSVTRDLASPSPGPPDLTSPPQGLPHLRTIDLTDAFFQIPLPTIFQPYFAFTLPQPNNYGPGTRYSWRVLPQGFKNSPTLFQQQLSHILTPVRKTFPNSLIIQYMDDILLASPAPGELAALTDKVTNALTKEGLPLSPEKTQATPGPIHFLGQVISQDCITYETLPSINVKSTWSLAELQSMLGELQWVSKGTPVLRSSLHQLYLALRGHRDPRDTIKLTSIQVQALRTIQKALTLNCRSRLVNQLPILALIMLRPTGTTAVLFQTKQKWPLVWLHTPHPATSLRPWGQLLANAVIILDKYSLQHYGQVCKSFHHNISNQALTYYLHTSDQSSVAILLQHSHRFHNLGAQPSGPWRSLLQMPQIFQNIDVLRPPFTISPVVINHAPCLFSDGSASKAAFIIWDRQVIHQQVLSLPSTCSAQAGELFGLLAGLQKSQPWVALNIFLDSKFLIGHLRRMAWGAFPGPSTQCELHTQLLPLLQGKTVYVHHVRSHTLLQDPISRLNEATDALMLAPLLPLAGKRTADGSEFEKRTADGSEFESPKKKAKVE

SEQ ID NO: 1517 - protein, 2009 aa, synthetic construct
MPAAKRVKLDGGDKKYSIGLDIGTNSVGWAVITDEYKVPSKKFKVLGNTDRHSIKKNLIGALLFDSGETAEATRLKRTARRRYTRRKNRICYLQEIFSNEMAKVDDSFFHRLEESFLVEEDKKHERHPIFGNIVDEVAYHEKYPTIYHLRKKLVDSTDKADLRLIYLALAHMIKFRGHFLIEGDLNPDNSDVDKLFIQLVQTYNQLFEENPINASGVDAKAILSARLSKSRRLENLIAQLPGEKKNGLFGNLIALSLGLTPNFKSNFDLAEDAKLQLSKDTYDDDLDNLLAQIGDQYADLFLAAKNLSDAILLSDILRVNTEITKAPLSASMIKRYDEHHQDLTLLKALVRQQLPEKYKEIFFDQSKNGYAGYIDGGASQEEFYKFIKPILEKMDGTEELLVKLNREDLLRKQRTFDNGSIPHQIHLGELHAILRRQEDFYPFLKDNREKIEKILTFRIPYYVGPLARGNSRFAWMTRKSEETITPWNFEEVVDKGASAQSFIERMTNFDKNLPNEKVLPKHSLLYEYFTVYNELTKVKYVTEGMRKPAFLSGEQKKAIVDLLFKTNRKVTVKQLKEDYFKKIECFDSVEISGVEDRFNASLGTYHDLLKIIKDKDFLDNEENEDILEDIVLTLTLFEDREMIEERLKTYAHLFDDKVMKQLKRRRYTGWGRLSRKLINGIRDKQSGKTILDFLKSDGFANRNFMQLIHDDSLTFKEDIQKAQVSGQGDSLHEHIANLAGSPAIKKGILQTVKVVDELVKVMGRHKPENIVIEMARENQTTQKGQKNSRERMKRIEEGIKELGSQILKEHPVENTQLQNEKLYLYYLQNGRDMYVDQELDINRLSDYDVDHIVPQSFLKDDSIDNKVLTRSDKARGKSDNVPSEEVVKKMKNYWRQLLNAKLITQRKFDNLTKAERGGLSELDKAGFIKRQLVETRQITKHVAQILDSRMNTKYDENDKLIREVKVITLKSKLVSDFRKDFQFYKVREINNYHHAHDAYLNAVVGTALIKKYPKLESEFVYGDYKVYDVRKMIAKSEQEIGKATAKYFFYSNIMNFFKTEITLANGEIRKRPLIETNGETGEIVWDKGRDFATVRKVLSMPQVNIVKKTEVQTGGFSKESILPKRNSDKLIARKKDWDPKKYGGFDSPTVAYSVLVVAKVEKGKSKKLKSVKELLGITIMERSSFEKNPIDFLEAKGYKEVKKDLIIKLPKYSLFELENGRKRMLASAGELQKGNELALPSKYVNFLYLASHYEKLKGSPEDNEQKQLFVEQHKHYLDEIIEQISEFSKRVILADANLDKVLSAYNKHRDKPIREQAENIIHLFTLTNLGAPAAFKYFDTTIDRKRYTSTKEVLDATLIHQSITGLYETRIDLSQLGGDGGPAPEAAAKGSSGGGLEHLPPPPEVSQFPLNPERLQALTDLVSRALEAKHIEPYQGPGNNPIFPVKKPNGKWRFIHDLRATNSVTRDLASPSPGPPDLTSPPQGLPHLRTIDLTDAFFQIPLPTIFQPYFAFTLPQPNNYGPGTRYSWRVLPQGFKNSPTLFQQQLSHILTPVRKTFPNSLIIQYMDDILLASPAPGELAALTDKVTNALTKEGLPLSPEKTQATPGPIHFLGQVISQDCITYETLPSINVKSTWSLAELQSMLGELQWVSKGTPVLRSSLHQLYLALRGHRDPRDTIKLTSIQVQALRTIQKALTLNCRSRLVNQLPILALIMLRPTGTTAVLFQTKQKWPLVWLHTPHPATSLRPWGQLLANAVIILDKYSLQHYGQVCKSFHHNISNQALTYYLHTSDQSSVAILLQHSHRFHNLGAQPSGPWRSLLQMPQIFQNIDVLRPPFTISPVVINHAPCLFSDGSASKAAFIIWDRQVIHQQVLSLPSTCSAQAGELFGLLAGLQKSQPWVALNIFLDSKFLIGHLRRMAWGAFPGPSTQCELHTQLLPLLQGKTVYVHHVRSHTLLQDPISRLNEATDALMLAPLLPLAGKRTADGSEFEKRTADGSEFESPKKKAKVE

SEQ ID NO: 1518 - protein, 2007 aa, synthetic construct
MPAAKRVKLDGGDKKYSIGLDIGTNSVGWAVITDEYKVPSKKFKVLGNTDRHSIKKNLIGALLFDSGETAEATRLKRTARRRYTRRKNRICYLQEIFSNEMAKVDDSFFHRLEESFLVEEDKKHERHPIFGNIVDEVAYHEKYPTIYHLRKKLVDSTDKADLRLIYLALAHMIKFRGHFLIEGDLNPDNSDVDKLFIQLVQTYNQLFEENPINASGVDAKAILSARLSKSRRLENLIAQLPGEKKNGLFGNLIALSLGLTPNFKSNFDLAEDAKLQLSKDTYDDDLDNLLAQIGDQYADLFLAAKNLSDAILLSDILRVNTEITKAPLSASMIKRYDEHHQDLTLLKALVRQQLPEKYKEIFFDQSKNGYAGYIDGGASQEEFYKFIKPILEKMDGTEELLVKLNREDLLRKQRTFDNGSIPHQIHLGELHAILRRQEDFYPFLKDNREKIEKILTFRIPYYVGPLARGNSRFAWMTRKSEETITPWNFEEVVDKGASAQSFIERMTNFDKNLPNEKVLPKHSLLYEYFTVYNELTKVKYVTEGMRKPAFLSGEQKKAIVDLLFKTNRKVTVKQLKEDYFKKIECFDSVEISGVEDRFNASLGTYHDLLKIIKDKDFLDNEENEDILEDIVLTLTLFEDREMIEERLKTYAHLFDDKVMKQLKRRRYTGWGRLSRKLINGIRDKQSGKTILDFLKSDGFANRNFMQLIHDDSLTFKEDIQKAQVSGQGDSLHEHIANLAGSPAIKKGILQTVKVVDELVKVMGRHKPENIVIEMARENQTTQKGQKNSRERMKRIEEGIKELGSQILKEHPVENTQLQNEKLYLYYLQNGRDMYVDQELDINRLSDYDVDHIVPQSFLKDDSIDNKVLTRSDKARGKSDNVPSEEVVKKMKNYWRQLLNAKLITQRKFDNLTKAERGGLSELDKAGFIKRQLVETRQITKHVAQILDSRMNTKYDENDKLIREVKVITLKSKLVSDFRKDFQFYKVREINNYHHAHDAYLNAVVGTALIKKYPKLESEFVYGDYKVYDVRKMIAKSEQEIGKATAKYFFYSNIMNFFKTEITLANGEIRKRPLIETNGETGEIVWDKGRDFATVRKVLSMPQVNIVKKTEVQTGGFSKESILPKRNSDKLIARKKDWDPKKYGGFDSPTVAYSVLVVAKVEKGKSKKLKSVKELLGITIMERSSFEKNPIDFLEAKGYKEVKKDLIIKLPKYSLFELENGRKRMLASAGELQKGNELALPSKYVNFLYLASHYEKLKGSPEDNEQKQLFVEQHKHYLDEIIEQISEFSKRVILADANLDKVLSAYNKHRDKPIREQAENIIHLFTLTNLGAPAAFKYFDTTIDRKRYTSTKEVLDATLIHQSITGLYETRIDLSQLGGDGGGGGGSSGGSGGGLEHLPPPPEVSQFPLNPERLQALTDLVSRALEAKHIEPYQGPGNNPIFPVKKPNGKWRFIHDLRATNSLTRDLASPSPGPPDLTSLPQDLPHLRTIDLTDAFFQIPLPAVFQPYFAFTLPQPNNHGPGTRYSWRVLPQGFKNSPTLFEQQLSHILAPVRKAFPNSLIIQYMDDILLASPALRELTALTDKVTNALTKEGLPMSLEKTQATPGSIHFLGQVISPDCITYETLPSIHVKSIWSLAELQSMLGELQWVSKGTPVLRSSLHQLYLALRGHRDPRDTIELTSTQVQALKTIQKALALNCRSRLVSQLPILALIILRPTGTTAVLFQTKQKWPLVWLHTPHPATSLRPWGQLLANAIITLDKYSLQHYGQICKSFHHNISNQALTYYLHTSDQSSVAILLQHSHRFHNLGAQPSGPWRSLLQVPQIFQNIDVLRPPFIISPVVIDHAPCLFSDGATSKAAFILWDKQVIHQQVLPLPSTCSAQAGELFGLLAGLQKSKPWPALNIFLDSKFLIGHLRRMALGAFLGPSTQCDLHARLFPLLQGKTVYVHHVRSHTLLQDPISRLNEATDALMLAPLLPLAGKRTADGSEFEKRTADGSEFESPKKKAKVE

SEQ ID NO: 1519 - protein, 2007 aa, synthetic construct
MPAAKRVKLDGGDKKYSIGLDIGTNSVGWAVITDEYKVPSKKFKVLGNTDRHSIKKNLIGALLFDSGETAEATRLKRTARRRYTRRKNRICYLQEIFSNEMAKVDDSFFHRLEESFLVEEDKKHERHPIFGNIVDEVAYHEKYPTIYHLRKKLVDSTDKADLRLIYLALAHMIKFRGHFLIEGDLNPDNSDVDKLFIQLVQTYNQLFEENPINASGVDAKAILSARLSKSRRLENLIAQLPGEKKNGLFGNLIALSLGLTPNFKSNFDLAEDAKLQLSKDTYDDDLDNLLAQIGDQYADLFLAAKNLSDAILLSDILRVNTEITKAPLSASMIKRYDEHHQDLTLLKALVRQQLPEKYKEIFFDQSKNGYAGYIDGGASQEEFYKFIKPILEKMDGTEELLVKLNREDLLRKQRTFDNGSIPHQIHLGELHAILRRQEDFYPFLKDNREKIEKILTFRIPYYVGPLARGNSRFAWMTRKSEETITPWNFEEVVDKGASAQSFIERMTNFDKNLPNEKVLPKHSLLYEYFTVYNELTKVKYVTEGMRKPAFLSGEQKKAIVDLLFKTNRKVTVKQLKEDYFKKIECFDSVEISGVEDRFNASLGTYHDLLKIIKDKDFLDNEENEDILEDIVLTLTLFEDREMIEERLKTYAHLFDDKVMKQLKRRRYTGWGRLSRKLINGIRDKQSGKTILDFLKSDGFANRNFMQLIHDDSLTFKEDIQKAQVSGQGDSLHEHIANLAGSPAIKKGILQTVKVVDELVKVMGRHKPENIVIEMARENQTTQKGQKNSRERMKRIEEGIKELGSQILKEHPVENTQLQNEKLYLYYLQNGRDMYVDQELDINRLSDYDVDHIVPQSFLKDDSIDNKVLTRSDKARGKSDNVPSEEVVKKMKNYWRQLLNAKLITQRKFDNLTKAERGGLSELDKAGFIKRQLVETRQITKHVAQILDSRMNTKYDENDKLIREVKVITLKSKLVSDFRKDFQFYKVREINNYHHAHDAYLNAVVGTALIKKYPKLESEFVYGDYKVYDVRKMIAKSEQEIGKATAKYFFYSNIMNFFKTEITLANGEIRKRPLIETNGETGEIVWDKGRDFATVRKVLSMPQVNIVKKTEVQTGGFSKESILPKRNSDKLIARKKDWDPKKYGGFDSPTVAYSVLVVAKVEKGKSKKLKSVKELLGITIMERSSFEKNPIDFLEAKGYKEVKKDLIIKLPKYSLFELENGRKRMLASAGELQKGNELALPSKYVNFLYLASHYEKLKGSPEDNEQKQLFVEQHKHYLDEIIEQISEFSKRVILADANLDKVLSAYNKHRDKPIREQAENIIHLFTLTNLGAPAAFKYFDTTIDRKRYTSTKEVLDATLIHQSITGLYETRIDLSQLGGDGGGGGGSSPAPGGGLEHLPPPPEVSQFPLNPERLQALTDLVSRALEAKHIEPYQGPGNNPIFPVKKPNGKWRFIHDLRATNSLTRDLASPSPGPPDLTSLPQDLPHLRTIDLTDAFFQIPLPAVFQPYFAFTLPQPNNHGPGTRYSWRVLPQGFKNSPTLFQQQLSHILAPVRKAFPNSLIIQYMDDILLASPALRELTALTDKVTNALTKEGLPMSLEKTQATPGSIHFLGQVISPDCITYETLPSIHVKSIWSLAELQSMLGELQWVSKGTPVLRSSLHQLYLALRGHRDPRDTIELTSTQVQALKTIQKALALNCRSRLVSQLPILALIILRPTGTTAVLFQTKQKWPLVWLHTPHPATSLRPWGQLLANAIITLDKYSLQHYGQICKSFHHNISNQALTYYLHTSDQSSVAILLQHSHRFHNLGAQPSGPWRSLLQVPQIFQNIDVLRPPFIISPVVIDHAPCLFSDGATSKAAFILWDKQVIHQQVLPLPSTCSAQAGELFGLLAGLQKSKPWPALNIFLDSKFLIGHLRRMAWGAFLGPSTQCDLHARLFPLLQGKTVYVHHVRSHTLLQDPISRLNEATDALMLAPLLPLAGKRTADGSEFEKRTADGSEFESPKKKAKVE

SEQ ID NO: 1520 - protein, 2009 aa, synthetic construct
MPAAKRVKLDGGDKKYSIGLDIGTNSVGWAVITDEYKVPSKKFKVLGNTDRHSIKKNLIGALLFDSGETAEATRLKRTARRRYTRRKNRICYLQEIFSNEMAKVDDSFFHRLEESFLVEEDKKHERHPIFGNIVDEVAYHEKYPTIYHLRKKLVDSTDKADLRLIYLALAHMIKFRGHFLIEGDLNPDNSDVDKLFIQLVQTYNQLFEENPINASGVDAKAILSARLSKSRRLENLIAQLPGEKKNGLFGNLIALSLGLTPNFKSNFDLAEDAKLQLSKDTYDDDLDNLLAQIGDQYADLFLAAKNLSDAILLSDILRVNTEITKAPLSASMIKRYDEHHQDLTLLKALVRQQLPEKYKEIFFDQSKNGYAGYIDGGASQEEFYKFIKPILEKMDGTEELLVKLNREDLLRKQRTFDNGSIPHQIHLGELHAILRRQEDFYPFLKDNREKIEKILTFRIPYYVGPLARGNSRFAWMTRKSEETITPWNFEEVVDKGASAQSFIERMTNFDKNLPNEKVLPKHSLLYEYFTVYNELTKVKYVTEGMRKPAFLSGEQKKAIVDLLFKTNRKVTVKQLKEDYFKKIECFDSVEISGVEDRFNASLGTYHDLLKIIKDKDFLDNEENEDILEDIVLTLTLFEDREMIEERLKTYAHLFDDKVMKQLKRRRYTGWGRLSRKLINGIRDKQSGKTILDFLKSDGFANRNFMQLIHDDSLTFKEDIQKAQVSGQGDSLHEHIANLAGSPAIKKGILQTVKVVDELVKVMGRHKPENIVIEMARENQTTQKGQKNSRERMKRIEEGIKELGSQILKEHPVENTQLQNEKLYLYYLQNGRDMYVDQELDINRLSDYDVDHIVPQSFLKDDSIDNKVLTRSDKARGKSDNVPSEEVVKKMKNYWRQLLNAKLITQRKFDNLTKAERGGLSELDKAGFIKRQLVETRQITKHVAQILDSRMNTKYDENDKLIREVKVITLKSKLVSDFRKDFQFYKVREINNYHHAHDAYLNAVVGTALIKKYPKLESEFVYGDYKVYDVRKMIAKSEQEIGKATAKYFFYSNIMNFFKTEITLANGEIRKRPLIETNGETGEIVWDKGRDFATVRKVLSMPQVNIVKKTEVQTGGFSKESILPKRNSDKLIARKKDWDPKKYGGFDSPTVAYSVLVVAKVEKGKSKKLKSVKELLGITIMERSSFEKNPIDFLEAKGYKEVKKDLIIKLPKYSLFELENGRKRMLASAGELQKGNELALPSKYVNFLYLASHYEKLKGSPEDNEQKQLFVEQHKHYLDEIIEQISEFSKRVILADANLDKVLSAYNKHRDKPIREQAENIIHLFTLTNLGAPAAFKYFDTTIDRKRYTSTKEVLDATLIHQSITGLYETRIDLSQLGGDGGPAPEAAAKGGGGGGLEHLPPPPEVSQFPLNPERLQALTDLVSRALEAKHIEPYQGPGNNPIFPVKKPNGKWRFIHDLRATNSLTRDLASPSPGPPDLTSLPQDLPHLRTIDLTDAFFQIPLPAVFQPYFAFTLPQPNNHGPGTRYSWRVLPQGFKNSPTLFQQQLSHILAPVRKAFPNSLIIQYMDDILLASPALRELTALTDKVTNALTKEGLPMSLEKTQATPGSIHFLGQVISPDCITYETLPSIHVKSIWSLAELQSMLGELQWVSKGTPVLRSSLHQLYLALRGHRDPRDTIELTSTQVQALKTIQKALALNCRSRLVSQLPILALIILRPTGTTAVLFQTKQKWPLVWLHTPHPATSLRPWGQLLANAIITLDKYSLQHYGQICKSFHHNISNQALTYYLHTSDQSSVAILLQHSHRFHNLGAQPSGPWRSLLQVPQIFQNIDVLRPPFIISPVVIDHAPCLFSDGATSKAAFILWDKQVIHQQVLPLPSTCSAQAGELFGLLAGLQKSKPWPALNIFLDSKFLIGHLRRMAWGAFLGPSTQCDLHARLFPLLQGKTVYVHHVRSHTLLQDPISRLNEATDALMLAPLLPLAGKRTADGSEFEKRTADGSEFESPKKKAKVE

SEQ ID NO: 1521 - protein, 2023 aa, synthetic construct
MPAAKRVKLDGGDKKYSIGLDIGTNSVGWAVITDEYKVPSKKFKVLGNTDRHSIKKNLIGALLFDSGETAEATRLKRTARRRYTRRKNRICYLQEIFSNEMAKVDDSFFHRLEESFLVEEDKKHERHPIFGNIVDEVAYHEKYPTIYHLRKKLVDSTDKADLRLIYLALAHMIKFRGHFLIEGDLNPDNSDVDKLFIQLVQTYNQLFEENPINASGVDAKAILSARLSKSRRLENLIAQLPGEKKNGLFGNLIALSLGLTPNFKSNFDLAEDAKLQLSKDTYDDDLDNLLAQIGDQYADLFLAAKNLSDAILLSDILRVNTEITKAPLSASMIKRYDEHHQDLTLLKALVRQQLPEKYKEIFFDQSKNGYAGYIDGGASQEEFYKFIKPILEKMDGTEELLVKLNREDLLRKQRTFDNGSIPHQIHLGELHAILRRQEDFYPFLKDNREKIEKILTFRIPYYVGPLARGNSRFAWMTRKSEETITPWNFEEVVDKGASAQSFIERMTNFDKNLPNEKVLPKHSLLYEYFTVYNELTKVKYVTEGMRKPAFLSGEQKKAIVDLLFKTNRKVTVKQLKEDYFKKIECFDSVEISGVEDRFNASLGTYHDLLKIIKDKDFLDNEENEDILEDIVLTLTLFEDREMIEERLKTYAHLFDDKVMKQLKRRRYTGWGRLSRKLINGIRDKQSGKTILDFLKSDGFANRNFMQLIHDDSLTFKEDIQKAQVSGQGDSLHEHIANLAGSPAIKKGILQTVKVVDELVKVMGRHKPENIVIEMARENQTTQKGQKNSRERMKRIEEGIKELGSQILKEHPVENTQLQNEKLYLYYLQNGRDMYVDQELDINRLSDYDVDHIVPQSFLKDDSIDNKVLTRSDKARGKSDNVPSEEVVKKMKNYWRQLLNAKLITQRKFDNLTKAERGGLSELDKAGFIKRQLVETRQITKHVAQILDSRMNTKYDENDKLIREVKVITLKSKLVSDFRKDFQFYKVREINNYHHAHDAYLNAVVGTALIKKYPKLESEFVYGDYKVYDVRKMIAKSEQEIGKATAKYFFYSNIMNFFKTEITLANGEIRKRPLIETNGETGEIVWDKGRDFATVRKVLSMPQVNIVKKTEVQTGGFSKESILPKRNSDKLIARKKDWDPKKYGGFDSPTVAYSVLVVAKVEKGKSKKLKSVKELLGITIMERSSFEKNPIDFLEAKGYKEVKKDLIIKLPKYSLFELENGRKRMLASAGELQKGNELALPSKYVNFLYLASHYEKLKGSPEDNEQKQLFVEQHKHYLDEIIEQISEFSKRVILADANLDKVLSAYNKHRDKPIREQAENIIHLFTLTNLGAPAAFKYFDTTIDRKRYTSTKEVLDATLIHQSITGLYETRIDLSQLGGDGGGGGGSGGGGSGGGGSGGGGSGGGGSGGGLEHLPPPPEVSQFPLNPERLQALTDLVSRALEAKHIEPYQGPGNNPIFPVKKPNGKWRFIHDLRATNSLTRDLASPSPGPPDLTSLPQDLPHLRTIDLTDAFFQIPLPAVFQPYFAFTLPQPNNHGPGTRYSWRVLPQGFKNSPTLFQQQLSHILAPVRKAFPNSLIIQYMDDILLASPALRELTALTDKVTNALTKEGLPMSLEKTQATPGSIHFLGQVISPDCITYETLPSIHVKSIWSLAELQSMLGELQWVSKGTPVLRSSLHQLYLALRGHRDPRDTIELTSTQVQALKTIQKALALNCRSRLVSQLPILALIILRPTGTTAVLFQTKQKWPLVWLHTPHPATSLRPWGQLLANAIITLDKYSLQHYGQICKSFHHNISNQALTYYLHTSDQSSVAILLQHSHRFHNLGAQPSGPWRSLLQVPQIFQNIDVLRPPFIISPVVIDHAPCLFSDGATSKAAFILWDKQVIHQQVLPLPSTCSAQAGELFGLLAGLQKSKPWPALNIFLDSKFLIGHLRRMAWGAFLGPSTQCDLHARLFPLLQGKTVYVHHVRSHTLLQDPISRLNEATDALMLAPLLPLAGKRTADGSEFEKRTADGSEFESPKKKAKVE

SEQ ID NO: 1522 - protein, 2006 aa, synthetic construct
MPAAKRVKLDGGDKKYSIGLDIGTNSVGWAVITDEYKVPSKKFKVLGNTDRHSIKKNLIGALLFDSGETAEATRLKRTARRRYTRRKNRICYLQEIFSNEMAKVDDSFFHRLEESFLVEEDKKHERHPIFGNIVDEVAYHEKYPTIYHLRKKLVDSTDKADLRLIYLALAHMIKFRGHFLIEGDLNPDNSDVDKLFIQLVQTYNQLFEENPINASGVDAKAILSARLSKSRRLENLIAQLPGEKKNGLFGNLIALSLGLTPNFKSNFDLAEDAKLQLSKDTYDDDLDNLLAQIGDQYADLFLAAKNLSDAILLSDILRVNTEITKAPLSASMIKRYDEHHQDLTLLKALVRQQLPEKYKEIFFDQSKNGYAGYIDGGASQEEFYKFIKPILEKMDGTEELLVKLNREDLLRKQRTFDNGSIPHQIHLGELHAILRRQEDFYPFLKDNREKIEKILTFRIPYYVGPLARGNSRFAWMTRKSEETITPWNFEEVVDKGASAQSFIERMTNFDKNLPNEKVLPKHSLLYEYFTVYNELTKVKYVTEGMRKPAFLSGEQKKAIVDLLFKTNRKVTVKQLKEDYFKKIECFDSVEISGVEDRFNASLGTYHDLLKIIKDKDFLDNEENEDILEDIVLTLTLFEDREMIEERLKTYAHLFDDKVMKQLKRRRYTGWGRLSRKLINGIRDKQSGKTILDFLKSDGFANRNFMQLIHDDSLTFKEDIQKAQVSGQGDSLHEHIANLAGSPAIKKGILQTVKVVDELVKVMGRHKPENIVIEMARENQTTQKGQKNSRERMKRIEEGIKELGSQILKEHPVENTQLQNEKLYLYYLQNGRDMYVDQELDINRLSDYDVDHIVPQSFLKDDSIDNKVLTRSDKARGKSDNVPSEEVVKKMKNYWRQLLNAKLITQRKFDNLTKAERGGLSELDKAGFIKRQLVETRQITKHVAQILDSRMNTKYDENDKLIREVKVITLKSKLVSDFRKDFQFYKVREINNYHHAHDAYLNAVVGTALIKKYPKLESEFVYGDYKVYDVRKMIAKSEQEIGKATAKYFFYSNIMNFFKTEITLANGEIRKRPLIETNGETGEIVWDKGRDFATVRKVLSMPQVNIVKKTEVQTGGFSKESILPKRNSDKLIARKKDWDPKKYGGFDSPTVAYSVLVVAKVEKGKSKKLKSVKELLGITIMERSSFEKNPIDFLEAKGYKEVKKDLIIKLPKYSLFELENGRKRMLASAGELQKGNELALPSKYVNFLYLASHYEKLKGSPEDNEQKQLFVEQHKHYLDEIIEQISEFSKRVILADANLDKVLSAYNKHRDKPIREQAENIIHLFTLTNLGAPAAFKYFDTTIDRKRYTSTKEVLDATLIHQSITGLYETRIDLSQLGGDGGEAAAKGGSGGGLEHLPPPPEVSQFPLNPERLQALTDLVSRALEAKHIEPYQGPGNNPIFPVKKPNGKWRFIHDLRATNSLTRDLASPSPGPPDLTSLPQDLPHLRTIDLTDAFFQIPLPAVFQPYFAFTLPQPNNHGPGTRYSWRVLPQGFKNSPTLFQQQLSHILAPVRKAFPNSLIIQYMDDILLASPALRELTALTDKVTNALTKEGLPMSLEKTQATPGSIHFLGQVISPDCITYETLPSIHVKSIWSLAELQSMLGELQWVSKGTPVLRSSLHQLYLALRGHRDPRDTIELTSTQVQALKTIQKALALNCRSRLVSQLPILALIILRPTGTTAVLFQTKQKWPLVWLHTPHPATSLRPWGQLLANAIITLDKYSLQHYGQICKSFHHNISNQALTYYLHTSDQSSVAILLQHSHRFHNLGAQPSGPWRSLLQVPQIFQNIDVLRPPFIISPVVIDHAPCLFSDGATSKAAFILWDKQVIHQQVLPLPSTCSAQAGELFGLLAGLQKSKPWPALNIFLDSKFLIGHLRRMAWGAFLGPSTQCDLHARLFPLLQGKTVYVHHVRSHTLLQDPISRLNEATDALMLAPLLPLAGKRTADGSEFEKRTADGSEFESPKKKAKVE

SEQ ID NO: 1523 - protein, 2007 aa, synthetic construct
MPAAKRVKLDGGDKKYSIGLDIGTNSVGWAVITDEYKVPSKKFKVLGNTDRHSIKKNLIGALLFDSGETAEATRLKRTARRRYTRRKNRICYLQEIFSNEMAKVDDSFFHRLEESFLVEEDKKHERHPIFGNIVDEVAYHEKYPTIYHLRKKLVDSTDKADLRLIYLALAHMIKFRGHFLIEGDLNPDNSDVDKLFIQLVQTYNQLFEENPINASGVDAKAILSARLSKSRRLENLIAQLPGEKKNGLFGNLIALSLGLTPNFKSNFDLAEDAKLQLSKDTYDDDLDNLLAQIGDQYADLFLAAKNLSDAILLSDILRVNTEITKAPLSASMIKRYDEHHQDLTLLKALVRQQLPEKYKEIFFDQSKNGYAGYIDGGASQEEFYKFIKPILEKMDGTEELLVKLNREDLLRKQRTFDNGSIPHQIHLGELHAILRRQEDFYPFLKDNREKIEKILTFRIPYYVGPLARGNSRFAWMTRKSEETITPWNFEEVVDKGASAQSFIERMTNFDKNLPNEKVLPKHSLLYEYFTVYNELTKVKYVTEGMRKPAFLSGEQKKAIVDLLFKTNRKVTVKQLKEDYFKKIECFDSVEISGVEDRFNASLGTYHDLLKIIKDKDFLDNEENEDILEDIVLTLTLFEDREMIEERLKTYAHLFDDKVMKQLKRRRYTGWGRLSRKLINGIRDKQSGKTILDFLKSDGFANRNFMQLIHDDSLTFKEDIQKAQVSGQGDSLHEHIANLAGSPAIKKGILQTVKVVDELVKVMGRHKPENIVIEMARENQTTQKGQKNSRERMKRIEEGIKELGSQILKEHPVENTQLQNEKLYLYYLQNGRDMYVDQELDINRLSDYDVDHIVPQSFLKDDSIDNKVLTRSDKARGKSDNVPSEEVVKKMKNYWRQLLNAKLITQRKFDNLTKAERGGLSELDKAGFIKRQLVETRQITKHVAQILDSRMNTKYDENDKLIREVKVITLKSKLVSDFRKDFQFYKVREINNYHHAHDAYLNAVVGTALIKKYPKLESEFVYGDYKVYDVRKMIAKSEQEIGKATAKYFFYSNIMNFFKTEITLANGEIRKRPLIETNGETGEIVWDKGRDFATVRKVLSMPQVNIVKKTEVQTGGFSKESILPKRNSDKLIARKKDWDPKKYGGFDSPTVAYSVLVVAKVEKGKSKKLKSVKELLGITIMERSSFEKNPIDFLEAKGYKEVKKDLIIKLPKYSLFELENGRKRMLASAGELQKGNELALPSKYVNFLYLASHYEKLKGSPEDNEQKQLFVEQHKHYLDEIIEQISEFSKRVILADANLDKVLSAYNKHRDKPIREQAENIIHLFTLTNLGAPAAFKYFDTTIDRKRYTSTKEVLDATLIHQSITGLYETRIDLSQLGGDGGGGGGSSGGSGGGLEHLPPPPEVSQFPLNPERLQALTDLVSRALEAKHIEPYQGPGNNPIFPVKKPNGKWRFIHDLRATNSLTRDLASPSPGPPDLTSLPQDLPHLRTIDLTDAFFQIPLPAVFQPYFAFTLPQPNNHGPGTRYSWRVLPQGFKNSPTLFQQQLSHILAPVRKAFPNSLIIQYMDDILLASPALRELTALTDKVTNALTKEGLPMSLEKTQATPGSIHFLGQVISPDCITYETLPSIHVKSIWSLAELQSMLGELQWVSKGTPVLRSSLHQLYLALRGHRDPRDTIELTSTQVQALKTIQKALALNCRSRLVSQLPILALIILRPTGTTAVLFQTKQKWPLVWLHTPHPATSLRPWGQLLANAIITLDKYSLQHYGQICKSFHHNISNQALTYYLHTSDQSSVAILLQHSHRFHNLGAQPSGPWRSLLQVPQIFQNIDVLRPPFIISPVVIDHAPCLFSDGATSKAAFILWDKQVIHQQVLPLPSTCSAQAGELFGLLAGLQKSKPWPALNIFLDSKFLIGHLRRMAWGAFLGPSTQCDLHARLFPLLQGKTVYVHHVRSHTLLQDPISRLNEATDALMLAPLLPLAGKRTADGSEFEKRTADGSEFESPKKKAKVE

SEQ ID NO: 1524 - protein, 2009 aa, synthetic construct
MPAAKRVKLDGGDKKYSIGLDIGTNSVGWAVITDEYKVPSKKFKVLGNTDRHSIKKNLIGALLFDSGETAEATRLKRTARRRYTRRKNRICYLQEIFSNEMAKVDDSFFHRLEESFLVEEDKKHERHPIFGNIVDEVAYHEKYPTIYHLRKKLVDSTDKADLRLIYLALAHMIKFRGHFLIEGDLNPDNSDVDKLFIQLVQTYNQLFEENPINASGVDAKAILSARLSKSRRLENLIAQLPGEKKNGLFGNLIALSLGLTPNFKSNFDLAEDAKLQLSKDTYDDDLDNLLAQIGDQYADLFLAAKNLSDAILLSDILRVNTEITKAPLSASMIKRYDEHHQDLTLLKALVRQQLPEKYKEIFFDQSKNGYAGYIDGGASQEEFYKFIKPILEKMDGTEELLVKLNREDLLRKQRTFDNGSIPHQIHLGELHAILRRQEDFYPFLKDNREKIEKILTFRIPYYVGPLARGNSRFAWMTRKSEETITPWNFEEVVDKGASAQSFIERMTNFDKNLPNEKVLPKHSLLYEYFTVYNELTKVKYVTEGMRKPAFLSGEQKKAIVDLLFKTNRKVTVKQLKEDYFKKIECFDSVEISGVEDRFNASLGTYHDLLKIIKDKDFLDNEENEDILEDIVLTLTLFEDREMIEERLKTYAHLFDDKVMKQLKRRRYTGWGRLSRKLINGIRDKQSGKTILDFLKSDGFANRNFMQLIHDDSLTFKEDIQKAQVSGQGDSLHEHIANLAGSPAIKKGILQTVKVVDELVKVMGRHKPENIVIEMARENQTTQKGQKNSRERMKRIEEGIKELGSQILKEHPVENTQLQNEKLYLYYLQNGRDMYVDQELDINRLSDYDVDHIVPQSFLKDDSIDNKVLTRSDKARGKSDNVPSEEVVKKMKNYWRQLLNAKLITQRKFDNLTKAERGGLSELDKAGFIKRQLVETRQITKHVAQILDSRMNTKYDENDKLIREVKVITLKSKLVSDFRKDFQFYKVREINNYHHAHDAYLNAVVGTALIKKYPKLESEFVYGDYKVYDVRKMIAKSEQEIGKATAKYFFYSNIMNFFKTEITLANGEIRKRPLIETNGETGEIVWDKGRDFATVRKVLSMPQVNIVKKTEVQTGGFSKESILPKRNSDKLIARKKDWDPKKYGGFDSPTVAYSVLVVAKVEKGKSKKLKSVKELLGITIMERSSFEKNPIDFLEAKGYKEVKKDLIIKLPKYSLFELENGRKRMLASAGELQKGNELALPSKYVNFLYLASHYEKLKGSPEDNEQKQLFVEQHKHYLDEIIEQISEFSKRVILADANLDKVLSAYNKHRDKPIREQAENIIHLFTLTNLGAPAAFKYFDTTIDRKRYTSTKEVLDATLIHQSITGLYETRIDLSQLGGDGGEAAAKGGSGGGGGGLEHLPPPPEVSQFPLNPERLQALTDLVSRALEAKHIEPYQGPGNNPIFPVKKPNGKWRFIHDLRATNSLTRDLASPSPGPPDLTSLPQDLPHLRTIDLTDAFFQIPLPAVFQPYFAFTLPQPNNHGPGTRYSWRVLPQGFKNSPTLFQQQLSHILAPVRKAFPNSLIIQYMDDILLASPALRELTALTDKVTNALTKEGLPMSLEKTQATPGSIHFLGQVISPDCITYETLPSIHVKSIWSLAELQSMLGELQWVSKGTPVLRSSLHQLYLALRGHRDPRDTIELTSTQVQALKTIQKALALNCRSRLVSQLPILALIILRPTGTTAVLFQTKQKWPLVWLHTPHPATSLRPWGQLLANAIITLDKYSLQHYGQICKSFHHNISNQALTYYLHTSDQSSVAILLQHSHRFHNLGAQPSGPWRSLLQVPQIFQNIDVLRPPFIISPVVIDHAPCLFSDGATSKAAFILWDKQVIHQQVLPLPSTCSAQAGELFGLLAGLQKSKPWPALNIFLDSKFLIGHLRRMAWGAFLGPSTQCDLHARLFPLLQGKTVYVHHVRSHTLLQDPISRLNEATDALMLAPLLPLAGKRTADGSEFEKRTADGSEFESPKKKAKVE

SEQ ID NO: 1525 - protein, 2007 aa, synthetic construct
MPAAKRVKLDGGDKKYSIGLDIGTNSVGWAVITDEYKVPSKKFKVLGNTDRHSIKKNLIGALLFDSGETAEATRLKRTARRRYTRRKNRICYLQEIFSNEMAKVDDSFFHRLEESFLVEEDKKHERHPIFGNIVDEVAYHEKYPTIYHLRKKLVDSTDKADLRLIYLALAHMIKFRGHFLIEGDLNPDNSDVDKLFIQLVQTYNQLFEENPINASGVDAKAILSARLSKSRRLENLIAQLPGEKKNGLFGNLIALSLGLTPNFKSNFDLAEDAKLQLSKDTYDDDLDNLLAQIGDQYADLFLAAKNLSDAILLSDILRVNTEITKAPLSASMIKRYDEHHQDLTLLKALVRQQLPEKYKEIFFDQSKNGYAGYIDGGASQEEFYKFIKPILEKMDGTEELLVKLNREDLLRKQRTFDNGSIPHQIHLGELHAILRRQEDFYPFLKDNREKIEKILTFRIPYYVGPLARGNSRFAWMTRKSEETITPWNFEEVVDKGASAQSFIERMTNFDKNLPNEKVLPKHSLLYEYFTVYNELTKVKYVTEGMRKPAFLSGEQKKAIVDLLFKTNRKVTVKQLKEDYFKKIECFDSVEISGVEDRFNASLGTYHDLLKIIKDKDFLDNEENEDILEDIVLTLTLFEDREMIEERLKTYAHLFDDKVMKQLKRRRYTGWGRLSRKLINGIRDKQSGKTILDFLKSDGFANRNFMQLIHDDSLTFKEDIQKAQVSGQGDSLHEHIANLAGSPAIKKGILQTVKVVDELVKVMGRHKPENIVIEMARENQTTQKGQKNSRERMKRIEEGIKELGSQILKEHPVENTQLQNEKLYLYYLQNGRDMYVDQELDINRLSDYDVDHIVPQSFLKDDSIDNKVLTRSDKARGKSDNVPSEEVVKKMKNYWRQLLNAKLITQRKFDNLTKAERGGLSELDKAGFIKRQLVETRQITKHVAQILDSRMNTKYDENDKLIREVKVITLKSKLVSDFRKDFQFYKVREINNYHHAHDAYLNAVVGTALIKKYPKLESEFVYGDYKVYDVRKMIAKSEQEIGKATAKYFFYSNIMNFFKTEITLANGEIRKRPLIETNGETGEIVWDKGRDFATVRKVLSMPQVNIVKKTEVQTGGFSKESILPKRNSDKLIARKKDWDPKKYGGFDSPTVAYSVLVVAKVEKGKSKKLKSVKELLGITIMERSSFEKNPIDFLEAKGYKEVKKDLIIKLPKYSLFELENGRKRMLASAGELQKGNELALPSKYVNFLYLASHYEKLKGSPEDNEQKQLFVEQHKHYLDEIIEQISEFSKRVILADANLDKVLSAYNKHRDKPIREQAENIIHLFTLTNLGAPAAFKYFDTTIDRKRYTSTKEVLDATLIHQSITGLYETRIDLSQLGGDGGGSSPAPGGGGGGLEHLPPPPEVSQFPLNPERLQALTDLVSRALEAKHIEPYQGPGNNPIFPVKKPNGKWRFIHDLRATNSLTRDLASPSPGPPDLTSLPQDLPHLRTIDLTDAFFQIPLPAVFQPYFAFTLPQPNNHGPGTRYSWRVLPQGFKNSPTLFQQQLSHILAPVRKAFPNSLIIQYMDDILLASPALRELTALTDKVTNALTKEGLPMSLEKTQATPGSIHFLGQVISPDCITYETLPSIHVKSIWSLAELQSMLGELQWVSKGTPVLRSSLHQLYLALRGHRDPRDTIELTSTQVQALKTIQKALALNCRSRLVSQLPILALIILRPTGTTAVLFQTKQKWPLVWLHTPHPATSLRPWGQLLANAIITLDKYSLQHYGQICKSFHHNISNQALTYYLHTSDQSSVAILLQHSHRFHNLGAQPSGPWRSLLQVPQIFQNIDVLRPPFIISPVVIDHAPCLFSDGATSKAAFILWDKQVIHQQVLPLPSTCSAQAGELFGLLAGLQKSKPWPALNIFLDSKFLIGHLRRMAWGAFLGPSTQCDLHARLFPLLQGKTVYVHHVRSHTLLQDPISRLNEATDALMLAPLLPLAGKRTADGSEFEKRTADGSEFESPKKKAKVE

SEQ ID NO: 1526 - protein, 2009 aa, synthetic construct
MPAAKRVKLDGGDKKYSIGLDIGTNSVGWAVITDEYKVPSKKFKVLGNTDRHSIKKNLIGALLFDSGETAEATRLKRTARRRYTRRKNRICYLQEIFSNEMAKVDDSFFHRLEESFLVEEDKKHERHPIFGNIVDEVAYHEKYPTIYHLRKKLVDSTDKADLRLIYLALAHMIKFRGHFLIEGDLNPDNSDVDKLFIQLVQTYNQLFEENPINASGVDAKAILSARLSKSRRLENLIAQLPGEKKNGLFGNLIALSLGLTPNFKSNFDLAEDAKLQLSKDTYDDDLDNLLAQIGDQYADLFLAAKNLSDAILLSDILRVNTEITKAPLSASMIKRYDEHHQDLTLLKALVRQQLPEKYKEIFFDQSKNGYAGYIDGGASQEEFYKFIKPILEKMDGTEELLVKLNREDLLRKQRTFDNGSIPHQIHLGELHAILRRQEDFYPFLKDNREKIEKILTFRIPYYVGPLARGNSRFAWMTRKSEETITPWNFEEVVDKGASAQSFIERMTNFDKNLPNEKVLPKHSLLYEYFTVYNELTKVKYVTEGMRKPAFLSGEQKKAIVDLLFKTNRKVTVKQLKEDYFKKIECFDSVEISGVEDRFNASLGTYHDLLKIIKDKDFLDNEENEDILEDIVLTLTLFEDREMIEERLKTYAHLFDDKVMKQLKRRRYTGWGRLSRKLINGIRDKQSGKTILDFLKSDGFANRNFMQLIHDDSLTFKEDIQKAQVSGQGDSLHEHIANLAGSPAIKKGILQTVKVVDELVKVMGRHKPENIVIEMARENQTTQKGQKNSRERMKRIEEGIKELGSQILKEHPVENTQLQNEKLYLYYLQNGRDMYVDQELDINRLSDYDVDHIVPQSFLKDDSIDNKVLTRSDKARGKSDNVPSEEVVKKMKNYWRQLLNAKLITQRKFDNLTKAERGGLSELDKAGFIKRQLVETRQITKHVAQILDSRMNTKYDENDKLIREVKVITLKSKLVSDFRKDFQFYKVREINNYHHAHDAYLNAVVGTALIKKYPKLESEFVYGDYKVYDVRKMIAKSEQEIGKATAKYFFYSNIMNFFKTEITLANGEIRKRPLIETNGETGEIVWDKGRDFATVRKVLSMPQVNIVKKTEVQTGGFSKESILPKRNSDKLIARKKDWDPKKYGGFDSPTVAYSVLVVAKVEKGKSKKLKSVKELLGITIMERSSFEKNPIDFLEAKGYKEVKKDLIIKLPKYSLFELENGRKRMLASAGELQKGNELALPSKYVNFLYLASHYEKLKGSPEDNEQKQLFVEQHKHYLDEIIEQISEFSKRVILADANLDKVLSAYNKHRDKPIREQAENIIHLFTLTNLGAPAAFKYFDTTIDRKRYTSTKEVLDATLIHQSITGLYETRIDLSQLGGDGGEAAAKGGGGSSGGGLEHLPPPPEVSQFPLNPERLQALTDLVSRALEAKHIEPYQGPGNNPIFPVKKPNGKWRFIHDLRATNSLTRDLASPSPGPPDLTSLPQDLPHLRTIDLTDAFFQIPLPAVFQPYFAFTLPQPNNHGPGTRYSWRVLPQGFKNSPTLFQQQLSHILAPVRKAFPNSLIIQYMDDILLASPALRELTALTDKVTNALTKEGLPMSLEKTQATPGSIHFLGQVISPDCITYETLPSIHVKSIWSLAELQSMLGELQWVSKGTPVLRSSLHQLYLALRGHRDPRDTIELTSTQVQALKTIQKALALNCRSRLVSQLPILALIILRPTGTTAVLFQTKQKWPLVWLHTPHPATSLRPWGQLLANAIITLDKYSLQHYGQICKSFHHNISNQALTYYLHTSDQSSVAILLQHSHRFHNLGAQPSGPWRSLLQVPQIFQNIDVLRPPFIISPVVIDHAPCLFSDGATSKAAFILWDKQVIHQQVLPLPSTCSAQAGELFGLLAGLQKSKPWPALNIFLDSKFLIGHLRRMAWGAFLGPSTQCDLHARLFPLLQGKTVYVHHVRSHTLLQDPISRLNEATDALMLAPLLPLAGKRTADGSEFEKRTADGSEFESPKKKAKVE

SEQ ID NO: 1527 - protein, 2007 aa, synthetic construct
MPAAKRVKLDGGDKKYSIGLDIGTNSVGWAVITDEYKVPSKKFKVLGNTDRHSIKKNLIGALLFDSGETAEATRLKRTARRRYTRRKNRICYLQEIFSNEMAKVDDSFFHRLEESFLVEEDKKHERHPIFGNIVDEVAYHEKYPTIYHLRKKLVDSTDKADLRLIYLALAHMIKFRGHFLIEGDLNPDNSDVDKLFIQLVQTYNQLFEENPINASGVDAKAILSARLSKSRRLENLIAQLPGEKKNGLFGNLIALSLGLTPNFKSNFDLAEDAKLQLSKDTYDDDLDNLLAQIGDQYADLFLAAKNLSDAILLSDILRVNTEITKAPLSASMIKRYDEHHQDLTLLKALVRQQLPEKYKEIFFDQSKNGYAGYIDGGASQEEFYKFIKPILEKMDGTEELLVKLNREDLLRKQRTFDNGSIPHQIHLGELHAILRRQEDFYPFLKDNREKIEKILTFRIPYYVGPLARGNSRFAWMTRKSEETITPWNFEEVVDKGASAQSFIERMTNFDKNLPNEKVLPKHSLLYEYFTVYNELTKVKYVTEGMRKPAFLSGEQKKAIVDLLFKTNRKVTVKQLKEDYFKKIECFDSVEISGVEDRFNASLGTYHDLLKIIKDKDFLDNEENEDILEDIVLTLTLFEDREMIEERLKTYAHLFDDKVMKQLKRRRYTGWGRLSRKLINGIRDKQSGKTILDFLKSDGFANRNFMQLIHDDSLTFKEDIQKAQVSGQGDSLHEHIANLAGSPAIKKGILQTVKVVDELVKVMGRHKPENIVIEMARENQTTQKGQKNSRERMKRIEEGIKELGSQILKEHPVENTQLQNEKLYLYYLQNGRDMYVDQELDINRLSDYDVDHIVPQSFLKDDSIDNKVLTRSDKARGKSDNVPSEEVVKKMKNYWRQLLNAKLITQRKFDNLTKAERGGLSELDKAGFIKRQLVETRQITKHVAQILDSRMNTKYDENDKLIREVKVITLKSKLVSDFRKDFQFYKVREINNYHHAHDAYLNAVVGTALIKKYPKLESEFVYGDYKVYDVRKMIAKSEQEIGKATAKYFFYSNIMNFFKTEITLANGEIRKRPLIETNGETGEIVWDKGRDFATVRKVLSMPQVNIVKKTEVQTGGFSKESILPKRNSDKLIARKKDWDPKKYGGFDSPTVAYSVLVVAKVEKGKSKKLKSVKELLGITIMERSSFEKNPIDFLEAKGYKEVKKDLIIKLPKYSLFELENGRKRMLASAGELQKGNELALPSKYVNFLYLASHYEKLKGSPEDNEQKQLFVEQHKHYLDEIIEQISEFSKRVILADANLDKVLSAYNKHRDKPIREQAENIIHLFTLTNLGAPAAFKYFDTTIDRKRYTSTKEVLDATLIHQSITGLYETRIDLSQLGGDGGPAPGGGGSSGGGLEHLPPPPEVSQFPLNPERLQALTDLVSRALEAKHIEPYQGPGNNPIFPVKKPNGKWRFIHDLRATNSLTRDLASPSPGPPDLTSPPQDLPHLRTIDLTDAFFQIPLPAVFQPYFAFTLPQPNNHGPGTRYSWRVLPQGFKNSPTLFQQQLSHILAPVRKAFPNSLIIQYMDDILLASPALRELTALTDKVTNALTKEGLPMSLEKTQATPGSIHFLGQVISPDCITYETLPSIHVKSIWSLAELQSMLGELQWVSKGTPVLRSSLHQLYLALRGHRDPRDTIELTSTQVQALKTIQKALALNCRSRLVSQLPILALIILRPTGTTAVLFQTKQKWPLVWLHTPHPATSLRPWGQLLANAIITLDKYSLQHYGQICKSFHHNISNQALTYYLHTSDQSSVAILLQHSHRFHNLGAQPSGPWRSLLQVPQIFQNIDVLRPPFIISPVVIDHAPCLFSDGATSKAAFILWDKQVIHQQVLPLPSTCSAQAGELFGLLAGLQKSKPWPALNIFLDSKFLIGHLRRMAWGAFLGPSTQCDLHARLFPLLQGKTVYVHHVRSHTLLQDPISRLNEATDALMLAPLLPLAGKRTADGSEFEKRTADGSEFESPKKKAKVE

SEQ ID NO: 1528 - protein, 2028 aa, synthetic construct
MPAAKRVKLDGGDKKYSIGLDIGTNSVGWAVITDEYKVPSKKFKVLGNTDRHSIKKNLIGALLFDSGETAEATRLKRTARRRYTRRKNRICYLQEIFSNEMAKVDDSFFHRLEESFLVEEDKKHERHPIFGNIVDEVAYHEKYPTIYHLRKKLVDSTDKADLRLIYLALAHMIKFRGHFLIEGDLNPDNSDVDKLFIQLVQTYNQLFEENPINASGVDAKAILSARLSKSRRLENLIAQLPGEKKNGLFGNLIALSLGLTPNFKSNFDLAEDAKLQLSKDTYDDDLDNLLAQIGDQYADLFLAAKNLSDAILLSDILRVNTEITKAPLSASMIKRYDEHHQDLTLLKALVRQQLPEKYKEIFFDQSKNGYAGYIDGGASQEEFYKFIKPILEKMDGTEELLVKLNREDLLRKQRTFDNGSIPHQIHLGELHAILRRQEDFYPFLKDNREKIEKILTFRIPYYVGPLARGNSRFAWMTRKSEETITPWNFEEVVDKGASAQSFIERMTNFDKNLPNEKVLPKHSLLYEYFTVYNELTKVKYVTEGMRKPAFLSGEQKKAIVDLLFKTNRKVTVKQLKEDYFKKIECFDSVEISGVEDRFNASLGTYHDLLKIIKDKDFLDNEENEDILEDIVLTLTLFEDREMIEERLKTYAHLFDDKVMKQLKRRRYTGWGRLSRKLINGIRDKQSGKTILDFLKSDGFANRNFMQLIHDDSLTFKEDIQKAQVSGQGDSLHEHIANLAGSPAIKKGILQTVKVVDELVKVMGRHKPENIVIEMARENQTTQKGQKNSRERMKRIEEGIKELGSQILKEHPVENTQLQNEKLYLYYLQNGRDMYVDQELDINRLSDYDVDHIVPQSFLKDDSIDNKVLTRSDKARGKSDNVPSEEVVKKMKNYWRQLLNAKLITQRKFDNLTKAERGGLSELDKAGFIKRQLVETRQITKHVAQILDSRMNTKYDENDKLIREVKVITLKSKLVSDFRKDFQFYKVREINNYHHAHDAYLNAVVGTALIKKYPKLESEFVYGDYKVYDVRKMIAKSEQEIGKATAKYFFYSNIMNFFKTEITLANGEIRKRPLIETNGETGEIVWDKGRDFATVRKVLSMPQVNIVKKTEVQTGGFSKESILPKRNSDKLIARKKDWDPKKYGGFDSPTVAYSVLVVAKVEKGKSKKLKSVKELLGITIMERSSFEKNPIDFLEAKGYKEVKKDLIIKLPKYSLFELENGRKRMLASAGELQKGNELALPSKYVNFLYLASHYEKLKGSPEDNEQKQLFVEQHKHYLDEIIEQISEFSKRVILADANLDKVLSAYNKHRDKPIREQAENIIHLFTLTNLGAPAAFKYFDTTIDRKRYTSTKEVLDATLIHQSITGLYETRIDLSQLGGDGGGGGGSGGGGSGGGGSGGGGSGGGGSGGGGSGGGLEHLPPPPEVSQFPLNPERLQALTDLVSRALEAKHIEPYQGPGNNPIFPVKKPNGKWRFIHDLRATNSLTRDLASPSPGPPDLTSPPQDLPHLRTIDLTDAFFQIPLPAVFQPYFAFTLPQPNNHGPGTRYSWRVLPQGFKNSPTLFQQQLSHILAPVRKAFPNSLIIQYMDDILLASPALRELTALTDKVTNALTKEGLPMSLEKTQATPGSIHFLGQVISPDCITYETLPSIHVKSIWSLAELQSMLGELQWVSKGTPVLRSSLHQLYLALRGHRDPRDTIELTSTQVQALKTIQKALALNCRSRLVSQLPILALIILRPTGTTAVLFQTKQKWPLVWLHTPHPATSLRPWGQLLANAIITLDKYSLQHYGQICKSFHHNISNQALTYYLHTSDQSSVAILLQHSHRFHNLGAQPSGPWRSLLQVPQIFQNIDVLRPPFIISPVVIDHAPCLFSDGATSKAAFILWDKQVIHQQVLPLPSTCSAQAGELFGLLAGLQKSKPWPALNIFLDSKFLIGHLRRMAWGAFLGPSTQCDLHARLFPLLQGKTVYVHHVRSHTLLQDPISRLNEATDALMLAPLLPLAGKRTADGSEFEKRTADGSEFESPKKKAKVE

SEQ ID NO: 1529 - protein, 2007 aa, synthetic construct
MPAAKRVKLDGGDKKYSIGLDIGTNSVGWAVITDEYKVPSKKFKVLGNTDRHSIKKNLIGALLFDSGETAEATRLKRTARRRYTRRKNRICYLQEIFSNEMAKVDDSFFHRLEESFLVEEDKKHERHPIFGNIVDEVAYHEKYPTIYHLRKKLVDSTDKADLRLIYLALAHMIKFRGHFLIEGDLNPDNSDVDKLFIQLVQTYNQLFEENPINASGVDAKAILSARLSKSRRLENLIAQLPGEKKNGLFGNLIALSLGLTPNFKSNFDLAEDAKLQLSKDTYDDDLDNLLAQIGDQYADLFLAAKNLSDAILLSDILRVNTEITKAPLSASMIKRYDEHHQDLTLLKALVRQQLPEKYKEIFFDQSKNGYAGYIDGGASQEEFYKFIKPILEKMDGTEELLVKLNREDLLRKQRTFDNGSIPHQIHLGELHAILRRQEDFYPFLKDNREKIEKILTFRIPYYVGPLARGNSRFAWMTRKSEETITPWNFEEVVDKGASAQSFIERMTNFDKNLPNEKVLPKHSLLYEYFTVYNELTKVKYVTEGMRKPAFLSGEQKKAIVDLLFKTNRKVTVKQLKEDYFKKIECFDSVEISGVEDRFNASLGTYHDLLKIIKDKDFLDNEENEDILEDIVLTLTLFEDREMIEERLKTYAHLFDDKVMKQLKRRRYTGWGRLSRKLINGIRDKQSGKTILDFLKSDGFANRNFMQLIHDDSLTFKEDIQKAQVSGQGDSLHEHIANLAGSPAIKKGILQTVKVVDELVKVMGRHKPENIVIEMARENQTTQKGQKNSRERMKRIEEGIKELGSQILKEHPVENTQLQNEKLYLYYLQNGRDMYVDQELDINRLSDYDVDHIVPQSFLKDDSIDNKVLTRSDKARGKSDNVPSEEVVKKMKNYWRQLLNAKLITQRKFDNLTKAERGGLSELDKAGFIKRQLVETRQITKHVAQILDSRMNTKYDENDKLIREVKVITLKSKLVSDFRKDFQFYKVREINNYHHAHDAYLNAVVGTALIKKYPKLESEFVYGDYKVYDVRKMIAKSEQEIGKATAKYFFYSNIMNFFKTEITLANGEIRKRPLIETNGETGEIVWDKGRDFATVRKVLSMPQVNIVKKTEVQTGGFSKESILPKRNSDKLIARKKDWDPKKYGGFDSPTVAYSVLVVAKVEKGKSKKLKSVKELLGITIMERSSFEKNPIDFLEAKGYKEVKKDLIIKLPKYSLFELENGRKRMLASAGELQKGNELALPSKYVNFLYLASHYEKLKGSPEDNEQKQLFVEQHKHYLDEIIEQISEFSKRVILADANLDKVLSAYNKHRDKPIREQAENIIHLFTLTNLGAPAAFKYFDTTIDRKRYTSTKEVLDATLIHQSITGLYETRIDLSQLGGDGGGGGGGSPAPGGGLEHLPPPPEVSQFPLNPERLQALTDLVSRALEAKHIEPYQGPGNNPIFPVKKPNGKWRFIHDLRATNSLTRDLASPSPGPPDLTSPPQDLPHLRTIDLTDAFFQIPLPAVFQPYFAFTLPQPNNHGPGTRYSWRVLPQGFKNSPTLFQQQLSHILAPVRKAFPNSLIIQYMDDILLASPALRELTALTDKVTNALTKEGLPMSLEKTQATPGSIHFLGQVISPDCITYETLPSIHVKSIWSLAELQSMLGELQWVSKGTPVLRSSLHQLYLALRGHRDPRDTIELTSTQVQALKTIQKALALNCRSRLVSQLPILALIILRPTGTTAVLFQTKQKWPLVWLHTPHPATSLRPWGQLLANAIITLDKYSLQHYGQICKSFHHNISNQALTYYLHTSDQSSVAILLQHSHRFHNLGAQPSGPWRSLLQVPQIFQNIDVLRPPFIISPVVIDHAPCLFSDGATSKAAFILWDKQVIHQQVLPLPSTCSAQAGELFGLLAGLQKSKPWPALNIFLDSKFLIGHLRRMAWGAFLGPSTQCDLHARLFPLLQGKTVYVHHVRSHTLLQDPISRLNEATDALMLAPLLPLAGKRTADGSEFEKRTADGSEFESPKKKAKVE

SEQ ID NO: 1530 - protein, 2004 aa, synthetic construct
MPAAKRVKLDGGDKKYSIGLDIGTNSVGWAVITDEYKVPSKKFKVLGNTDRHSIKKNLIGALLFDSGETAEATRLKRTARRRYTRRKNRICYLQEIFSNEMAKVDDSFFHRLEESFLVEEDKKHERHPIFGNIVDEVAYHEKYPTIYHLRKKLVDSTDKADLRLIYLALAHMIKFRGHFLIEGDLNPDNSDVDKLFIQLVQTYNQLFEENPINASGVDAKAILSARLSKSRRLENLIAQLPGEKKNGLFGNLIALSLGLTPNFKSNFDLAEDAKLQLSKDTYDDDLDNLLAQIGDQYADLFLAAKNLSDAILLSDILRVNTEITKAPLSASMIKRYDEHHQDLTLLKALVRQQLPEKYKEIFFDQSKNGYAGYIDGGASQEEFYKFIKPILEKMDGTEELLVKLNREDLLRKQRTFDNGSIPHQIHLGELHAILRRQEDFYPFLKDNREKIEKILTFRIPYYVGPLARGNSRFAWMTRKSEETITPWNFEEVVDKGASAQSFIERMTNFDKNLPNEKVLPKHSLLYEYFTVYNELTKVKYVTEGMRKPAFLSGEQKKAIVDLLFKTNRKVTVKQLKEDYFKKIECFDSVEISGVEDRFNASLGTYHDLLKIIKDKDFLDNEENEDILEDIVLTLTLFEDREMIEERLKTYAHLFDDKVMKQLKRRRYTGWGRLSRKLINGIRDKQSGKTILDFLKSDGFANRNFMQLIHDDSLTFKEDIQKAQVSGQGDSLHEHIANLAGSPAIKKGILQTVKVVDELVKVMGRHKPENIVIEMARENQTTQKGQKNSRERMKRIEEGIKELGSQILKEHPVENTQLQNEKLYLYYLQNGRDMYVDQELDINRLSDYDVDHIVPQSFLKDDSIDNKVLTRSDKARGKSDNVPSEEVVKKMKNYWRQLLNAKLITQRKFDNLTKAERGGLSELDKAGFIKRQLVETRQITKHVAQILDSRMNTKYDENDKLIREVKVITLKSKLVSDFRKDFQFYKVREINNYHHAHDAYLNAVVGTALIKKYPKLESEFVYGDYKVYDVRKMIAKSEQEIGKATAKYFFYSNIMNFFKTEITLANGEIRKRPLIETNGETGEIVWDKGRDFATVRKVLSMPQVNIVKKTEVQTGGFSKESILPKRNSDKLIARKKDWDPKKYGGFDSPTVAYSVLVVAKVEKGKSKKLKSVKELLGITIMERSSFEKNPIDFLEAKGYKEVKKDLIIKLPKYSLFELENGRKRMLASAGELQKGNELALPSKYVNFLYLASHYEKLKGSPEDNEQKQLFVEQHKHYLDEIIEQISEFSKRVILADANLDKVLSAYNKHRDKPIREQAENIIHLFTLTNLGAPAAFKYFDTTIDRKRYTSTKEVLDATLIHQSITGLYETRIDLSQLGGDGGGGGPAPGGHLPPPPQVDQFPLNLPERLQALNDLVSKALEAGHIEPYSGPGNNPVFPVKKPNGKWRFIHDLRATNAITTTLTSPSPGPPDLTSLPTALPHLQTIDLTDAFFQIPLPKQYQPYFAFTIPQPCNYGPGTRYAWTVLPQGFKNSPTLFQQQLAAVLNPMRKMFPTSTIVQYMDDILLASPTNEELQQLSQLTLQALTTHGLPISQEKTQQTPGQIRFLGQVISPNHITYESTPTIPIKSQWTLTELQVILGEIQWVSKGTPILRKHLQSLYSALHPYRDPRACITLTPQQLHALHAIQQALQHNCRGRLNPALPLLGLISLSTSGTTSVIFQPKQNWPLAWLHTPHPPTSLCPWGHLLACTILTLDKYTLQHYGQLCQSFHHNMSKQALCDFLRNSPHPSVGILIHHMGRFHNLGSQPSGPWKTLLHLPTLLQEPRLLRPIFTLSPVVLDTAPCLFSDGSPQKAAYVLWDQTILQQDITPLPSHETHSAQKGELLALICGLRAAKPWPSLNIFLDSKYLIKYLHSLAIGAFLGTSAHQTLQAALPPLLQGKTIYLHHVRSHTNLPDPISTFNEYTDSLILAPLVPLAGKRTADGSEFEKRTADGSEFESPKKKAKVE

SEQ ID NO: 1531 - protein, 2009 aa, synthetic construct
MPAAKRVKLDGGDKKYSIGLDIGTNSVGWAVITDEYKVPSKKFKVLGNTDRHSIKKNLIGALLFDSGETAEATRLKRTARRRYTRRKNRICYLQEIFSNEMAKVDDSFFHRLEESFLVEEDKKHERHPIFGNIVDEVAYHEKYPTIYHLRKKLVDSTDKADLRLIYLALAHMIKFRGHFLIEGDLNPDNSDVDKLFIQLVQTYNQLFEENPINASGVDAKAILSARLSKSRRLENLIAQLPGEKKNGLFGNLIALSLGLTPNFKSNFDLAEDAKLQLSKDTYDDDLDNLLAQIGDQYADLFLAAKNLSDAILLSDILRVNTEITKAPLSASMIKRYDEHHQDLTLLKALVRQQLPEKYKEIFFDQSKNGYAGYIDGGASQEEFYKFIKPILEKMDGTEELLVKLNREDLLRKQRTFDNGSIPHQIHLGELHAILRRQEDFYPFLKDNREKIEKILTFRIPYYVGPLARGNSRFAWMTRKSEETITPWNFEEVVDKGASAQSFIERMTNFDKNLPNEKVLPKHSLLYEYFTVYNELTKVKYVTEGMRKPAFLSGEQKKAIVDLLFKTNRKVTVKQLKEDYFKKIECFDSVEISGVEDRFNASLGTYHDLLKIIKDKDFLDNEENEDILEDIVLTLTLFEDREMIEERLKTYAHLFDDKVMKQLKRRRYTGWGRLSRKLINGIRDKQSGKTILDFLKSDGFANRNFMQLIHDDSLTFKEDIQKAQVSGQGDSLHEHIANLAGSPAIKKGILQTVKVVDELVKVMGRHKPENIVIEMARENQTTQKGQKNSRERMKRIEEGIKELGSQILKEHPVENTQLQNEKLYLYYLQNGRDMYVDQELDINRLSDYDVDHIVPQSFLKDDSIDNKVLTRSDKARGKSDNVPSEEVVKKMKNYWRQLLNAKLITQRKFDNLTKAERGGLSELDKAGFIKRQLVETRQITKHVAQILDSRMNTKYDENDKLIREVKVITLKSKLVSDFRKDFQFYKVREINNYHHAHDAYLNAVVGTALIKKYPKLESEFVYGDYKVYDVRKMIAKSEQEIGKATAKYFFYSNIMNFFKTEITLANGEIRKRPLIETNGETGEIVWDKGRDFATVRKVLSMPQVNIVKKTEVQTGGFSKESILPKRNSDKLIARKKDWDPKKYGGFDSPTVAYSVLVVAKVEKGKSKKLKSVKELLGITIMERSSFEKNPIDFLEAKGYKEVKKDLIIKLPKYSLFELENGRKRMLASAGELQKGNELALPSKYVNFLYLASHYEKLKGSPEDNEQKQLFVEQHKHYLDEIIEQISEFSKRVILADANLDKVLSAYNKHRDKPIREQAENIIHLFTLTNLGAPAAFKYFDTTIDRKRYTSTKEVLDATLIHQSITGLYETRIDLSQLGGDGGEAAAKGSSGGGGGHLPPPPQVDQFPLNLPERLQALNDLVSKALEAGHIEPYSGPGNNPVFPVKKPNGKWRFIHDLRATNAITTTLTSPSPGPPDLTSLPTALPHLQTIDLTDAFFQIPLPKQYQPYFAFTIPQPCNYGPGTRYAWTVLPQGFKNSPTLFQQQLAAVLNPMRKMFPTSTIVQYMDDILLASPTNEELQQLSQLTLQALTTHGLPISQEKTQQTPGQIRFLGQVISPNHITYESTPTIPIKSQWTLTELQVILGEIQWVSKGTPILRKHLQSLYSALHPYRDPRACITLTPQQLHALHAIQQALQHNCRGRLNPALPLLGLISLSTSGTTSVIFQPKQNWPLAWLHTPHPPTSLCPWGHLLACTILTLDKYTLQHYGQLCQSFHHNMSKQALCDFLRNSPHPSVGILIHHMGRFHNLGSQPSGPWKTLLHLPTLLQEPRLLRPIFTLSPVVLDTAPCLFSDGSPQKAAYVLWDQTILQQDITPLPSHETHSAQKGELLALICGLRAAKPWPSLNIFLDSKYLIKYLHSLAIGAFLGTSAHQTLQAALPPLLQGKTIYLHHVRSHTNLPDPISTFNEYTDSLILAPLVPLAGKRTADGSEFEKRTADGSEFESPKKKAKVE

SEQ ID NO: 1532 - protein, 2009 aa, synthetic construct
MPAAKRVKLDGGDKKYSIGLDIGTNSVGWAVITDEYKVPSKKFKVLGNTDRHSIKKNLIGALLFDSGETAEATRLKRTARRRYTRRKNRICYLQEIFSNEMAKVDDSFFHRLEESFLVEEDKKHERHPIFGNIVDEVAYHEKYPTIYHLRKKLVDSTDKADLRLIYLALAHMIKFRGHFLIEGDLNPDNSDVDKLFIQLVQTYNQLFEENPINASGVDAKAILSARLSKSRRLENLIAQLPGEKKNGLFGNLIALSLGLTPNFKSNFDLAEDAKLQLSKDTYDDDLDNLLAQIGDQYADLFLAAKNLSDAILLSDILRVNTEITKAPLSASMIKRYDEHHQDLTLLKALVRQQLPEKYKEIFFDQSKNGYAGYIDGGASQEEFYKFIKPILEKMDGTEELLVKLNREDLLRKQRTFDNGSIPHQIHLGELHAILRRQEDFYPFLKDNREKIEKILTFRIPYYVGPLARGNSRFAWMTRKSEETITPWNFEEVVDKGASAQSFIERMTNFDKNLPNEKVLPKHSLLYEYFTVYNELTKVKYVTEGMRKPAFLSGEQKKAIVDLLFKTNRKVTVKQLKEDYFKKIECFDSVEISGVEDRFNASLGTYHDLLKIIKDKDFLDNEENEDILEDIVLTLTLFEDREMIEERLKTYAHLFDDKVMKQLKRRRYTGWGRLSRKLINGIRDKQSGKTILDFLKSDGFANRNFMQLIHDDSLTFKEDIQKAQVSGQGDSLHEHIANLAGSPAIKKGILQTVKVVDELVKVMGRHKPENIVIEMARENQTTQKGQKNSRERMKRIEEGIKELGSQILKEHPVENTQLQNEKLYLYYLQNGRDMYVDQELDINRLSDYDVDHIVPQSFLKDDSIDNKVLTRSDKARGKSDNVPSEEVVKKMKNYWRQLLNAKLITQRKFDNLTKAERGGLSELDKAGFIKRQLVETRQITKHVAQILDSRMNTKYDENDKLIREVKVITLKSKLVSDFRKDFQFYKVREINNYHHAHDAYLNAVVGTALIKKYPKLESEFVYGDYKVYDVRKMIAKSEQEIGKATAKYFFYSNIMNFFKTEITLANGEIRKRPLIETNGETGEIVWDKGRDFATVRKVLSMPQVNIVKKTEVQTGGFSKESILPKRNSDKLIARKKDWDPKKYGGFDSPTVAYSVLVVAKVEKGKSKKLKSVKELLGITIMERSSFEKNPIDFLEAKGYKEVKKDLIIKLPKYSLFELENGRKRMLASAGELQKGNELALPSKYVNFLYLASHYEKLKGSPEDNEQKQLFVEQHKHYLDEIIEQISEFSKRVILADANLDKVLSAYNKHRDKPIREQAENIIHLFTLTNLGAPAAFKYFDTTIDRKRYTSTKEVLDATLIHQSITGLYETRIDLSQLGGDGGEAAAKGGSPAPGGHLPPPPQVDQFPLNLPERLQALNDLVSKALEAGHIEPYSGPGNNPVFPVKKPNGKWRFIHDLRATNAITTTLTSPSPGPPDLTSLPTALPHLQTIDLTDAFFQIPLPKQYQPYFAFTIPQPCNYGPGTRYAWTVLPQGFKNSPTLFQQQLAAVLNPMRKMFPTSTIVQYMDDILLASPTNEELQQLSQLTLQALTTHGLPISQEKTQQTPGQIRFLGQVISPNHITYESTPTIPIKSQWTLTELQVILGEIQWVSKGTPILRKHLQSLYSALHPYRDPRACITLTPQQLHALHAIQQALQHNCRGRLNPALPLLGLISLSTSGTTSVIFQPKQNWPLAWLHTPHPPTSLCPWGHLLACTILTLDKYTLQHYGQLCQSFHHNMSKQALCDFLRNSPHPSVGILIHHMGRFHNLGSQPSGPWKTLLHLPTLLQEPRLLRPIFTLSPVVLDTAPCLFSDGSPQKAAYVLWDQTILQQDITPLPSHETHSAQKGELLALICGLRAAKPWPSLNIFLDSKYLIKYLHSLAIGAFLGTSAHQTLQAALPPLLQGKTIYLHHVRSHTNLPDPISTFNEYTDSLILAPLVPLAGKRTADGSEFEKRTADGSEFESPKKKAKVE

SEQ ID NO: 1533 - protein, 2031 aa, synthetic construct
MPAAKRVKLDGGDKKYSIGLDIGTNSVGWAVITDEYKVPSKKFKVLGNTDRHSIKKNLIGALLFDSGETAEATRLKRTARRRYTRRKNRICYLQEIFSNEMAKVDDSFFHRLEESFLVEEDKKHERHPIFGNIVDEVAYHEKYPTIYHLRKKLVDSTDKADLRLIYLALAHMIKFRGHFLIEGDLNPDNSDVDKLFIQLVQTYNQLFEENPINASGVDAKAILSARLSKSRRLENLIAQLPGEKKNGLFGNLIALSLGLTPNFKSNFDLAEDAKLQLSKDTYDDDLDNLLAQIGDQYADLFLAAKNLSDAILLSDILRVNTEITKAPLSASMIKRYDEHHQDLTLLKALVRQQLPEKYKEIFFDQSKNGYAGYIDGGASQEEFYKFIKPILEKMDGTEELLVKLNREDLLRKQRTFDNGSIPHQIHLGELHAILRRQEDFYPFLKDNREKIEKILTFRIPYYVGPLARGNSRFAWMTRKSEETITPWNFEEVVDKGASAQSFIERMTNFDKNLPNEKVLPKHSLLYEYFTVYNELTKVKYVTEGMRKPAFLSGEQKKAIVDLLFKTNRKVTVKQLKEDYFKKIECFDSVEISGVEDRFNASLGTYHDLLKIIKDKDFLDNEENEDILEDIVLTLTLFEDREMIEERLKTYAHLFDDKVMKQLKRRRYTGWGRLSRKLINGIRDKQSGKTILDFLKSDGFANRNFMQLIHDDSLTFKEDIQKAQVSGQGDSLHEHIANLAGSPAIKKGILQTVKVVDELVKVMGRHKPENIVIEMARENQTTQKGQKNSRERMKRIEEGIKELGSQILKEHPVENTQLQNEKLYLYYLQNGRDMYVDQELDINRLSDYDVDHIVPQSFLKDDSIDNKVLTRSDKARGKSDNVPSEEVVKKMKNYWRQLLNAKLITQRKFDNLTKAERGGLSELDKAGFIKRQLVETRQITKHVAQILDSRMNTKYDENDKLIREVKVITLKSKLVSDFRKDFQFYKVREINNYHHAHDAYLNAVVGTALIKKYPKLESEFVYGDYKVYDVRKMIAKSEQEIGKATAKYFFYSNIMNFFKTEITLANGEIRKRPLIETNGETGEIVWDKGRDFATVRKVLSMPQVNIVKKTEVQTGGFSKESILPKRNSDKLIARKKDWDPKKYGGFDSPTVAYSVLVVAKVEKGKSKKLKSVKELLGITIMERSSFEKNPIDFLEAKGYKEVKKDLIIKLPKYSLFELENGRKRMLASAGELQKGNELALPSKYVNFLYLASHYEKLKGSPEDNEQKQLFVEQHKHYLDEIIEQISEFSKRVILADANLDKVLSAYNKHRDKPIREQAENIIHLFTLTNLGAPAAFKYFDTTIDRKRYTSTKEVLDATLIHQSITGLYETRIDLSQLGGDGGSGGSSGGSSGSETPGTSESATPESSGGSSGGSSGGHLPPPPQVDQFPLNLPERLQALNDLVSKALEAGHIEPYSGPGNNPVFPVKKPNGKWRFIHDLRATNAITTTLTSPSPGPPDLTSLPTALPHLQTIDLTDAFFQIPLPKQYQPYFAFTIPQPCNYGPGTRYAWTVLPQGFKNSPTLFQQQLAAVLNPMRKMFPTSTIVQYMDDILLASPTNEELQQLSQLTLQALTTHGLPISQEKTQQTPGQIRFLGQVISPNHITYESTPTIPIKSQWTLTELQVILGEIQWVSKGTPILRKHLQSLYSALHPYRDPRACITLTPQQLHALHAIQQALQHNCRGRLNPALPLLGLISLSTSGTTSVIFQPKQNWPLAWLHTPHPPTSLCPWGHLLACTILTLDKYTLQHYGQLCQSFHHNMSKQALCDFLRNSPHPSVGILIHHMGRFHNLGSQPSGPWKTLLHLPTLLQEPRLLRPIFTLSPVVLDTAPCLFSDGSPQKAAYVLWDQTILQQDITPLPSHETHSAQKGELLALICGLRAAKPWPSLNIFLDSKYLIKYLHSLAIGAFLGTSAHQTLQAALPPLLQGKTIYLHHVRSHTNLPDPISTFNEYTDSLILAPLVPLAGKRTADGSEFEKRTADGSEFESPKKKAKVE

SEQ ID NO: 1534 - protein, 2006 aa, synthetic construct
MPAAKRVKLDGGDKKYSIGLDIGTNSVGWAVITDEYKVPSKKFKVLGNTDRHSIKKNLIGALLFDSGETAEATRLKRTARRRYTRRKNRICYLQEIFSNEMAKVDDSFFHRLEESFLVEEDKKHERHPIFGNIVDEVAYHEKYPTIYHLRKKLVDSTDKADLRLIYLALAHMIKFRGHFLIEGDLNPDNSDVDKLFIQLVQTYNQLFEENPINASGVDAKAILSARLSKSRRLENLIAQLPGEKKNGLFGNLIALSLGLTPNFKSNFDLAEDAKLQLSKDTYDDDLDNLLAQIGDQYADLFLAAKNLSDAILLSDILRVNTEITKAPLSASMIKRYDEHHQDLTLLKALVRQQLPEKYKEIFFDQSKNGYAGYIDGGASQEEFYKFIKPILEKMDGTEELLVKLNREDLLRKQRTFDNGSIPHQIHLGELHAILRRQEDFYPFLKDNREKIEKILTFRIPYYVGPLARGNSRFAWMTRKSEETITPWNFEEVVDKGASAQSFIERMTNFDKNLPNEKVLPKHSLLYEYFTVYNELTKVKYVTEGMRKPAFLSGEQKKAIVDLLFKTNRKVTVKQLKEDYFKKIECFDSVEISGVEDRFNASLGTYHDLLKIIKDKDFLDNEENEDILEDIVLTLTLFEDREMIEERLKTYAHLFDDKVMKQLKRRRYTGWGRLSRKLINGIRDKQSGKTILDFLKSDGFANRNFMQLIHDDSLTFKEDIQKAQVSGQGDSLHEHIANLAGSPAIKKGILQTVKVVDELVKVMGRHKPENIVIEMARENQTTQKGQKNSRERMKRIEEGIKELGSQILKEHPVENTQLQNEKLYLYYLQNGRDMYVDQELDINRLSDYDVDHIVPQSFLKDDSIDNKVLTRSDKARGKSDNVPSEEVVKKMKNYWRQLLNAKLITQRKFDNLTKAERGGLSELDKAGFIKRQLVETRQITKHVAQILDSRMNTKYDENDKLIREVKVITLKSKLVSDFRKDFQFYKVREINNYHHAHDAYLNAVVGTALIKKYPKLESEFVYGDYKVYDVRKMIAKSEQEIGKATAKYFFYSNIMNFFKTEITLANGEIRKRPLIETNGETGEIVWDKGRDFATVRKVLSMPQVNIVKKTEVQTGGFSKESILPKRNSDKLIARKKDWDPKKYGGFDSPTVAYSVLVVAKVEKGKSKKLKSVKELLGITIMERSSFEKNPIDFLEAKGYKEVKKDLIIKLPKYSLFELENGRKRMLASAGELQKGNELALPSKYVNFLYLASHYEKLKGSPEDNEQKQLFVEQHKHYLDEIIEQISEFSKRVILADANLDKVLSAYNKHRDKPIREQAENIIHLFTLTNLGAPAAFKYFDTTIDRKRYTSTKEVLDATLIHQSITGLYETRIDLSQLGGDGGPAPEAAAKGGHLPPPPQVDQFPLNLPERLQALNDLVSKALEAGHIEPYSGPGNNPVFPVKKPNGKWRFIHDLRATNAITTTLTSPSPGPPDLTSLPTALPHLQTIDLTDAFFQIPLPKQYQPYFAFTIPQPCNYGPGTRYAWTVLPQGFKNSPTLFQQQLAAVLNPMRKMFPTSTIVQYMDDILLASPTNEELQQLSQLTLQALTTHGLPISQEKTQQTPGQIRFLGQVISPNHITYESTPTIPIKSQWTLTELQVILGEIQWVSKGTPILRKHLQSLYSALHPYRDPRACITLTPQQLHALHAIQQALQHNCRGRLNPALPLLGLISLSTSGTTSVIFQPKQNWPLAWLHTPHPPTSLCPWGHLLACTILTLDKYTLQHYGQLCQSFHHNMSKQALCDFLRNSPHPSVGILIHHMGRFHNLGSQPSGPWKTLLHLPTLLQEPRLLRPIFTLSPVVLDTAPCLFSDGSPQKAAYVLWDQTILQQDITPLPSHETHSAQKGELLALICGLRAAKPWPSLNIFLDSKYLIKYLHSLAIGAFLGTSAHQTLQAALPPLLQGKTIYLHHVRSHTNLPDPISTFNEYTDSLILAPLVPLAGKRTADGSEFEKRTADGSEFESPKKKAKVE

SEQ ID NO: 1535 - protein, 2007 aa, synthetic construct
MPAAKRVKLDGGDKKYSIGLDIGTNSVGWAVITDEYKVPSKKFKVLGNTDRHSIKKNLIGALLFDSGETAEATRLKRTARRRYTRRKNRICYLQEIFSNEMAKVDDSFFHRLEESFLVEEDKKHERHPIFGNIVDEVAYHEKYPTIYHLRKKLVDSTDKADLRLIYLALAHMIKFRGHFLIEGDLNPDNSDVDKLFIQLVQTYNQLFEENPINASGVDAKAILSARLSKSRRLENLIAQLPGEKKNGLFGNLIALSLGLTPNFKSNFDLAEDAKLQLSKDTYDDDLDNLLAQIGDQYADLFLAAKNLSDAILLSDILRVNTEITKAPLSASMIKRYDEHHQDLTLLKALVRQQLPEKYKEIFFDQSKNGYAGYIDGGASQEEFYKFIKPILEKMDGTEELLVKLNREDLLRKQRTFDNGSIPHQIHLGELHAILRRQEDFYPFLKDNREKIEKILTFRIPYYVGPLARGNSRFAWMTRKSEETITPWNFEEVVDKGASAQSFIERMTNFDKNLPNEKVLPKHSLLYEYFTVYNELTKVKYVTEGMRKPAFLSGEQKKAIVDLLFKTNRKVTVKQLKEDYFKKIECFDSVEISGVEDRFNASLGTYHDLLKIIKDKDFLDNEENEDILEDIVLTLTLFEDREMIEERLKTYAHLFDDKVMKQLKRRRYTGWGRLSRKLINGIRDKQSGKTILDFLKSDGFANRNFMQLIHDDSLTFKEDIQKAQVSGQGDSLHEHIANLAGSPAIKKGILQTVKVVDELVKVMGRHKPENIVIEMARENQTTQKGQKNSRERMKRIEEGIKELGSQILKEHPVENTQLQNEKLYLYYLQNGRDMYVDQELDINRLSDYDVDHIVPQSFLKDDSIDNKVLTRSDKARGKSDNVPSEEVVKKMKNYWRQLLNAKLITQRKFDNLTKAERGGLSELDKAGFIKRQLVETRQITKHVAQILDSRMNTKYDENDKLIREVKVITLKSKLVSDFRKDFQFYKVREINNYHHAHDAYLNAVVGTALIKKYPKLESEFVYGDYKVYDVRKMIAKSEQEIGKATAKYFFYSNIMNFFKTEITLANGEIRKRPLIETNGETGEIVWDKGRDFATVRKVLSMPQVNIVKKTEVQTGGFSKESILPKRNSDKLIARKKDWDPKKYGGFDSPTVAYSVLVVAKVEKGKSKKLKSVKELLGITIMERSSFEKNPIDFLEAKGYKEVKKDLIIKLPKYSLFELENGRKRMLASAGELQKGNELALPSKYVNFLYLASHYEKLKGSPEDNEQKQLFVEQHKHYLDEIIEQISEFSKRVILADANLDKVLSAYNKHRDKPIREQAENIIHLFTLTNLGAPAAFKYFDTTIDRKRYTSTKEVLDATLIHQSITGLYETRIDLSQLGGDGGGSSGGSGGGGGHLPPPPQVDQFPLNLPERLQALNDLVSKALEAGHIEPYSGPGNNPVFPVKKPNGKWRFIHDLRATNAITTTLTSPSPGPPDLTSLPTALPHLQTIDLTDAFFQIPLPKQYQPYFAFTIPQPCNYGPGTRYAWTVLPQGFKNSPTLFQQQLAAVLNPMRKMFPTSTIVQYMDDILLASPTNEELQQLSQLTLQALTTHGLPISQEKTQQTPGQIRFLGQVISPNHITYESTPTIPIKSQWTLTELQVILGEIQWVSKGTPILRKHLQSLYSALHPYRDPRACITLTPQQLHALHAIQQALQHNCRGRLNPALPLLGLISLSTSGTTSVIFQPKQNWPLAWLHTPHPPTSLCPWGHLLACTILTLDKYTLQHYGQLCQSFHHNMSKQALCDFLRNSPHPSVGILIHHMGRFHNLGSQPSGPWKTLLHLPTLLQEPRLLRPIFTLSPVVLDTAPCLFSDGSPQKAAYVLWDQTILQQDITPLPSHETHSAQKGELLALICGLRAAKPWPSLNIFLDSKYLIKYLHSLAIGAFLGTSAHQTLQAALPPLLQGKTIYLHHVRSHTNLPDPISTFNEYTDSLILAPLVPLAGKRTADGSEFEKRTADGSEFESPKKKAKVE

SEQ ID NO: 1536 - protein, 2007 aa, synthetic construct
MPAAKRVKLDGGDKKYSIGLDIGTNSVGWAVITDEYKVPSKKFKVLGNTDRHSIKKNLIGALLFDSGETAEATRLKRTARRRYTRRKNRICYLQEIFSNEMAKVDDSFFHRLEESFLVEEDKKHERHPIFGNIVDEVAYHEKYPTIYHLRKKLVDSTDKADLRLIYLALAHMIKFRGHFLIEGDLNPDNSDVDKLFIQLVQTYNQLFEENPINASGVDAKAILSARLSKSRRLENLIAQLPGEKKNGLFGNLIALSLGLTPNFKSNFDLAEDAKLQLSKDTYDDDLDNLLAQIGDQYADLFLAAKNLSDAILLSDILRVNTEITKAPLSASMIKRYDEHHQDLTLLKALVRQQLPEKYKEIFFDQSKNGYAGYIDGGASQEEFYKFIKPILEKMDGTEELLVKLNREDLLRKQRTFDNGSIPHQIHLGELHAILRRQEDFYPFLKDNREKIEKILTFRIPYYVGPLARGNSRFAWMTRKSEETITPWNFEEVVDKGASAQSFIERMTNFDKNLPNEKVLPKHSLLYEYFTVYNELTKVKYVTEGMRKPAFLSGEQKKAIVDLLFKTNRKVTVKQLKEDYFKKIECFDSVEISGVEDRFNASLGTYHDLLKIIKDKDFLDNEENEDILEDIVLTLTLFEDREMIEERLKTYAHLFDDKVMKQLKRRRYTGWGRLSRKLINGIRDKQSGKTILDFLKSDGFANRNFMQLIHDDSLTFKEDIQKAQVSGQGDSLHEHIANLAGSPAIKKGILQTVKVVDELVKVMGRHKPENIVIEMARENQTTQKGQKNSRERMKRIEEGIKELGSQILKEHPVENTQLQNEKLYLYYLQNGRDMYVDQELDINRLSDYDVDHIVPQSFLKDDSIDNKVLTRSDKARGKSDNVPSEEVVKKMKNYWRQLLNAKLITQRKFDNLTKAERGGLSELDKAGFIKRQLVETRQITKHVAQILDSRMNTKYDENDKLIREVKVITLKSKLVSDFRKDFQFYKVREINNYHHAHDAYLNAVVGTALIKKYPKLESEFVYGDYKVYDVRKMIAKSEQEIGKATAKYFFYSNIMNFFKTEITLANGEIRKRPLIETNGETGEIVWDKGRDFATVRKVLSMPQVNIVKKTEVQTGGFSKESILPKRNSDKLIARKKDWDPKKYGGFDSPTVAYSVLVVAKVEKGKSKKLKSVKELLGITIMERSSFEKNPIDFLEAKGYKEVKKDLIIKLPKYSLFELENGRKRMLASAGELQKGNELALPSKYVNFLYLASHYEKLKGSPEDNEQKQLFVEQHKHYLDEIIEQISEFSKRVILADANLDKVLSAYNKHRDKPIREQAENIIHLFTLTNLGAPAAFKYFDTTIDRKRYTSTKEVLDATLIHQSITGLYETRIDLSQLGGDGGPAPAPAPAPGGHLPPPPQVDQFPLNLPERLQALNDLVSKALEAGHIEPYSGPGNNPVFPVKKPNGKWRFIHDLRATNAITTTLTSPSPGPPDLTSLPTALPHLQTIDLTDAFFQIPLPKQYQPYFAFTIPQPCNYGPGTRYAWTVLPQGFKNSPTLFQQQLAAVLNPMRKMFPTSTIVQYMDDILLASPTNEELQQLSQLTLQALTTHGLPISQEKTQQTPGQIRFLGQVISPNHITYESTPTIPIKSQWTLTELQVILGEIQWVSKGTPILRKHLQSLYSALHPYRDPRACITLTPQQLHALHAIQQALQHNCRGRLNPALPLLGLISLSTSGTTSVIFQPKQNWPLAWLHTPHPPTSLCPWGHLLACTILTLDKYTLQHYGQLCQSFHHNMSKQALCDFLRNSPHPSVGILIHHMGRFHNLGSQPSGPWKTLLHLPTLLQEPRLLRPIFTLSPVVLDTAPCLFSDGSPQKAAYVLWDQTILQQDITPLPSHETHSAQKGELLALICGLRAAKPWPSLNIFLDSKYLIKYLHSLAIGAFLGTSAHQTLQAALPPLLQGKTIYLHHVRSHTNLPDPISTFNEYTDSLILAPLVPLAGKRTADGSEFEKRTADGSEFESPKKKAKVE

SEQ ID NO: 1537 - protein, 2010 aa, synthetic construct
MPAAKRVKLDGGDKKYSIGLDIGTNSVGWAVITDEYKVPSKKFKVLGNTDRHSIKKNLIGALLFDSGETAEATRLKRTARRRYTRRKNRICYLQEIFSNEMAKVDDSFFHRLEESFLVEEDKKHERHPIFGNIVDEVAYHEKYPTIYHLRKKLVDSTDKADLRLIYLALAHMIKFRGHFLIEGDLNPDNSDVDKLFIQLVQTYNQLFEENPINASGVDAKAILSARLSKSRRLENLIAQLPGEKKNGLFGNLIALSLGLTPNFKSNFDLAEDAKLQLSKDTYDDDLDNLLAQIGDQYADLFLAAKNLSDAILLSDILRVNTEITKAPLSASMIKRYDEHHQDLTLLKALVRQQLPEKYKEIFFDQSKNGYAGYIDGGASQEEFYKFIKPILEKMDGTEELLVKLNREDLLRKQRTFDNGSIPHQIHLGELHAILRRQEDFYPFLKDNREKIEKILTFRIPYYVGPLARGNSRFAWMTRKSEETITPWNFEEVVDKGASAQSFIERMTNFDKNLPNEKVLPKHSLLYEYFTVYNELTKVKYVTEGMRKPAFLSGEQKKAIVDLLFKTNRKVTVKQLKEDYFKKIECFDSVEISGVEDRFNASLGTYHDLLKIIKDKDFLDNEENEDILEDIVLTLTLFEDREMIEERLKTYAHLFDDKVMKQLKRRRYTGWGRLSRKLINGIRDKQSGKTILDFLKSDGFANRNFMQLIHDDSLTFKEDIQKAQVSGQGDSLHEHIANLAGSPAIKKGILQTVKVVDELVKVMGRHKPENIVIEMARENQTTQKGQKNSRERMKRIEEGIKELGSQILKEHPVENTQLQNEKLYLYYLQNGRDMYVDQELDINRLSDYDVDHIVPQSFLKDDSIDNKVLTRSDKARGKSDNVPSEEVVKKMKNYWRQLLNAKLITQRKFDNLTKAERGGLSELDKAGFIKRQLVETRQITKHVAQILDSRMNTKYDENDKLIREVKVITLKSKLVSDFRKDFQFYKVREINNYHHAHDAYLNAVVGTALIKKYPKLESEFVYGDYKVYDVRKMIAKSEQEIGKATAKYFFYSNIMNFFKTEITLANGEIRKRPLIETNGETGEIVWDKGRDFATVRKVLSMPQVNIVKKTEVQTGGFSKESILPKRNSDKLIARKKDWDPKKYGGFDSPTVAYSVLVVAKVEKGKSKKLKSVKELLGITIMERSSFEKNPIDFLEAKGYKEVKKDLIIKLPKYSLFELENGRKRMLASAGELQKGNELALPSKYVNFLYLASHYEKLKGSPEDNEQKQLFVEQHKHYLDEIIEQISEFSKRVILADANLDKVLSAYNKHRDKPIREQAENIIHLFTLTNLGAPAAFKYFDTTIDRKRYTSTKEVLDATLIHQSITGLYETRIDLSQLGGDGGEAAAKEAAAKEAAAKGGPLGTSDSPVTHADPIDWKSEEPVWVDQWPLTQEKLSAAQQLVQEQLRLGHIEPSTSAWNSPIFVIKKKSGKWRLLQDLRKVNETMMHMGALQPGLPTPSAIPDKSYIIVIDLKDCFYTIPLAPQDCKRFAFSLPSVNFKEPMQRYQWRVLPQGMTNSPTLCQKFVATAIAPVRQRFPQLYLVHYMDDILLAHTDEHLLYQAFSILKQHLSLNGLVIADEKIQTHFPYNYLGFSLYPRVYNTQLVKLQTDHLKTLNDFQKLLGDINWIRPYLKLPTYTLQPLFDILKGDSDPASPRTLSLEGRTALQSIEEAIRQQQITYCDYQRSWGLYILPTPRAPTGVLYQDKPLRWIYLSATPTKHLLPYYELVAKIIAKGRHEAIQYFGMEPPFICVPYALEQQDWLFQFSDNWSIAFANYPGQITHHYPSDKLLQFASSHAFIFPKIVRRQPIPEATLIFTDGSSNGTAALIINHQTYYAQTSFSSAQVVELFAVHQALLTVPTSFNLFTDSSYVVGALQMIETVPIIGTTSPEVLNLFTLIQQVLHCRQHPCFFGHIRAHSTLPGALVQGNHTADVLTKQVFFQSAGKRTADGSEFEKRTADGSEFESPKKKAKVE

SEQ ID NO: 1538 - protein, 2001 aa, synthetic construct
MPAAKRVKLDGGDKKYSIGLDIGTNSVGWAVITDEYKVPSKKFKVLGNTDRHSIKKNLIGALLFDSGETAEATRLKRTARRRYTRRKNRICYLQEIFSNEMAKVDDSFFHRLEESFLVEEDKKHERHPIFGNIVDEVAYHEKYPTIYHLRKKLVDSTDKADLRLIYLALAHMIKFRGHFLIEGDLNPDNSDVDKLFIQLVQTYNQLFEENPINASGVDAKAILSARLSKSRRLENLIAQLPGEKKNGLFGNLIALSLGLTPNFKSNFDLAEDAKLQLSKDTYDDDLDNLLAQIGDQYADLFLAAKNLSDAILLSDILRVNTEITKAPLSASMIKRYDEHHQDLTLLKALVRQQLPEKYKEIFFDQSKNGYAGYIDGGASQEEFYKFIKPILEKMDGTEELLVKLNREDLLRKQRTFDNGSIPHQIHLGELHAILRRQEDFYPFLKDNREKIEKILTFRIPYYVGPLARGNSRFAWMTRKSEETITPWNFEEVVDKGASAQSFIERMTNFDKNLPNEKVLPKHSLLYEYFTVYNELTKVKYVTEGMRKPAFLSGEQKKAIVDLLFKTNRKVTVKQLKEDYFKKIECFDSVEISGVEDRFNASLGTYHDLLKIIKDKDFLDNEENEDILEDIVLTLTLFEDREMIEERLKTYAHLFDDKVMKQLKRRRYTGWGRLSRKLINGIRDKQSGKTILDFLKSDGFANRNFMQLIHDDSLTFKEDIQKAQVSGQGDSLHEHIANLAGSPAIKKGILQTVKVVDELVKVMGRHKPENIVIEMARENQTTQKGQKNSRERMKRIEEGIKELGSQILKEHPVENTQLQNEKLYLYYLQNGRDMYVDQELDINRLSDYDVDHIVPQSFLKDDSIDNKVLTRSDKARGKSDNVPSEEVVKKMKNYWRQLLNAKLITQRKFDNLTKAERGGLSELDKAGFIKRQLVETRQITKHVAQILDSRMNTKYDENDKLIREVKVITLKSKLVSDFRKDFQFYKVREINNYHHAHDAYLNAVVGTALIKKYPKLESEFVYGDYKVYDVRKMIAKSEQEIGKATAKYFFYSNIMNFFKTEITLANGEIRKRPLIETNGETGEIVWDKGRDFATVRKVLSMPQVNIVKKTEVQTGGFSKESILPKRNSDKLIARKKDWDPKKYGGFDSPTVAYSVLVVAKVEKGKSKKLKSVKELLGITIMERSSFEKNPIDFLEAKGYKEVKKDLIIKLPKYSLFELENGRKRMLASAGELQKGNELALPSKYVNFLYLASHYEKLKGSPEDNEQKQLFVEQHKHYLDEIIEQISEFSKRVILADANLDKVLSAYNKHRDKPIREQAENIIHLFTLTNLGAPAAFKYFDTTIDRKRYTSTKEVLDATLIHQSITGLYETRIDLSQLGGDGGGSSGGGGGPLGTSDSPVTHADPIDWKSEEPVWVDQWPLTQEKLSAAQQLVQEQLRLGHIEPSTSAWNSPIFVIKKKSGKWRLLQDLRKVNETMMHMGALQPGLPTPSAIPDKSYIIVIDLKDCFYTIPLAPQDCKRFAFSLPSVNFKEPMQRYQWRVLPQGMTNSPTLCQKFVATAIAPVRQRFPQLYLVHYMDDILLAHTDEHLLYQAFSILKQHLSLNGLVIADEKIQTHFPYNYLGFSLYPRVYNTQLVKLQTDHLKTLNDFQKLLGDINWIRPYLKLPTYTLQPLFDILKGDSDPASPRTLSLEGRTALQSIEEAIRQQQITYCDYQRSWGLYILPTPRAPTGVLYQDKPLRWIYLSATPTKHLLPYYELVAKIIAKGRHEAIQYFGMEPPFICVPYALEQQDWLFQFSDNWSIAFANYPGQITHHYPSDKLLQFASSHAFIFPKIVRRQPIPEATLIFTDGSSNGTAALIINHQTYYAQTSFSSAQVVELFAVHQALLTVPTSFNLFTDSSYVVGALQMIETVPIIGTTSPEVLNLFTLIQQVLHCRQHPCFFGHIRAHSTLPGALVQGNHTADVLTKQVFFQSAGKRTADGSEFEKRTADGSEFESPKKKAKVE

SEQ ID NO: 1539 - protein, 2106 aa, synthetic construct
MPAAKRVKLDGGDKKYSIGLDIGTNSVGWAVITDEYKVPSKKFKVLGNTDRHSIKKNLIGALLFDSGETAEATRLKRTARRRYTRRKNRICYLQEIFSNEMAKVDDSFFHRLEESFLVEEDKKHERHPIFGNIVDEVAYHEKYPTIYHLRKKLVDSTDKADLRLIYLALAHMIKFRGHFLIEGDLNPDNSDVDKLFIQLVQTYNQLFEENPINASGVDAKAILSARLSKSRRLENLIAQLPGEKKNGLFGNLIALSLGLTPNFKSNFDLAEDAKLQLSKDTYDDDLDNLLAQIGDQYADLFLAAKNLSDAILLSDILRVNTEITKAPLSASMIKRYDEHHQDLTLLKALVRQQLPEKYKEIFFDQSKNGYAGYIDGGASQEEFYKFIKPILEKMDGTEELLVKLNREDLLRKQRTFDNGSIPHQIHLGELHAILRRQEDFYPFLKDNREKIEKILTFRIPYYVGPLARGNSRFAWMTRKSEETITPWNFEEVVDKGASAQSFIERMTNFDKNLPNEKVLPKHSLLYEYFTVYNELTKVKYVTEGMRKPAFLSGEQKKAIVDLLFKTNRKVTVKQLKEDYFKKIECFDSVEISGVEDRFNASLGTYHDLLKIIKDKDFLDNEENEDILEDIVLTLTLFEDREMIEERLKTYAHLFDDKVMKQLKRRRYTGWGRLSRKLINGIRDKQSGKTILDFLKSDGFANRNFMQLIHDDSLTFKEDIQKAQVSGQGDSLHEHIANLAGSPAIKKGILQTVKVVDELVKVMGRHKPENIVIEMARENQTTQKGQKNSRERMKRIEEGIKELGSQILKEHPVENTQLQNEKLYLYYLQNGRDMYVDQELDINRLSDYDVDHIVPQSFLKDDSIDNKVLTRSDKARGKSDNVPSEEVVKKMKNYWRQLLNAKLITQRKFDNLTKAERGGLSELDKAGFIKRQLVETRQITKHVAQILDSRMNTKYDENDKLIREVKVITLKSKLVSDFRKDFQFYKVREINNYHHAHDAYLNAVVGTALIKKYPKLESEFVYGDYKVYDVRKMIAKSEQEIGKATAKYFFYSNIMNFFKTEITLANGEIRKRPLIETNGETGEIVWDKGRDFATVRKVLSMPQVNIVKKTEVQTGGFSKESILPKRNSDKLIARKKDWDPKKYGGFDSPTVAYSVLVVAKVEKGKSKKLKSVKELLGITIMERSSFEKNPIDFLEAKGYKEVKKDLIIKLPKYSLFELENGRKRMLASAGELQKGNELALPSKYVNFLYLASHYEKLKGSPEDNEQKQLFVEQHKHYLDEIIEQISEFSKRVILADANLDKVLSAYNKHRDKPIREQAENIIHLFTLTNLGAPAAFKYFDTTIDRKRYTSTKEVLDATLIHQSITGLYETRIDLSQLGGDGGEAAAKGGGGSEAAAKGGTVSLQDEHRLFDIPVTTSLPDVWLQDFPQAWAETGGLGRAKCQAPIIIDLKPTAVPVSIKQYPMSLEAHMGIRQHIIKFLELGVLRPCRSPWNTPLLPVKKPGTQDYRPVQDLREINKRTVDIHPTVPNPYNLLSTLKPDYSWYTVLDLKDAFFCLPLAPQSQELFAFEWKDPERGISGQLTWTRLPQGFKNSPTLFNEALHRDLTDFRTQHPEVTLLQYVDDLLLAAPTKKACTQGTRHLLQELGEKGYRASAKKAQICQTKVTYLGYILSEGKRWLTPGRIETVARIPPPRNPREVREFLGTAGFCRLWIPGFAELAAPLYALTKPSTPFTWQTEHQLAFEALKKALLSAPALGLPDTSKPFTLFLDERQGIAKGVLTQKLGPWKRPVAYLSKKLDPVAAGWPPCLRIMAATAMLVKDSAKLTLGQPLTVITPHTLEAIVRQPPDRWITNARLTHYQALLLDTDRVQFGPPVTLNPATLLPVPENQPSPHDCRQVLAETHGTREDLKDQELPDADHTWYTDGSSYLDSGTRRAGAAVVDGHNTIWAQSLPPGTSAQKAELIALTKALELSKGKKANIYTDSRYAFATAHTHGSIYERRGWLTSEGKEIKNKAEIIALLKALFLPQEVAIIHCPGHQKGQDPVAVGNRQADRVARQAAMAEVLTLATEPDNTSHITAGKRTADGSEFEKRTADGSEFESPKKKAKVE

SEQ ID NO: 1540 - protein, 2102 aa, synthetic construct
MPAAKRVKLDGGDKKYSIGLDIGTNSVGWAVITDEYKVPSKKFKVLGNTDRHSIKKNLIGALLFDSGETAEATRLKRTARRRYTRRKNRICYLQEIFSNEMAKVDDSFFHRLEESFLVEEDKKHERHPIFGNIVDEVAYHEKYPTIYHLRKKLVDSTDKADLRLIYLALAHMIKFRGHFLIEGDLNPDNSDVDKLFIQLVQTYNQLFEENPINASGVDAKAILSARLSKSRRLENLIAQLPGEKKNGLFGNLIALSLGLTPNFKSNFDLAEDAKLQLSKDTYDDDLDNLLAQIGDQYADLFLAAKNLSDAILLSDILRVNTEITKAPLSASMIKRYDEHHQDLTLLKALVRQQLPEKYKEIFFDQSKNGYAGYIDGGASQEEFYKFIKPILEKMDGTEELLVKLNREDLLRKQRTFDNGSIPHQIHLGELHAILRRQEDFYPFLKDNREKIEKILTFRIPYYVGPLARGNSRFAWMTRKSEETITPWNFEEVVDKGASAQSFIERMTNFDKNLPNEKVLPKHSLLYEYFTVYNELTKVKYVTEGMRKPAFLSGEQKKAIVDLLFKTNRKVTVKQLKEDYFKKIECFDSVEISGVEDRFNASLGTYHDLLKIIKDKDFLDNEENEDILEDIVLTLTLFEDREMIEERLKTYAHLFDDKVMKQLKRRRYTGWGRLSRKLINGIRDKQSGKTILDFLKSDGFANRNFMQLIHDDSLTFKEDIQKAQVSGQGDSLHEHIANLAGSPAIKKGILQTVKVVDELVKVMGRHKPENIVIEMARENQTTQKGQKNSRERMKRIEEGIKELGSQILKEHPVENTQLQNEKLYLYYLQNGRDMYVDQELDINRLSDYDVDHIVPQSFLKDDSIDNKVLTRSDKARGKSDNVPSEEVVKKMKNYWRQLLNAKLITQRKFDNLTKAERGGLSELDKAGFIKRQLVETRQITKHVAQILDSRMNTKYDENDKLIREVKVITLKSKLVSDFRKDFQFYKVREINNYHHAHDAYLNAVVGTALIKKYPKLESEFVYGDYKVYDVRKMIAKSEQEIGKATAKYFFYSNIMNFFKTEITLANGEIRKRPLIETNGETGEIVWDKGRDFATVRKVLSMPQVNIVKKTEVQTGGFSKESILPKRNSDKLIARKKDWDPKKYGGFDSPTVAYSVLVVAKVEKGKSKKLKSVKELLGITIMERSSFEKNPIDFLEAKGYKEVKKDLIIKLPKYSLFELENGRKRMLASAGELQKGNELALPSKYVNFLYLASHYEKLKGSPEDNEQKQLFVEQHKHYLDEIIEQISEFSKRVILADANLDKVLSAYNKHRDKPIREQAENIIHLFTLTNLGAPAAFKYFDTTIDRKRYTSTKEVLDATLIHQSITGLYETRIDLSQLGGDGGGGGGSSEAAAKGGTVSLQDEHRLFDIPVTTSLPDVWLQDFPQAWAETGGLGRAKCQAPIIIDLKPTAVPVSIKQYPMSLEAHMGIRQHIIKFLELGVLRPCRSPWNTPLLPVKKPGTQDYRPVQDLREINKRTVDIHPTVPNPYNLLSTLKPDYSWYTVLDLKDAFFCLPLAPQSQELFAFEWKDPERGISGQLTWTRLPQGFKNSPTLFNEALHRDLTDFRTQHPEVTLLQYVDDLLLAAPTKKACTQGTRHLLQELGEKGYRASAKKAQICQTKVTYLGYILSEGKRWLTPGRIETVARIPPPRNPREVREFLGTAGFCRLWIPGFAELAAPLYALTKPSTPFTWQTEHQLAFEALKKALLSAPALGLPDTSKPFTLFLDERQGIAKGVLTQKLGPWKRPVAYLSKKLDPVAAGWPPCLRIMAATAMLVKDSAKLTLGQPLTVITPHTLEAIVRQPPDRWITNARLTHYQALLLDTDRVQFGPPVTLNPATLLPVPENQPSPHDCRQVLAETHGTREDLKDQELPDADHTWYTDGSSYLDSGTRRAGAAVVDGHNTIWAQSLPPGTSAQKAELIALTKALELSKGKKANIYTDSRYAFATAHTHGSIYERRGWLTSEGKEIKNKAEIIALLKALFLPQEVAIIHCPGHQKGQDPVAVGNRQADRVARQAAMAEVLTLATEPDNTSHITAGKRTADGSEFEKRTADGSEFESPKKKAKVE

SEQ ID NO: 1541 - protein, 2094 aa, synthetic construct
MPAAKRVKLDGGDKKYSIGLDIGTNSVGWAVITDEYKVPSKKFKVLGNTDRHSIKKNLIGALLFDSGETAEATRLKRTARRRYTRRKNRICYLQEIFSNEMAKVDDSFFHRLEESFLVEEDKKHERHPIFGNIVDEVAYHEKYPTIYHLRKKLVDSTDKADLRLIYLALAHMIKFRGHFLIEGDLNPDNSDVDKLFIQLVQTYNQLFEENPINASGVDAKAILSARLSKSRRLENLIAQLPGEKKNGLFGNLIALSLGLTPNFKSNFDLAEDAKLQLSKDTYDDDLDNLLAQIGDQYADLFLAAKNLSDAILLSDILRVNTEITKAPLSASMIKRYDEHHQDLTLLKALVRQQLPEKYKEIFFDQSKNGYAGYIDGGASQEEFYKFIKPILEKMDGTEELLVKLNREDLLRKQRTFDNGSIPHQIHLGELHAILRRQEDFYPFLKDNREKIEKILTFRIPYYVGPLARGNSRFAWMTRKSEETITPWNFEEVVDKGASAQSFIERMTNFDKNLPNEKVLPKHSLLYEYFTVYNELTKVKYVTEGMRKPAFLSGEQKKAIVDLLFKTNRKVTVKQLKEDYFKKIECFDSVEISGVEDRFNASLGTYHDLLKIIKDKDFLDNEENEDILEDIVLTLTLFEDREMIEERLKTYAHLFDDKVMKQLKRRRYTGWGRLSRKLINGIRDKQSGKTILDFLKSDGFANRNFMQLIHDDSLTFKEDIQKAQVSGQGDSLHEHIANLAGSPAIKKGILQTVKVVDELVKVMGRHKPENIVIEMARENQTTQKGQKNSRERMKRIEEGIKELGSQILKEHPVENTQLQNEKLYLYYLQNGRDMYVDQELDINRLSDYDVDHIVPQSFLKDDSIDNKVLTRSDKARGKSDNVPSEEVVKKMKNYWRQLLNAKLITQRKFDNLTKAERGGLSELDKAGFIKRQLVETRQITKHVAQILDSRMNTKYDENDKLIREVKVITLKSKLVSDFRKDFQFYKVREINNYHHAHDAYLNAVVGTALIKKYPKLESEFVYGDYKVYDVRKMIAKSEQEIGKATAKYFFYSNIMNFFKTEITLANGEIRKRPLIETNGETGEIVWDKGRDFATVRKVLSMPQVNIVKKTEVQTGGFSKESILPKRNSDKLIARKKDWDPKKYGGFDSPTVAYSVLVVAKVEKGKSKKLKSVKELLGITIMERSSFEKNPIDFLEAKGYKEVKKDLIIKLPKYSLFELENGRKRMLASAGELQKGNELALPSKYVNFLYLASHYEKLKGSPEDNEQKQLFVEQHKHYLDEIIEQISEFSKRVILADANLDKVLSAYNKHRDKPIREQAENIIHLFTLTNLGAPAAFKYFDTTIDRKRYTSTKEVLDATLIHQSITGLYETRIDLSQLGGDGGGGSGGTVSLQDEHRLFDIPVTTSLPDVWLQDFPQAWAETGGLGRAKCQAPIIIDLKPTAVPVSIKQYPMSLEAHMGIRQHIIKFLELGVLRPCRSPWNTPLLPVKKPGTQDYRPVQDLREINKRTVDIHPTVPNPYNLLSTLKPDYSWYTVLDLKDAFFCLPLAPQSQELFAFEWKDPERGISGQLTWTRLPQGFKNSPTLFNEALHRDLTDFRTQHPEVTLLQYVDDLLLAAPTKKACTQGTRHLLQELGEKGYRASAKKAQICQTKVTYLGYILSEGKRWLTPGRIETVARIPPPRNPREVREFLGTAGFCRLWIPGFAELAAPLYALTKPSTPFTWQTEHQLAFEALKKALLSAPALGLPDTSKPFTLFLDERQGIAKGVLTQKLGPWKRPVAYLSKKLDPVAAGWPPCLRIMAATAMLVKDSAKLTLGQPLTVITPHTLEAIVRQPPDRWITNARLTHYQALLLDTDRVQFGPPVTLNPATLLPVPENQPSPHDCRQVLAETHGTREDLKDQELPDADHTWYTDGSSYLDSGTRRAGAAVVDGHNTIWAQSLPPGTSAQKAELIALTKALELSKGKKANIYTDSRYAFATAHTHGSIYERRGWLTSEGKEIKNKAEIIALLKALFLPQEVAIIHCPGHQKGQDPVAVGNRQADRVARQAAMAEVLTLATEPDNTSHITAGKRTADGSEFEKRTADGSEFESPKKKAKVE

SEQ ID NO: 1542 - protein, 2137 aa, synthetic construct
MPAAKRVKLDGGDKKYSIGLDIGTNSVGWAVITDEYKVPSKKFKVLGNTDRHSIKKNLIGALLFDSGETAEATRLKRTARRRYTRRKNRICYLQEIFSNEMAKVDDSFFHRLEESFLVEEDKKHERHPIFGNIVDEVAYHEKYPTIYHLRKKLVDSTDKADLRLIYLALAHMIKFRGHFLIEGDLNPDNSDVDKLFIQLVQTYNQLFEENPINASGVDAKAILSARLSKSRRLENLIAQLPGEKKNGLFGNLIALSLGLTPNFKSNFDLAEDAKLQLSKDTYDDDLDNLLAQIGDQYADLFLAAKNLSDAILLSDILRVNTEITKAPLSASMIKRYDEHHQDLTLLKALVRQQLPEKYKEIFFDQSKNGYAGYIDGGASQEEFYKFIKPILEKMDGTEELLVKLNREDLLRKQRTFDNGSIPHQIHLGELHAILRRQEDFYPFLKDNREKIEKILTFRIPYYVGPLARGNSRFAWMTRKSEETITPWNFEEVVDKGASAQSFIERMTNFDKNLPNEKVLPKHSLLYEYFTVYNELTKVKYVTEGMRKPAFLSGEQKKAIVDLLFKTNRKVTVKQLKEDYFKKIECFDSVEISGVEDRFNASLGTYHDLLKIIKDKDFLDNEENEDILEDIVLTLTLFEDREMIEERLKTYAHLFDDKVMKQLKRRRYTGWGRLSRKLINGIRDKQSGKTILDFLKSDGFANRNFMQLIHDDSLTFKEDIQKAQVSGQGDSLHEHIANLAGSPAIKKGILQTVKVVDELVKVMGRHKPENIVIEMARENQTTQKGQKNSRERMKRIEEGIKELGSQILKEHPVENTQLQNEKLYLYYLQNGRDMYVDQELDINRLSDYDVDHIVPQSFLKDDSIDNKVLTRSDKARGKSDNVPSEEVVKKMKNYWRQLLNAKLITQRKFDNLTKAERGGLSELDKAGFIKRQLVETRQITKHVAQILDSRMNTKYDENDKLIREVKVITLKSKLVSDFRKDFQFYKVREINNYHHAHDAYLNAVVGTALIKKYPKLESEFVYGDYKVYDVRKMIAKSEQEIGKATAKYFFYSNIMNFFKTEITLANGEIRKRPLIETNGETGEIVWDKGRDFATVRKVLSMPQVNIVKKTEVQTGGFSKESILPKRNSDKLIARKKDWDPKKYGGFDSPTVAYSVLVVAKVEKGKSKKLKSVKELLGITIMERSSFEKNPIDFLEAKGYKEVKKDLIIKLPKYSLFELENGRKRMLASAGELQKGNELALPSKYVNFLYLASHYEKLKGSPEDNEQKQLFVEQHKHYLDEIIEQISEFSKRVILADANLDKVLSAYNKHRDKPIREQAENIIHLFTLTNLGAPAAFKYFDTTIDRKRYTSTKEVLDATLIHQSITGLYETRIDLSQLGGDGGAEAAAKEAAAKEAAAKEAAAKALEAEAAAKEAAAKEAAAKEAAAKAGGTVSLQDEHRLFDIPVTTSLPDVWLQDFPQAWAETGGLGRAKCQAPIIIDLKPTAVPVSIKQYPMSLEAHMGIRQHIIKFLELGVLRPCRSPWNTPLLPVKKPGTQDYRPVQDLREINKRTVDIHPTVPNPYNLLSTLKPDYSWYTVLDLKDAFFCLPLAPQSQELFAFEWKDPERGISGQLTWTRLPQGFKNSPTLFNEALHRDLTDFRTQHPEVTLLQYVDDLLLAAPTKKACTQGTRHLLQELGEKGYRASAKKAQICQTKVTYLGYILSEGKRWLTPGRIETVARIPPPRNPREVREFLGTAGFCRLWIPGFAELAAPLYALTKPSTPFTWQTEHQLAFEALKKALLSAPALGLPDTSKPFTLFLDERQGIAKGVLTQKLGPWKRPVAYLSKKLDPVAAGWPPCLRIMAATAMLVKDSAKLTLGQPLTVITPHTLEAIVRQPPDRWITNARLTHYQALLLDTDRVQFGPPVTLNPATLLPVPENQPSPHDCRQVLAETHGTREDLKDQELPDADHTWYTDGSSYLDSGTRRAGAAVVDGHNTIWAQSLPPGTSAQKAELIALTKALELSKGKKANIYTDSRYAFATAHTHGSIYERRGWLTSEGKEIKNKAEIIALLKALFLPQEVAIIHCPGHQKGQDPVAVGNRQADRVARQAAMAEVLTLATEPDNTSHITAGKRTADGSEFEKRTADGSEFESPKKKAKVE

SEQ ID NO: 1543 - protein, 2116 aa, synthetic construct
MPAAKRVKLDGGDKKYSIGLDIGTNSVGWAVITDEYKVPSKKFKVLGNTDRHSIKKNLIGALLFDSGETAEATRLKRTARRRYTRRKNRICYLQEIFSNEMAKVDDSFFHRLEESFLVEEDKKHERHPIFGNIVDEVAYHEKYPTIYHLRKKLVDSTDKADLRLIYLALAHMIKFRGHFLIEGDLNPDNSDVDKLFIQLVQTYNQLFEENPINASGVDAKAILSARLSKSRRLENLIAQLPGEKKNGLFGNLIALSLGLTPNFKSNFDLAEDAKLQLSKDTYDDDLDNLLAQIGDQYADLFLAAKNLSDAILLSDILRVNTEITKAPLSASMIKRYDEHHQDLTLLKALVRQQLPEKYKEIFFDQSKNGYAGYIDGGASQEEFYKFIKPILEKMDGTEELLVKLNREDLLRKQRTFDNGSIPHQIHLGELHAILRRQEDFYPFLKDNREKIEKILTFRIPYYVGPLARGNSRFAWMTRKSEETITPWNFEEVVDKGASAQSFIERMTNFDKNLPNEKVLPKHSLLYEYFTVYNELTKVKYVTEGMRKPAFLSGEQKKAIVDLLFKTNRKVTVKQLKEDYFKKIECFDSVEISGVEDRFNASLGTYHDLLKIIKDKDFLDNEENEDILEDIVLTLTLFEDREMIEERLKTYAHLFDDKVMKQLKRRRYTGWGRLSRKLINGIRDKQSGKTILDFLKSDGFANRNFMQLIHDDSLTFKEDIQKAQVSGQGDSLHEHIANLAGSPAIKKGILQTVKVVDELVKVMGRHKPENIVIEMARENQTTQKGQKNSRERMKRIEEGIKELGSQILKEHPVENTQLQNEKLYLYYLQNGRDMYVDQELDINRLSDYDVDHIVPQSFLKDDSIDNKVLTRSDKARGKSDNVPSEEVVKKMKNYWRQLLNAKLITQRKFDNLTKAERGGLSELDKAGFIKRQLVETRQITKHVAQILDSRMNTKYDENDKLIREVKVITLKSKLVSDFRKDFQFYKVREINNYHHAHDAYLNAVVGTALIKKYPKLESEFVYGDYKVYDVRKMIAKSEQEIGKATAKYFFYSNIMNFFKTEITLANGEIRKRPLIETNGETGEIVWDKGRDFATVRKVLSMPQVNIVKKTEVQTGGFSKESILPKRNSDKLIARKKDWDPKKYGGFDSPTVAYSVLVVAKVEKGKSKKLKSVKELLGITIMERSSFEKNPIDFLEAKGYKEVKKDLIIKLPKYSLFELENGRKRMLASAGELQKGNELALPSKYVNFLYLASHYEKLKGSPEDNEQKQLFVEQHKHYLDEIIEQISEFSKRVILADANLDKVLSAYNKHRDKPIREQAENIIHLFTLTNLGAPAAFKYFDTTIDRKRYTSTKEVLDATLIHQSITGLYETRIDLSQLGGDGGGGGGSGGGGSGGGGSGGGGSGGGGSGGTVSLQDEHRLFDIPVTTSLPDVWLQDFPQAWAETGGLGRAKCQAPIIIDLKPTAVPVSIKQYPMSLEAHMGIRQHIIKFLELGVLRPCRSPWNTPLLPVKKPGTQDYRPVQDLREINKRTVDIHPTVPNPYNLLSTLKPDYSWYTVLDLKDAFFCLPLAPQSQELFAFEWKDPERGISGQLTWTRLPQGFKNSPTLFNEALHRDLTDFRTQHPEVTLLQYVDDLLLAAPTKKACTQGTRHLLQELGEKGYRASAKKAQICQTKVTYLGYILSEGKRWLTPGRIETVARIPPPRNPREVREFLGTAGFCRLWIPGFAELAAPLYALTKPSTPFTWQTEHQLAFEALKKALLSAPALGLPDTSKPFTLFLDERQGIAKGVLTQKLGPWKRPVAYLSKKLDPVAAGWPPCLRIMAATAMLVKDSAKLTLGQPLTVITPHTLEAIVRQPPDRWITNARLTHYQALLLDTDRVQFGPPVTLNPATLLPVPENQPSPHDCRQVLAETHGTREDLKDQELPDADHTWYTDGSSYLDSGTRRAGAAVVDGHNTIWAQSLPPGTSAQKAELIALTKALELSKGKKANIYTDSRYAFATAHTHGSIYERRGWLTSEGKEIKNKAEIIALLKALFLPQEVAIIHCPGHQKGQDPVAVGNRQADRVARQAAMAEVLTLATEPDNTSHITAGKRTADGSEFEKRTADGSEFESPKKKAKVE

SEQ ID NO: 1544 - protein, 2099 aa, synthetic construct
MPAAKRVKLDGGDKKYSIGLDIGTNSVGWAVITDEYKVPSKKFKVLGNTDRHSIKKNLIGALLFDSGETAEATRLKRTARRRYTRRKNRICYLQEIFSNEMAKVDDSFFHRLEESFLVEEDKKHERHPIFGNIVDEVAYHEKYPTIYHLRKKLVDSTDKADLRLIYLALAHMIKFRGHFLIEGDLNPDNSDVDKLFIQLVQTYNQLFEENPINASGVDAKAILSARLSKSRRLENLIAQLPGEKKNGLFGNLIALSLGLTPNFKSNFDLAEDAKLQLSKDTYDDDLDNLLAQIGDQYADLFLAAKNLSDAILLSDILRVNTEITKAPLSASMIKRYDEHHQDLTLLKALVRQQLPEKYKEIFFDQSKNGYAGYIDGGASQEEFYKFIKPILEKMDGTEELLVKLNREDLLRKQRTFDNGSIPHQIHLGELHAILRRQEDFYPFLKDNREKIEKILTFRIPYYVGPLARGNSRFAWMTRKSEETITPWNFEEVVDKGASAQSFIERMTNFDKNLPNEKVLPKHSLLYEYFTVYNELTKVKYVTEGMRKPAFLSGEQKKAIVDLLFKTNRKVTVKQLKEDYFKKIECFDSVEISGVEDRFNASLGTYHDLLKIIKDKDFLDNEENEDILEDIVLTLTLFEDREMIEERLKTYAHLFDDKVMKQLKRRRYTGWGRLSRKLINGIRDKQSGKTILDFLKSDGFANRNFMQLIHDDSLTFKEDIQKAQVSGQGDSLHEHIANLAGSPAIKKGILQTVKVVDELVKVMGRHKPENIVIEMARENQTTQKGQKNSRERMKRIEEGIKELGSQILKEHPVENTQLQNEKLYLYYLQNGRDMYVDQELDINRLSDYDVDHIVPQSFLKDDSIDNKVLTRSDKARGKSDNVPSEEVVKKMKNYWRQLLNAKLITQRKFDNLTKAERGGLSELDKAGFIKRQLVETRQITKHVAQILDSRMNTKYDENDKLIREVKVITLKSKLVSDFRKDFQFYKVREINNYHHAHDAYLNAVVGTALIKKYPKLESEFVYGDYKVYDVRKMIAKSEQEIGKATAKYFFYSNIMNFFKTEITLANGEIRKRPLIETNGETGEIVWDKGRDFATVRKVLSMPQVNIVKKTEVQTGGFSKESILPKRNSDKLIARKKDWDPKKYGGFDSPTVAYSVLVVAKVEKGKSKKLKSVKELLGITIMERSSFEKNPIDFLEAKGYKEVKKDLIIKLPKYSLFELENGRKRMLASAGELQKGNELALPSKYVNFLYLASHYEKLKGSPEDNEQKQLFVEQHKHYLDEIIEQISEFSKRVILADANLDKVLSAYNKHRDKPIREQAENIIHLFTLTNLGAPAAFKYFDTTIDRKRYTSTKEVLDATLIHQSITGLYETRIDLSQLGGDGGEAAAKPAPGGTVSLQDEHRLFDIPVTTSLPDVWLQDFPQAWAETGGLGRAKCQAPIIIDLKPTAVPVSIKQYPMSLEAHMGIRQHIIKFLELGVLRPCRSPWNTPLLPVKKPGTQDYRPVQDLREINKRTVDIHPTVPNPYNLLSTLKPDYSWYTVLDLKDAFFCLPLAPQSQELFAFEWKDPERGISGQLTWTRLPQGFKNSPTLFNEALHRDLTDFRTQHPEVTLLQYVDDLLLAAPTKKACTQGTRHLLQELGEKGYRASAKKAQICQTKVTYLGYILSEGKRWLTPGRIETVARIPPPRNPREVREFLGTAGFCRLWIPGFAELAAPLYALTKPSTPFTWQTEHQLAFEALKKALLSAPALGLPDTSKPFTLFLDERQGIAKGVLTQKLGPWKRPVAYLSKKLDPVAAGWPPCLRIMAATAMLVKDSAKLTLGQPLTVITPHTLEAIVRQPPDRWITNARLTHYQALLLDTDRVQFGPPVTLNPATLLPVPENQPSPHDCRQVLAETHGTREDLKDQELPDADHTWYTDGSSYLDSGTRRAGAAVVDGHNTIWAQSLPPGTSAQKAELIALTKALELSKGKKANIYTDSRYAFATAHTHGSIYERRGWLTSEGKEIKNKAEIIALLKALFLPQEVAIIHCPGHQKGQDPVAVGNRQADRVARQAAMAEVLTLATEPDNTSHITAGKRTADGSEFEKRTADGSEFESPKKKAKVE

SEQ ID NO: 1545 - protein, 2094 aa, synthetic construct
MPAAKRVKLDGGDKKYSIGLDIGTNSVGWAVITDEYKVPSKKFKVLGNTDRHSIKKNLIGALLFDSGETAEATRLKRTARRRYTRRKNRICYLQEIFSNEMAKVDDSFFHRLEESFLVEEDKKHERHPIFGNIVDEVAYHEKYPTIYHLRKKLVDSTDKADLRLIYLALAHMIKFRGHFLIEGDLNPDNSDVDKLFIQLVQTYNQLFEENPINASGVDAKAILSARLSKSRRLENLIAQLPGEKKNGLFGNLIALSLGLTPNFKSNFDLAEDAKLQLSKDTYDDDLDNLLAQIGDQYADLFLAAKNLSDAILLSDILRVNTEITKAPLSASMIKRYDEHHQDLTLLKALVRQQLPEKYKEIFFDQSKNGYAGYIDGGASQEEFYKFIKPILEKMDGTEELLVKLNREDLLRKQRTFDNGSIPHQIHLGELHAILRRQEDFYPFLKDNREKIEKILTFRIPYYVGPLARGNSRFAWMTRKSEETITPWNFEEVVDKGASAQSFIERMTNFDKNLPNEKVLPKHSLLYEYFTVYNELTKVKYVTEGMRKPAFLSGEQKKAIVDLLFKTNRKVTVKQLKEDYFKKIECFDSVEISGVEDRFNASLGTYHDLLKIIKDKDFLDNEENEDILEDIVLTLTLFEDREMIEERLKTYAHLFDDKVMKQLKRRRYTGWGRLSRKLINGIRDKQSGKTILDFLKSDGFANRNFMQLIHDDSLTFKEDIQKAQVSGQGDSLHEHIANLAGSPAIKKGILQTVKVVDELVKVMGRHKPENIVIEMARENQTTQKGQKNSRERMKRIEEGIKELGSQILKEHPVENTQLQNEKLYLYYLQNGRDMYVDQELDINRLSDYDVDHIVPQSFLKDDSIDNKVLTRSDKARGKSDNVPSEEVVKKMKNYWRQLLNAKLITQRKFDNLTKAERGGLSELDKAGFIKRQLVETRQITKHVAQILDSRMNTKYDENDKLIREVKVITLKSKLVSDFRKDFQFYKVREINNYHHAHDAYLNAVVGTALIKKYPKLESEFVYGDYKVYDVRKMIAKSEQEIGKATAKYFFYSNIMNFFKTEITLANGEIRKRPLIETNGETGEIVWDKGRDFATVRKVLSMPQVNIVKKTEVQTGGFSKESILPKRNSDKLIARKKDWDPKKYGGFDSPTVAYSVLVVAKVEKGKSKKLKSVKELLGITIMERSSFEKNPIDFLEAKGYKEVKKDLIIKLPKYSLFELENGRKRMLASAGELQKGNELALPSKYVNFLYLASHYEKLKGSPEDNEQKQLFVEQHKHYLDEIIEQISEFSKRVILADANLDKVLSAYNKHRDKPIREQAENIIHLFTLTNLGAPAAFKYFDTTIDRKRYTSTKEVLDATLIHQSITGLYETRIDLSQLGGDGGGSSGGTVSLQDEHRLFDIPVTTSLPDVWLQDFPQAWAETGGLGRAKCQAPIIIDLKPTAVPVSIKQYPMSLEAHMGIRQHIIKFLELGVLRPCRSPWNTPLLPVKKPGTQDYRPVQDLREINKRTVDIHPTVPNPYNLLSTLKPDYSWYTVLDLKDAFFCLPLAPQSQELFAFEWKDPERGISGQLTWTRLPQGFKNSPTLFNEALHRDLTDFRTQHPEVTLLQYVDDLLLAAPTKKACTQGTRHLLQELGEKGYRASAKKAQICQTKVTYLGYILSEGKRWLTPGRIETVARIPPPRNPREVREFLGTAGFCRLWIPGFAELAAPLYALTKPSTPFTWQTEHQLAFEALKKALLSAPALGLPDTSKPFTLFLDERQGIAKGVLTQKLGPWKRPVAYLSKKLDPVAAGWPPCLRIMAATAMLVKDSAKLTLGQPLTVITPHTLEAIVRQPPDRWITNARLTHYQALLLDTDRVQFGPPVTLNPATLLPVPENQPSPHDCRQVLAETHGTREDLKDQELPDADHTWYTDGSSYLDSGTRRAGAAVVDGHNTIWAQSLPPGTSAQKAELIALTKALELSKGKKANIYTDSRYAFATAHTHGSIYERRGWLTSEGKEIKNKAEIIALLKALFLPQEVAIIHCPGHQKGQDPVAVGNRQADRVARQAAMAEVLTLATEPDNTSHITAGKRTADGSEFEKRTADGSEFESPKKKAKVE

SEQ ID NO: 1546 - protein, 2116 aa, synthetic construct
MPAAKRVKLDGGDKKYSIGLDIGTNSVGWAVITDEYKVPSKKFKVLGNTDRHSIKKNLIGALLFDSGETAEATRLKRTARRRYTRRKNRICYLQEIFSNEMAKVDDSFFHRLEESFLVEEDKKHERHPIFGNIVDEVAYHEKYPTIYHLRKKLVDSTDKADLRLIYLALAHMIKFRGHFLIEGDLNPDNSDVDKLFIQLVQTYNQLFEENPINASGVDAKAILSARLSKSRRLENLIAQLPGEKKNGLFGNLIALSLGLTPNFKSNFDLAEDAKLQLSKDTYDDDLDNLLAQIGDQYADLFLAAKNLSDAILLSDILRVNTEITKAPLSASMIKRYDEHHQDLTLLKALVRQQLPEKYKEIFFDQSKNGYAGYIDGGASQEEFYKFIKPILEKMDGTEELLVKLNREDLLRKQRTFDNGSIPHQIHLGELHAILRRQEDFYPFLKDNREKIEKILTFRIPYYVGPLARGNSRFAWMTRKSEETITPWNFEEVVDKGASAQSFIERMTNFDKNLPNEKVLPKHSLLYEYFTVYNELTKVKYVTEGMRKPAFLSGEQKKAIVDLLFKTNRKVTVKQLKEDYFKKIECFDSVEISGVEDRFNASLGTYHDLLKIIKDKDFLDNEENEDILEDIVLTLTLFEDREMIEERLKTYAHLFDDKVMKQLKRRRYTGWGRLSRKLINGIRDKQSGKTILDFLKSDGFANRNFMQLIHDDSLTFKEDIQKAQVSGQGDSLHEHIANLAGSPAIKKGILQTVKVVDELVKVMGRHKPENIVIEMARENQTTQKGQKNSRERMKRIEEGIKELGSQILKEHPVENTQLQNEKLYLYYLQNGRDMYVDQELDINRLSDYDVDHIVPQSFLKDDSIDNKVLTRSDKARGKSDNVPSEEVVKKMKNYWRQLLNAKLITQRKFDNLTKAERGGLSELDKAGFIKRQLVETRQITKHVAQILDSRMNTKYDENDKLIREVKVITLKSKLVSDFRKDFQFYKVREINNYHHAHDAYLNAVVGTALIKKYPKLESEFVYGDYKVYDVRKMIAKSEQEIGKATAKYFFYSNIMNFFKTEITLANGEIRKRPLIETNGETGEIVWDKGRDFATVRKVLSMPQVNIVKKTEVQTGGFSKESILPKRNSDKLIARKKDWDPKKYGGFDSPTVAYSVLVVAKVEKGKSKKLKSVKELLGITIMERSSFEKNPIDFLEAKGYKEVKKDLIIKLPKYSLFELENGRKRMLASAGELQKGNELALPSKYVNFLYLASHYEKLKGSPEDNEQKQLFVEQHKHYLDEIIEQISEFSKRVILADANLDKVLSAYNKHRDKPIREQAENIIHLFTLTNLGAPAAFKYFDTTIDRKRYTSTKEVLDATLIHQSITGLYETRIDLSQLGGDGGEAAAKEAAAKEAAAKEAAAKEAAAKGGTVSLQDEHRLFDIPVTTSLPDVWLQDFPQAWAETGGLGRAKCQAPIIIDLKPTAVPVSIKQYPMSLEAHMGIRQHIIKFLELGVLRPCRSPWNTPLLPVKKPGTQDYRPVQDLREINKRTVDIHPTVPNPYNLLSTLKPDYSWYTVLDLKDAFFCLPLAPQSQELFAFEWKDPERGISGQLTWTRLPQGFKNSPTLFNEALHRDLTDFRTQHPEVTLLQYVDDLLLAAPTKKACTQGTRHLLQELGEKGYRASAKKAQICQTKVTYLGYILSEGKRWLTPGRIETVARIPPPRNPREVREFLGTAGFCRLWIPGFAELAAPLYALTKPSTPFTWQTEHQLAFEALKKALLSAPALGLPDTSKPFTLFLDERQGIAKGVLTQKLGPWKRPVAYLSKKLDPVAAGWPPCLRIMAATAMLVKDSAKLTLGQPLTVITPHTLEAIVRQPPDRWITNARLTHYQALLLDTDRVQFGPPVTLNPATLLPVPENQPSPHDCRQVLAETHGTREDLKDQELPDADHTWYTDGSSYLDSGTRRAGAAVVDGHNTIWAQSLPPGTSAQKAELIALTKALELSKGKKANIYTDSRYAFATAHTHGSIYERRGWLTSEGKEIKNKAEIIALLKALFLPQEVAIIHCPGHQKGQDPVAVGNRQADRVARQAAMAEVLTLATEPDNTSHITAGKRTADGSEFEKRTADGSEFESPKKKAKVE

SEQ ID NO: 1547 - protein, 2099 aa, synthetic construct
MPAAKRVKLDGGDKKYSIGLDIGTNSVGWAVITDEYKVPSKKFKVLGNTDRHSIKKNLIGALLFDSGETAEATRLKRTARRRYTRRKNRICYLQEIFSNEMAKVDDSFFHRLEESFLVEEDKKHERHPIFGNIVDEVAYHEKYPTIYHLRKKLVDSTDKADLRLIYLALAHMIKFRGHFLIEGDLNPDNSDVDKLFIQLVQTYNQLFEENPINASGVDAKAILSARLSKSRRLENLIAQLPGEKKNGLFGNLIALSLGLTPNFKSNFDLAEDAKLQLSKDTYDDDLDNLLAQIGDQYADLFLAAKNLSDAILLSDILRVNTEITKAPLSASMIKRYDEHHQDLTLLKALVRQQLPEKYKEIFFDQSKNGYAGYIDGGASQEEFYKFIKPILEKMDGTEELLVKLNREDLLRKQRTFDNGSIPHQIHLGELHAILRRQEDFYPFLKDNREKIEKILTFRIPYYVGPLARGNSRFAWMTRKSEETITPWNFEEVVDKGASAQSFIERMTNFDKNLPNEKVLPKHSLLYEYFTVYNELTKVKYVTEGMRKPAFLSGEQKKAIVDLLFKTNRKVTVKQLKEDYFKKIECFDSVEISGVEDRFNASLGTYHDLLKIIKDKDFLDNEENEDILEDIVLTLTLFEDREMIEERLKTYAHLFDDKVMKQLKRRRYTGWGRLSRKLINGIRDKQSGKTILDFLKSDGFANRNFMQLIHDDSLTFKEDIQKAQVSGQGDSLHEHIANLAGSPAIKKGILQTVKVVDELVKVMGRHKPENIVIEMARENQTTQKGQKNSRERMKRIEEGIKELGSQILKEHPVENTQLQNEKLYLYYLQNGRDMYVDQELDINRLSDYDVDHIVPQSFLKDDSIDNKVLTRSDKARGKSDNVPSEEVVKKMKNYWRQLLNAKLITQRKFDNLTKAERGGLSELDKAGFIKRQLVETRQITKHVAQILDSRMNTKYDENDKLIREVKVITLKSKLVSDFRKDFQFYKVREINNYHHAHDAYLNAVVGTALIKKYPKLESEFVYGDYKVYDVRKMIAKSEQEIGKATAKYFFYSNIMNFFKTEITLANGEIRKRPLIETNGETGEIVWDKGRDFATVRKVLSMPQVNIVKKTEVQTGGFSKESILPKRNSDKLIARKKDWDPKKYGGFDSPTVAYSVLVVAKVEKGKSKKLKSVKELLGITIMERSSFEKNPIDFLEAKGYKEVKKDLIIKLPKYSLFELENGRKRMLASAGELQKGNELALPSKYVNFLYLASHYEKLKGSPEDNEQKQLFVEQHKHYLDEIIEQISEFSKRVILADANLDKVLSAYNKHRDKPIREQAENIIHLFTLTNLGAPAAFKYFDTTIDRKRYTSTKEVLDATLIHQSITGLYETRIDLSQLGGDGGEAAAKGGGGGTVSLQDEHRLFDIPVTTSLPDVWLQDFPQAWAETGGLGRAKCQAPIIIDLKPTAVPVSIKQYPMSLEAHMGIRQHIIKFLELGVLRPCRSPWNTPLLPVKKPGTQDYRPVQDLREINKRTVDIHPTVPNPYNLLSTLKPDYSWYTVLDLKDAFFCLPLAPQSQELFAFEWKDPERGISGQLTWTRLPQGFKNSPTLFNEALHRDLTDFRTQHPEVTLLQYVDDLLLAAPTKKACTQGTRHLLQELGEKGYRASAKKAQICQTKVTYLGYILSEGKRWLTPGRIETVARIPPPRNPREVREFLGTAGFCRLWIPGFAELAAPLYALTKPSTPFTWQTEHQLAFEALKKALLSAPALGLPDTSKPFTLFLDERQGIAKGVLTQKLGPWKRPVAYLSKKLDPVAAGWPPCLRIMAATAMLVKDSAKLTLGQPLTVITPHTLEAIVRQPPDRWITNARLTHYQALLLDTDRVQFGPPVTLNPATLLPVPENQPSPHDCRQVLAETHGTREDLKDQELPDADHTWYTDGSSYLDSGTRRAGAAVVDGHNTIWAQSLPPGTSAQKAELIALTKALELSKGKKANIYTDSRYAFATAHTHGSIYERRGWLTSEGKEIKNKAEIIALLKALFLPQEVAIIHCPGHQKGQDPVAVGNRQADRVARQAAMAEVLTLATEPDNTSHITAGKRTADGSEFEKRTADGSEFESPKKKAKVE

SEQ ID NO: 1548 - protein, 2097 aa, synthetic construct
MPAAKRVKLDGGDKKYSIGLDIGTNSVGWAVITDEYKVPSKKFKVLGNTDRHSIKKNLIGALLFDSGETAEATRLKRTARRRYTRRKNRICYLQEIFSNEMAKVDDSFFHRLEESFLVEEDKKHERHPIFGNIVDEVAYHEKYPTIYHLRKKLVDSTDKADLRLIYLALAHMIKFRGHFLIEGDLNPDNSDVDKLFIQLVQTYNQLFEENPINASGVDAKAILSARLSKSRRLENLIAQLPGEKKNGLFGNLIALSLGLTPNFKSNFDLAEDAKLQLSKDTYDDDLDNLLAQIGDQYADLFLAAKNLSDAILLSDILRVNTEITKAPLSASMIKRYDEHHQDLTLLKALVRQQLPEKYKEIFFDQSKNGYAGYIDGGASQEEFYKFIKPILEKMDGTEELLVKLNREDLLRKQRTFDNGSIPHQIHLGELHAILRRQEDFYPFLKDNREKIEKILTFRIPYYVGPLARGNSRFAWMTRKSEETITPWNFEEVVDKGASAQSFIERMTNFDKNLPNEKVLPKHSLLYEYFTVYNELTKVKYVTEGMRKPAFLSGEQKKAIVDLLFKTNRKVTVKQLKEDYFKKIECFDSVEISGVEDRFNASLGTYHDLLKIIKDKDFLDNEENEDILEDIVLTLTLFEDREMIEERLKTYAHLFDDKVMKQLKRRRYTGWGRLSRKLINGIRDKQSGKTILDFLKSDGFANRNFMQLIHDDSLTFKEDIQKAQVSGQGDSLHEHIANLAGSPAIKKGILQTVKVVDELVKVMGRHKPENIVIEMARENQTTQKGQKNSRERMKRIEEGIKELGSQILKEHPVENTQLQNEKLYLYYLQNGRDMYVDQELDINRLSDYDVDHIVPQSFLKDDSIDNKVLTRSDKARGKSDNVPSEEVVKKMKNYWRQLLNAKLITQRKFDNLTKAERGGLSELDKAGFIKRQLVETRQITKHVAQILDSRMNTKYDENDKLIREVKVITLKSKLVSDFRKDFQFYKVREINNYHHAHDAYLNAVVGTALIKKYPKLESEFVYGDYKVYDVRKMIAKSEQEIGKATAKYFFYSNIMNFFKTEITLANGEIRKRPLIETNGETGEIVWDKGRDFATVRKVLSMPQVNIVKKTEVQTGGFSKESILPKRNSDKLIARKKDWDPKKYGGFDSPTVAYSVLVVAKVEKGKSKKLKSVKELLGITIMERSSFEKNPIDFLEAKGYKEVKKDLIIKLPKYSLFELENGRKRMLASAGELQKGNELALPSKYVNFLYLASHYEKLKGSPEDNEQKQLFVEQHKHYLDEIIEQISEFSKRVILADANLDKVLSAYNKHRDKPIREQAENIIHLFTLTNLGAPAAFKYFDTTIDRKRYTSTKEVLDATLIHQSITGLYETRIDLSQLGGDGGGSSGGGGGTVSLQDEHRLFDIPVTTSLPDVWLQDFPQAWAETGGLGRAKCQAPIIIDLKPTAVPVSIKQYPMSLEAHMGIRQHIIKFLELGVLRPCRSPWNTPLLPVKKPGTQDYRPVQDLREINKRTVDIHPTVPNPYNLLSTLKPDYSWYTVLDLKDAFFCLPLAPQSQELFAFEWKDPERGISGQLTWTRLPQGFKNSPTLFNEALHRDLTDFRTQHPEVTLLQYVDDLLLAAPTKKACTQGTRHLLQELGEKGYRASAKKAQICQTKVTYLGYILSEGKRWLTPGRIETVARIPPPRNPREVREFLGTAGFCRLWIPGFAELAAPLYALTKPSTPFTWQTEHQLAFEALKKALLSAPALGLPDTSKPFTLFLDERQGIAKGVLTQKLGPWKRPVAYLSKKLDPVAAGWPPCLRIMAATAMLVKDSAKLTLGQPLTVITPHTLEAIVRQPPDRWITNARLTHYQALLLDTDRVQFGPPVTLNPATLLPVPENQPSPHDCRQVLAETHGTREDLKDQELPDADHTWYTDGSSYLDSGTRRAGAAVVDGHNTIWAQSLPPGTSAQKAELIALTKALELSKGKKANIYTDSRYAFATAHTHGSIYERRGWLTSEGKEIKNKAEIIALLKALFLPQEVAIIHCPGHQKGQDPVAVGNRQADRVARQAAMAEVLTLATEPDNTSHITAGKRTADGSEFEKRTADGSEFESPKKKAKVE

SEQ ID NO: 1549 - protein, 2102 aa, synthetic construct
MPAAKRVKLDGGDKKYSIGLDIGTNSVGWAVITDEYKVPSKKFKVLGNTDRHSIKKNLIGALLFDSGETAEATRLKRTARRRYTRRKNRICYLQEIFSNEMAKVDDSFFHRLEESFLVEEDKKHERHPIFGNIVDEVAYHEKYPTIYHLRKKLVDSTDKADLRLIYLALAHMIKFRGHFLIEGDLNPDNSDVDKLFIQLVQTYNQLFEENPINASGVDAKAILSARLSKSRRLENLIAQLPGEKKNGLFGNLIALSLGLTPNFKSNFDLAEDAKLQLSKDTYDDDLDNLLAQIGDQYADLFLAAKNLSDAILLSDILRVNTEITKAPLSASMIKRYDEHHQDLTLLKALVRQQLPEKYKEIFFDQSKNGYAGYIDGGASQEEFYKFIKPILEKMDGTEELLVKLNREDLLRKQRTFDNGSIPHQIHLGELHAILRRQEDFYPFLKDNREKIEKILTFRIPYYVGPLARGNSRFAWMTRKSEETITPWNFEEVVDKGASAQSFIERMTNFDKNLPNEKVLPKHSLLYEYFTVYNELTKVKYVTEGMRKPAFLSGEQKKAIVDLLFKTNRKVTVKQLKEDYFKKIECFDSVEISGVEDRFNASLGTYHDLLKIIKDKDFLDNEENEDILEDIVLTLTLFEDREMIEERLKTYAHLFDDKVMKQLKRRRYTGWGRLSRKLINGIRDKQSGKTILDFLKSDGFANRNFMQLIHDDSLTFKEDIQKAQVSGQGDSLHEHIANLAGSPAIKKGILQTVKVVDELVKVMGRHKPENIVIEMARENQTTQKGQKNSRERMKRIEEGIKELGSQILKEHPVENTQLQNEKLYLYYLQNGRDMYVDQELDINRLSDYDVDHIVPQSFLKDDSIDNKVLTRSDKARGKSDNVPSEEVVKKMKNYWRQLLNAKLITQRKFDNLTKAERGGLSELDKAGFIKRQLVETRQITKHVAQILDSRMNTKYDENDKLIREVKVITLKSKLVSDFRKDFQFYKVREINNYHHAHDAYLNAVVGTALIKKYPKLESEFVYGDYKVYDVRKMIAKSEQEIGKATAKYFFYSNIMNFFKTEITLANGEIRKRPLIETNGETGEIVWDKGRDFATVRKVLSMPQVNIVKKTEVQTGGFSKESILPKRNSDKLIARKKDWDPKKYGGFDSPTVAYSVLVVAKVEKGKSKKLKSVKELLGITIMERSSFEKNPIDFLEAKGYKEVKKDLIIKLPKYSLFELENGRKRMLASAGELQKGNELALPSKYVNFLYLASHYEKLKGSPEDNEQKQLFVEQHKHYLDEIIEQISEFSKRVILADANLDKVLSAYNKHRDKPIREQAENIIHLFTLTNLGAPAAFKYFDTTIDRKRYTSTKEVLDATLIHQSITGLYETRIDLSQLGGDGGGGSGSSEAAAKGGTVSLQDEHRLFDIPVTTSLPDVWLQDFPQAWAETGGLGRAKCQAPIIIDLKPTAVPVSIKQYPMSLEAHMGIRQHIIKFLELGVLRPCRSPWNTPLLPVKKPGTQDYRPVQDLREINKRTVDIHPTVPNPYNLLSTLKPDYSWYTVLDLKDAFFCLPLAPQSQELFAFEWKDPERGISGQLTWTRLPQGFKNSPTLFNEALHRDLTDFRTQHPEVTLLQYVDDLLLAAPTKKACTQGTRHLLQELGEKGYRASAKKAQICQTKVTYLGYILSEGKRWLTPGRIETVARIPPPRNPREVREFLGTAGFCRLWIPGFAELAAPLYALTKPSTPFTWQTEHQLAFEALKKALLSAPALGLPDTSKPFTLFLDERQGIAKGVLTQKLGPWKRPVAYLSKKLDPVAAGWPPCLRIMAATAMLVKDSAKLTLGQPLTVITPHTLEAIVRQPPDRWITNARLTHYQALLLDTDRVQFGPPVTLNPATLLPVPENQPSPHDCRQVLAETHGTREDLKDQELPDADHTWYTDGSSYLDSGTRRAGAAVVDGHNTIWAQSLPPGTSAQKAELIALTKALELSKGKKANIYTDSRYAFATAHTHGSIYERRGWLTSEGKEIKNKAEIIALLKALFLPQEVAIIHCPGHQKGQDPVAVGNRQADRVARQAAMAEVLTLATEPDNTSHITAGKRTADGSEFEKRTADGSEFESPKKKAKVE

SEQ ID NO: 1550 - protein, 2100 aa, synthetic construct
MPAAKRVKLDGGDKKYSIGLDIGTNSVGWAVITDEYKVPSKKFKVLGNTDRHSIKKNLIGALLFDSGETAEATRLKRTARRRYTRRKNRICYLQEIFSNEMAKVDDSFFHRLEESFLVEEDKKHERHPIFGNIVDEVAYHEKYPTIYHLRKKLVDSTDKADLRLIYLALAHMIKFRGHFLIEGDLNPDNSDVDKLFIQLVQTYNQLFEENPINASGVDAKAILSARLSKSRRLENLIAQLPGEKKNGLFGNLIALSLGLTPNFKSNFDLAEDAKLQLSKDTYDDDLDNLLAQIGDQYADLFLAAKNLSDAILLSDILRVNTEITKAPLSASMIKRYDEHHQDLTLLKALVRQQLPEKYKEIFFDQSKNGYAGYIDGGASQEEFYKFIKPILEKMDGTEELLVKLNREDLLRKQRTFDNGSIPHQIHLGELHAILRRQEDFYPFLKDNREKIEKILTFRIPYYVGPLARGNSRFAWMTRKSEETITPWNFEEVVDKGASAQSFIERMTNFDKNLPNEKVLPKHSLLYEYFTVYNELTKVKYVTEGMRKPAFLSGEQKKAIVDLLFKTNRKVTVKQLKEDYFKKIECFDSVEISGVEDRFNASLGTYHDLLKIIKDKDFLDNEENEDILEDIVLTLTLFEDREMIEERLKTYAHLFDDKVMKQLKRRRYTGWGRLSRKLINGIRDKQSGKTILDFLKSDGFANRNFMQLIHDDSLTFKEDIQKAQVSGQGDSLHEHIANLAGSPAIKKGILQTVKVVDELVKVMGRHKPENIVIEMARENQTTQKGQKNSRERMKRIEEGIKELGSQILKEHPVENTQLQNEKLYLYYLQNGRDMYVDQELDINRLSDYDVDHIVPQSFLKDDSIDNKVLTRSDKARGKSDNVPSEEVVKKMKNYWRQLLNAKLITQRKFDNLTKAERGGLSELDKAGFIKRQLVETRQITKHVAQILDSRMNTKYDENDKLIREVKVITLKSKLVSDFRKDFQFYKVREINNYHHAHDAYLNAVVGTALIKKYPKLESEFVYGDYKVYDVRKMIAKSEQEIGKATAKYFFYSNIMNFFKTEITLANGEIRKRPLIETNGETGEIVWDKGRDFATVRKVLSMPQVNIVKKTEVQTGGFSKESILPKRNSDKLIARKKDWDPKKYGGFDSPTVAYSVLVVAKVEKGKSKKLKSVKELLGITIMERSSFEKNPIDFLEAKGYKEVKKDLIIKLPKYSLFELENGRKRMLASAGELQKGNELALPSKYVNFLYLASHYEKLKGSPEDNEQKQLFVEQHKHYLDEIIEQISEFSKRVILADANLDKVLSAYNKHRDKPIREQAENIIHLFTLTNLGAPAAFKYFDTTIDRKRYTSTKEVLDATLIHQSITGLYETRIDLSQLGGDGGGGSGSSGGGGGTVSLQDEHRLFDIPVTTSLPDVWLQDFPQAWAETGGLGRAKCQAPIIIDLKPTAVPVSIKQYPMSLEAHMGIRQHIIKFLELGVLRPCRSPWNTPLLPVKKPGTQDYRPVQDLREINKRTVDIHPTVPNPYNLLSTLKPDYSWYTVLDLKDAFFCLPLAPQSQELFAFEWKDPERGISGQLTWTRLPQGFKNSPTLFNEALHRDLTDFRTQHPEVTLLQYVDDLLLAAPTKKACTQGTRHLLQELGEKGYRASAKKAQICQTKVTYLGYILSEGKRWLTPGRIETVARIPPPRNPREVREFLGTAGFCRLWIPGFAELAAPLYALTKPSTPFTWQTEHQLAFEALKKALLSAPALGLPDTSKPFTLFLDERQGIAKGVLTQKLGPWKRPVAYLSKKLDPVAAGWPPCLRIMAATAMLVKDSAKLTLGQPLTVITPHTLEAIVRQPPDRWITNARLTHYQALLLDTDRVQFGPPVTLNPATLLPVPENQPSPHDCRQVLAETHGTREDLKDQELPDADHTWYTDGSSYLDSGTRRAGAAVVDGHNTIWAQSLPPGTSAQKAELIALTKALELSKGKKANIYTDSRYAFATAHTHGSIYERRGWLTSEGKEIKNKAEIIALLKALFLPQEVAIIHCPGHQKGQDPVAVGNRQADRVARQAAMAEVLTLATEPDNTSHITAGKRTADGSEFEKRTADGSEFESPKKKAKVE

SEQ ID NO: 1551 - protein, 2100 aa, synthetic construct
MPAAKRVKLDGGDKKYSIGLDIGTNSVGWAVITDEYKVPSKKFKVLGNTDRHSIKKNLIGALLFDSGETAEATRLKRTARRRYTRRKNRICYLQEIFSNEMAKVDDSFFHRLEESFLVEEDKKHERHPIFGNIVDEVAYHEKYPTIYHLRKKLVDSTDKADLRLIYLALAHMIKFRGHFLIEGDLNPDNSDVDKLFIQLVQTYNQLFEENPINASGVDAKAILSARLSKSRRLENLIAQLPGEKKNGLFGNLIALSLGLTPNFKSNFDLAEDAKLQLSKDTYDDDLDNLLAQIGDQYADLFLAAKNLSDAILLSDILRVNTEITKAPLSASMIKRYDEHHQDLTLLKALVRQQLPEKYKEIFFDQSKNGYAGYIDGGASQEEFYKFIKPILEKMDGTEELLVKLNREDLLRKQRTFDNGSIPHQIHLGELHAILRRQEDFYPFLKDNREKIEKILTFRIPYYVGPLARGNSRFAWMTRKSEETITPWNFEEVVDKGASAQSFIERMTNFDKNLPNEKVLPKHSLLYEYFTVYNELTKVKYVTEGMRKPAFLSGEQKKAIVDLLFKTNRKVTVKQLKEDYFKKIECFDSVEISGVEDRFNASLGTYHDLLKIIKDKDFLDNEENEDILEDIVLTLTLFEDREMIEERLKTYAHLFDDKVMKQLKRRRYTGWGRLSRKLINGIRDKQSGKTILDFLKSDGFANRNFMQLIHDDSLTFKEDIQKAQVSGQGDSLHEHIANLAGSPAIKKGILQTVKVVDELVKVMGRHKPENIVIEMARENQTTQKGQKNSRERMKRIEEGIKELGSQILKEHPVENTQLQNEKLYLYYLQNGRDMYVDQELDINRLSDYDVDHIVPQSFLKDDSIDNKVLTRSDKARGKSDNVPSEEVVKKMKNYWRQLLNAKLITQRKFDNLTKAERGGLSELDKAGFIKRQLVETRQITKHVAQILDSRMNTKYDENDKLIREVKVITLKSKLVSDFRKDFQFYKVREINNYHHAHDAYLNAVVGTALIKKYPKLESEFVYGDYKVYDVRKMIAKSEQEIGKATAKYFFYSNIMNFFKTEITLANGEIRKRPLIETNGETGEIVWDKGRDFATVRKVLSMPQVNIVKKTEVQTGGFSKESILPKRNSDKLIARKKDWDPKKYGGFDSPTVAYSVLVVAKVEKGKSKKLKSVKELLGITIMERSSFEKNPIDFLEAKGYKEVKKDLIIKLPKYSLFELENGRKRMLASAGELQKGNELALPSKYVNFLYLASHYEKLKGSPEDNEQKQLFVEQHKHYLDEIIEQISEFSKRVILADANLDKVLSAYNKHRDKPIREQAENIIHLFTLTNLGAPAAFKYFDTTIDRKRYTSTKEVLDATLIHQSITGLYETRIDLSQLGGDGGGGSGSSPAPGGTVSLQDEHRLFDIPVTTSLPDVWLQDFPQAWAETGGLGRAKCQAPIIIDLKPTAVPVSIKQYPMSLEAHMGIRQHIIKFLELGVLRPCRSPWNTPLLPVKKPGTQDYRPVQDLREINKRTVDIHPTVPNPYNLLSTLKPDYSWYTVLDLKDAFFCLPLAPQSQELFAFEWKDPERGISGQLTWTRLPQGFKNSPTLFNEALHRDLTDFRTQHPEVTLLQYVDDLLLAAPTKKACTQGTRHLLQELGEKGYRASAKKAQICQTKVTYLGYILSEGKRWLTPGRIETVARIPPPRNPREVREFLGTAGFCRLWIPGFAELAAPLYALTKPSTPFTWQTEHQLAFEALKKALLSAPALGLPDTSKPFTLFLDERQGIAKGVLTQKLGPWKRPVAYLSKKLDPVAAGWPPCLRIMAATAMLVKDSAKLTLGQPLTVITPHTLEAIVRQPPDRWITNARLTHYQALLLDTDRVQFGPPVTLNPATLLPVPENQPSPHDCRQVLAETHGTREDLKDQELPDADHTWYTDGSSYLDSGTRRAGAAVVDGHNTIWAQSLPPGTSAQKAELIALTKALELSKGKKANIYTDSRYAFATAHTHGSIYERRGWLTSEGKEIKNKAEIIALLKALFLPQEVAIIHCPGHQKGQDPVAVGNRQADRVARQAAMAEVLTLATEPDNTSHITAGKRTADGSEFEKRTADGSEFESPKKKAKVE

SEQ ID NO: 1552 - protein, 2111 aa, synthetic construct
MPAAKRVKLDGGDKKYSIGLDIGTNSVGWAVITDEYKVPSKKFKVLGNTDRHSIKKNLIGALLFDSGETAEATRLKRTARRRYTRRKNRICYLQEIFSNEMAKVDDSFFHRLEESFLVEEDKKHERHPIFGNIVDEVAYHEKYPTIYHLRKKLVDSTDKADLRLIYLALAHMIKFRGHFLIEGDLNPDNSDVDKLFIQLVQTYNQLFEENPINASGVDAKAILSARLSKSRRLENLIAQLPGEKKNGLFGNLIALSLGLTPNFKSNFDLAEDAKLQLSKDTYDDDLDNLLAQIGDQYADLFLAAKNLSDAILLSDILRVNTEITKAPLSASMIKRYDEHHQDLTLLKALVRQQLPEKYKEIFFDQSKNGYAGYIDGGASQEEFYKFIKPILEKMDGTEELLVKLNREDLLRKQRTFDNGSIPHQIHLGELHAILRRQEDFYPFLKDNREKIEKILTFRIPYYVGPLARGNSRFAWMTRKSEETITPWNFEEVVDKGASAQSFIERMTNFDKNLPNEKVLPKHSLLYEYFTVYNELTKVKYVTEGMRKPAFLSGEQKKAIVDLLFKTNRKVTVKQLKEDYFKKIECFDSVEISGVEDRFNASLGTYHDLLKIIKDKDFLDNEENEDILEDIVLTLTLFEDREMIEERLKTYAHLFDDKVMKQLKRRRYTGWGRLSRKLINGIRDKQSGKTILDFLKSDGFANRNFMQLIHDDSLTFKEDIQKAQVSGQGDSLHEHIANLAGSPAIKKGILQTVKVVDELVKVMGRHKPENIVIEMARENQTTQKGQKNSRERMKRIEEGIKELGSQILKEHPVENTQLQNEKLYLYYLQNGRDMYVDQELDINRLSDYDVDHIVPQSFLKDDSIDNKVLTRSDKARGKSDNVPSEEVVKKMKNYWRQLLNAKLITQRKFDNLTKAERGGLSELDKAGFIKRQLVETRQITKHVAQILDSRMNTKYDENDKLIREVKVITLKSKLVSDFRKDFQFYKVREINNYHHAHDAYLNAVVGTALIKKYPKLESEFVYGDYKVYDVRKMIAKSEQEIGKATAKYFFYSNIMNFFKTEITLANGEIRKRPLIETNGETGEIVWDKGRDFATVRKVLSMPQVNIVKKTEVQTGGFSKESILPKRNSDKLIARKKDWDPKKYGGFDSPTVAYSVLVVAKVEKGKSKKLKSVKELLGITIMERSSFEKNPIDFLEAKGYKEVKKDLIIKLPKYSLFELENGRKRMLASAGELQKGNELALPSKYVNFLYLASHYEKLKGSPEDNEQKQLFVEQHKHYLDEIIEQISEFSKRVILADANLDKVLSAYNKHRDKPIREQAENIIHLFTLTNLGAPAAFKYFDTTIDRKRYTSTKEVLDATLIHQSITGLYETRIDLSQLGGDGGGGGGSGGGGSGGGGSGGGGSGGTVSLQDEHRLFDIPVTTSLPDVWLQDFPQAWAETGGLGRAKCQAPIIIDLKPTAVPVSIKQYPMSLEAHMGIRQHIIKFLELGVLRPCRSPWNTPLLPVKKPGTQDYRPVQDLREINKRTVDIHPTVPNPYNLLSTLKPDYSWYTVLDLKDAFFCLPLAPQSQELFAFEWKDPERGISGQLTWTRLPQGFKNSPTLFNEALHRDLTDFRTQHPEVTLLQYVDDLLLAAPTKKACTQGTRHLLQELGEKGYRASAKKAQICQTKVTYLGYILSEGKRWLTPGRIETVARIPPPRNPREVREFLGTAGFCRLWIPGFAELAAPLYALTKPSTPFTWQTEHQLAFEALKKALLSAPALGLPDTSKPFTLFLDERQGIAKGVLTQKLGPWKRPVAYLSKKLDPVAAGWPPCLRIMAATAMLVKDSAKLTLGQPLTVITPHTLEAIVRQPPDRWITNARLTHYQALLLDTDRVQFGPPVTLNPATLLPVPENQPSPHDCRQVLAETHGTREDLKDQELPDADHTWYTDGSSYLDSGTRRAGAAVVDGHNTIWAQSLPPGTSAQKAELIALTKALELSKGKKANIYTDSRYAFATAHTHGSIYERRGWLTSEGKEIKNKAEIIALLKALFLPQEVAIIHCPGHQKGQDPVAVGNRQADRVARQAAMAEVLTLATEPDNTSHITAGKRTADGSEFEKRTADGSEFESPKKKAKVE

SEQ ID NO: 1553 - protein, 2106 aa, synthetic construct
MPAAKRVKLDGGDKKYSIGLDIGTNSVGWAVITDEYKVPSKKFKVLGNTDRHSIKKNLIGALLFDSGETAEATRLKRTARRRYTRRKNRICYLQEIFSNEMAKVDDSFFHRLEESFLVEEDKKHERHPIFGNIVDEVAYHEKYPTIYHLRKKLVDSTDKADLRLIYLALAHMIKFRGHFLIEGDLNPDNSDVDKLFIQLVQTYNQLFEENPINASGVDAKAILSARLSKSRRLENLIAQLPGEKKNGLFGNLIALSLGLTPNFKSNFDLAEDAKLQLSKDTYDDDLDNLLAQIGDQYADLFLAAKNLSDAILLSDILRVNTEITKAPLSASMIKRYDEHHQDLTLLKALVRQQLPEKYKEIFFDQSKNGYAGYIDGGASQEEFYKFIKPILEKMDGTEELLVKLNREDLLRKQRTFDNGSIPHQIHLGELHAILRRQEDFYPFLKDNREKIEKILTFRIPYYVGPLARGNSRFAWMTRKSEETITPWNFEEVVDKGASAQSFIERMTNFDKNLPNEKVLPKHSLLYEYFTVYNELTKVKYVTEGMRKPAFLSGEQKKAIVDLLFKTNRKVTVKQLKEDYFKKIECFDSVEISGVEDRFNASLGTYHDLLKIIKDKDFLDNEENEDILEDIVLTLTLFEDREMIEERLKTYAHLFDDKVMKQLKRRRYTGWGRLSRKLINGIRDKQSGKTILDFLKSDGFANRNFMQLIHDDSLTFKEDIQKAQVSGQGDSLHEHIANLAGSPAIKKGILQTVKVVDELVKVMGRHKPENIVIEMARENQTTQKGQKNSRERMKRIEEGIKELGSQILKEHPVENTQLQNEKLYLYYLQNGRDMYVDQELDINRLSDYDVDHIVPQSFLKDDSIDNKVLTRSDKARGKSDNVPSEEVVKKMKNYWRQLLNAKLITQRKFDNLTKAERGGLSELDKAGFIKRQLVETRQITKHVAQILDSRMNTKYDENDKLIREVKVITLKSKLVSDFRKDFQFYKVREINNYHHAHDAYLNAVVGTALIKKYPKLESEFVYGDYKVYDVRKMIAKSEQEIGKATAKYFFYSNIMNFFKTEITLANGEIRKRPLIETNGETGEIVWDKGRDFATVRKVLSMPQVNIVKKTEVQTGGFSKESILPKRNSDKLIARKKDWDPKKYGGFDSPTVAYSVLVVAKVEKGKSKKLKSVKELLGITIMERSSFEKNPIDFLEAKGYKEVKKDLIIKLPKYSLFELENGRKRMLASAGELQKGNELALPSKYVNFLYLASHYEKLKGSPEDNEQKQLFVEQHKHYLDEIIEQISEFSKRVILADANLDKVLSAYNKHRDKPIREQAENIIHLFTLTNLGAPAAFKYFDTTIDRKRYTSTKEVLDATLIHQSITGLYETRIDLSQLGGDGGGSSGSSGSSGSSGSSGGTVSLQDEHRLFDIPVTTSLPDVWLQDFPQAWAETGGLGRAKCQAPIIIDLKPTAVPVSIKQYPMSLEAHMGIRQHIIKFLELGVLRPCRSPWNTPLLPVKKPGTQDYRPVQDLREINKRTVDIHPTVPNPYNLLSTLKPDYSWYTVLDLKDAFFCLPLAPQSQELFAFEWKDPERGISGQLTWTRLPQGFKNSPTLFNEALHRDLTDFRTQHPEVTLLQYVDDLLLAAPTKKACTQGTRHLLQELGEKGYRASAKKAQICQTKVTYLGYILSEGKRWLTPGRIETVARIPPPRNPREVREFLGTAGFCRLWIPGFAELAAPLYALTKPSTPFTWQTEHQLAFEALKKALLSAPALGLPDTSKPFTLFLDERQGIAKGVLTQKLGPWKRPVAYLSKKLDPVAAGWPPCLRIMAATAMLVKDSAKLTLGQPLTVITPHTLEAIVRQPPDRWITNARLTHYQALLLDTDRVQFGPPVTLNPATLLPVPENQPSPHDCRQVLAETHGTREDLKDQELPDADHTWYTDGSSYLDSGTRRAGAAVVDGHNTIWAQSLPPGTSAQKAELIALTKALELSKGKKANIYTDSRYAFATAHTHGSIYERRGWLTSEGKEIKNKAEIIALLKALFLPQEVAIIHCPGHQKGQDPVAVGNRQADRVARQAAMAEVLTLATEPDNTSHITAGKRTADGSEFEKRTADGSEFESPKKKAKVE

SEQ ID NO: 1554 - protein, 2097 aa, synthetic construct
MPAAKRVKLDGGDKKYSIGLDIGTNSVGWAVITDEYKVPSKKFKVLGNTDRHSIKKNLIGALLFDSGETAEATRLKRTARRRYTRRKNRICYLQEIFSNEMAKVDDSFFHRLEESFLVEEDKKHERHPIFGNIVDEVAYHEKYPTIYHLRKKLVDSTDKADLRLIYLALAHMIKFRGHFLIEGDLNPDNSDVDKLFIQLVQTYNQLFEENPINASGVDAKAILSARLSKSRRLENLIAQLPGEKKNGLFGNLIALSLGLTPNFKSNFDLAEDAKLQLSKDTYDDDLDNLLAQIGDQYADLFLAAKNLSDAILLSDILRVNTEITKAPLSASMIKRYDEHHQDLTLLKALVRQQLPEKYKEIFFDQSKNGYAGYIDGGASQEEFYKFIKPILEKMDGTEELLVKLNREDLLRKQRTFDNGSIPHQIHLGELHAILRRQEDFYPFLKDNREKIEKILTFRIPYYVGPLARGNSRFAWMTRKSEETITPWNFEEVVDKGASAQSFIERMTNFDKNLPNEKVLPKHSLLYEYFTVYNELTKVKYVTEGMRKPAFLSGEQKKAIVDLLFKTNRKVTVKQLKEDYFKKIECFDSVEISGVEDRFNASLGTYHDLLKIIKDKDFLDNEENEDILEDIVLTLTLFEDREMIEERLKTYAHLFDDKVMKQLKRRRYTGWGRLSRKLINGIRDKQSGKTILDFLKSDGFANRNFMQLIHDDSLTFKEDIQKAQVSGQGDSLHEHIANLAGSPAIKKGILQTVKVVDELVKVMGRHKPENIVIEMARENQTTQKGQKNSRERMKRIEEGIKELGSQILKEHPVENTQLQNEKLYLYYLQNGRDMYVDQELDINRLSDYDVDHIVPQSFLKDDSIDNKVLTRSDKARGKSDNVPSEEVVKKMKNYWRQLLNAKLITQRKFDNLTKAERGGLSELDKAGFIKRQLVETRQITKHVAQILDSRMNTKYDENDKLIREVKVITLKSKLVSDFRKDFQFYKVREINNYHHAHDAYLNAVVGTALIKKYPKLESEFVYGDYKVYDVRKMIAKSEQEIGKATAKYFFYSNIMNFFKTEITLANGEIRKRPLIETNGETGEIVWDKGRDFATVRKVLSMPQVNIVKKTEVQTGGFSKESILPKRNSDKLIARKKDWDPKKYGGFDSPTVAYSVLVVAKVEKGKSKKLKSVKELLGITIMERSSFEKNPIDFLEAKGYKEVKKDLIIKLPKYSLFELENGRKRMLASAGELQKGNELALPSKYVNFLYLASHYEKLKGSPEDNEQKQLFVEQHKHYLDEIIEQISEFSKRVILADANLDKVLSAYNKHRDKPIREQAENIIHLFTLTNLGAPAAFKYFDTTIDRKRYTSTKEVLDATLIHQSITGLYETRIDLSQLGGDGGPAPGGSGGTVSLQDEHRLFDIPVTTSLPDVWLQDFPQAWAETGGLGRAKCQAPIIIDLKPTAVPVSIKQYPMSLEAHMGIRQHIIKFLELGVLRPCRSPWNTPLLPVKKPGTQDYRPVQDLREINKRTVDIHPTVPNPYNLLSTLKPDYSWYTVLDLKDAFFCLPLAPQSQELFAFEWKDPERGISGQLTWTRLPQGFKNSPTLFNEALHRDLTDFRTQHPEVTLLQYVDDLLLAAPTKKACTQGTRHLLQELGEKGYRASAKKAQICQTKVTYLGYILSEGKRWLTPGRIETVARIPPPRNPREVREFLGTAGFCRLWIPGFAELAAPLYALTKPSTPFTWQTEHQLAFEALKKALLSAPALGLPDTSKPFTLFLDERQGIAKGVLTQKLGPWKRPVAYLSKKLDPVAAGWPPCLRIMAATAMLVKDSAKLTLGQPLTVITPHTLEAIVRQPPDRWITNARLTHYQALLLDTDRVQFGPPVTLNPATLLPVPENQPSPHDCRQVLAETHGTREDLKDQELPDADHTWYTDGSSYLDSGTRRAGAAVVDGHNTIWAQSLPPGTSAQKAELIALTKALELSKGKKANIYTDSRYAFATAHTHGSIYERRGWLTSEGKEIKNKAEIIALLKALFLPQEVAIIHCPGHQKGQDPVAVGNRQADRVARQAAMAEVLTLATEPDNTSHITAGKRTADGSEFEKRTADGSEFESPKKKAKVE

SEQ ID NO: 1555 - protein, 2102 aa, synthetic construct
MPAAKRVKLDGGDKKYSIGLDIGTNSVGWAVITDEYKVPSKKFKVLGNTDRHSIKKNLIGALLFDSGETAEATRLKRTARRRYTRRKNRICYLQEIFSNEMAKVDDSFFHRLEESFLVEEDKKHERHPIFGNIVDEVAYHEKYPTIYHLRKKLVDSTDKADLRLIYLALAHMIKFRGHFLIEGDLNPDNSDVDKLFIQLVQTYNQLFEENPINASGVDAKAILSARLSKSRRLENLIAQLPGEKKNGLFGNLIALSLGLTPNFKSNFDLAEDAKLQLSKDTYDDDLDNLLAQIGDQYADLFLAAKNLSDAILLSDILRVNTEITKAPLSASMIKRYDEHHQDLTLLKALVRQQLPEKYKEIFFDQSKNGYAGYIDGGASQEEFYKFIKPILEKMDGTEELLVKLNREDLLRKQRTFDNGSIPHQIHLGELHAILRRQEDFYPFLKDNREKIEKILTFRIPYYVGPLARGNSRFAWMTRKSEETITPWNFEEVVDKGASAQSFIERMTNFDKNLPNEKVLPKHSLLYEYFTVYNELTKVKYVTEGMRKPAFLSGEQKKAIVDLLFKTNRKVTVKQLKEDYFKKIECFDSVEISGVEDRFNASLGTYHDLLKIIKDKDFLDNEENEDILEDIVLTLTLFEDREMIEERLKTYAHLFDDKVMKQLKRRRYTGWGRLSRKLINGIRDKQSGKTILDFLKSDGFANRNFMQLIHDDSLTFKEDIQKAQVSGQGDSLHEHIANLAGSPAIKKGILQTVKVVDELVKVMGRHKPENIVIEMARENQTTQKGQKNSRERMKRIEEGIKELGSQILKEHPVENTQLQNEKLYLYYLQNGRDMYVDQELDINRLSDYDVDHIVPQSFLKDDSIDNKVLTRSDKARGKSDNVPSEEVVKKMKNYWRQLLNAKLITQRKFDNLTKAERGGLSELDKAGFIKRQLVETRQITKHVAQILDSRMNTKYDENDKLIREVKVITLKSKLVSDFRKDFQFYKVREINNYHHAHDAYLNAVVGTALIKKYPKLESEFVYGDYKVYDVRKMIAKSEQEIGKATAKYFFYSNIMNFFKTEITLANGEIRKRPLIETNGETGEIVWDKGRDFATVRKVLSMPQVNIVKKTEVQTGGFSKESILPKRNSDKLIARKKDWDPKKYGGFDSPTVAYSVLVVAKVEKGKSKKLKSVKELLGITIMERSSFEKNPIDFLEAKGYKEVKKDLIIKLPKYSLFELENGRKRMLASAGELQKGNELALPSKYVNFLYLASHYEKLKGSPEDNEQKQLFVEQHKHYLDEIIEQISEFSKRVILADANLDKVLSAYNKHRDKPIREQAENIIHLFTLTNLGAPAAFKYFDTTIDRKRYTSTKEVLDATLIHQSITGLYETRIDLSQLGGDGGPAPGGSEAAAKGGTVSLQDEHRLFDIPVTTSLPDVWLQDFPQAWAETGGLGRAKCQAPIIIDLKPTAVPVSIKQYPMSLEAHMGIRQHIIKFLELGVLRPCRSPWNTPLLPVKKPGTQDYRPVQDLREINKRTVDIHPTVPNPYNLLSTLKPDYSWYTVLDLKDAFFCLPLAPQSQELFAFEWKDPERGISGQLTWTRLPQGFKNSPTLFNEALHRDLTDFRTQHPEVTLLQYVDDLLLAAPTKKACTQGTRHLLQELGEKGYRASAKKAQICQTKVTYLGYILSEGKRWLTPGRIETVARIPPPRNPREVREFLGTAGFCRLWIPGFAELAAPLYALTKPSTPFTWQTEHQLAFEALKKALLSAPALGLPDTSKPFTLFLDERQGIAKGVLTQKLGPWKRPVAYLSKKLDPVAAGWPPCLRIMAATAMLVKDSAKLTLGQPLTVITPHTLEAIVRQPPDRWITNARLTHYQALLLDTDRVQFGPPVTLNPATLLPVPENQPSPHDCRQVLAETHGTREDLKDQELPDADHTWYTDGSSYLDSGTRRAGAAVVDGHNTIWAQSLPPGTSAQKAELIALTKALELSKGKKANIYTDSRYAFATAHTHGSIYERRGWLTSEGKEIKNKAEIIALLKALFLPQEVAIIHCPGHQKGQDPVAVGNRQADRVARQAAMAEVLTLATEPDNTSHITAGKRTADGSEFEKRTADGSEFESPKKKAKVE

SEQ ID NO: 1556 - protein, 2097 aa, synthetic construct
MPAAKRVKLDGGDKKYSIGLDIGTNSVGWAVITDEYKVPSKKFKVLGNTDRHSIKKNLIGALLFDSGETAEATRLKRTARRRYTRRKNRICYLQEIFSNEMAKVDDSFFHRLEESFLVEEDKKHERHPIFGNIVDEVAYHEKYPTIYHLRKKLVDSTDKADLRLIYLALAHMIKFRGHFLIEGDLNPDNSDVDKLFIQLVQTYNQLFEENPINASGVDAKAILSARLSKSRRLENLIAQLPGEKKNGLFGNLIALSLGLTPNFKSNFDLAEDAKLQLSKDTYDDDLDNLLAQIGDQYADLFLAAKNLSDAILLSDILRVNTEITKAPLSASMIKRYDEHHQDLTLLKALVRQQLPEKYKEIFFDQSKNGYAGYIDGGASQEEFYKFIKPILEKMDGTEELLVKLNREDLLRKQRTFDNGSIPHQIHLGELHAILRRQEDFYPFLKDNREKIEKILTFRIPYYVGPLARGNSRFAWMTRKSEETITPWNFEEVVDKGASAQSFIERMTNFDKNLPNEKVLPKHSLLYEYFTVYNELTKVKYVTEGMRKPAFLSGEQKKAIVDLLFKTNRKVTVKQLKEDYFKKIECFDSVEISGVEDRFNASLGTYHDLLKIIKDKDFLDNEENEDILEDIVLTLTLFEDREMIEERLKTYAHLFDDKVMKQLKRRRYTGWGRLSRKLINGIRDKQSGKTILDFLKSDGFANRNFMQLIHDDSLTFKEDIQKAQVSGQGDSLHEHIANLAGSPAIKKGILQTVKVVDELVKVMGRHKPENIVIEMARENQTTQKGQKNSRERMKRIEEGIKELGSQILKEHPVENTQLQNEKLYLYYLQNGRDMYVDQELDINRLSDYDVDHIVPQSFLKDDSIDNKVLTRSDKARGKSDNVPSEEVVKKMKNYWRQLLNAKLITQRKFDNLTKAERGGLSELDKAGFIKRQLVETRQITKHVAQILDSRMNTKYDENDKLIREVKVITLKSKLVSDFRKDFQFYKVREINNYHHAHDAYLNAVVGTALIKKYPKLESEFVYGDYKVYDVRKMIAKSEQEIGKATAKYFFYSNIMNFFKTEITLANGEIRKRPLIETNGETGEIVWDKGRDFATVRKVLSMPQVNIVKKTEVQTGGFSKESILPKRNSDKLIARKKDWDPKKYGGFDSPTVAYSVLVVAKVEKGKSKKLKSVKELLGITIMERSSFEKNPIDFLEAKGYKEVKKDLIIKLPKYSLFELENGRKRMLASAGELQKGNELALPSKYVNFLYLASHYEKLKGSPEDNEQKQLFVEQHKHYLDEIIEQISEFSKRVILADANLDKVLSAYNKHRDKPIREQAENIIHLFTLTNLGAPAAFKYFDTTIDRKRYTSTKEVLDATLIHQSITGLYETRIDLSQLGGDGGGGSGGSGGTVSLQDEHRLFDIPVTTSLPDVWLQDFPQAWAETGGLGRAKCQAPIIIDLKPTAVPVSIKQYPMSLEAHMGIRQHIIKFLELGVLRPCRSPWNTPLLPVKKPGTQDYRPVQDLREINKRTVDIHPTVPNPYNLLSTLKPDYSWYTVLDLKDAFFCLPLAPQSQELFAFEWKDPERGISGQLTWTRLPQGFKNSPTLFNEALHRDLTDFRTQHPEVTLLQYVDDLLLAAPTKKACTQGTRHLLQELGEKGYRASAKKAQICQTKVTYLGYILSEGKRWLTPGRIETVARIPPPRNPREVREFLGTAGFCRLWIPGFAELAAPLYALTKPSTPFTWQTEHQLAFEALKKALLSAPALGLPDTSKPFTLFLDERQGIAKGVLTQKLGPWKRPVAYLSKKLDPVAAGWPPCLRIMAATAMLVKDSAKLTLGQPLTVITPHTLEAIVRQPPDRWITNARLTHYQALLLDTDRVQFGPPVTLNPATLLPVPENQPSPHDCRQVLAETHGTREDLKDQELPDADHTWYTDGSSYLDSGTRRAGAAVVDGHNTIWAQSLPPGTSAQKAELIALTKALELSKGKKANIYTDSRYAFATAHTHGSIYERRGWLTSEGKEIKNKAEIIALLKALFLPQEVAIIHCPGHQKGQDPVAVGNRQADRVARQAAMAEVLTLATEPDNTSHITAGKRTADGSEFEKRTADGSEFESPKKKAKVE

SEQ ID NO: 1557 - protein, 2099 aa, synthetic construct
MPAAKRVKLDGGDKKYSIGLDIGTNSVGWAVITDEYKVPSKKFKVLGNTDRHSIKKNLIGALLFDSGETAEATRLKRTARRRYTRRKNRICYLQEIFSNEMAKVDDSFFHRLEESFLVEEDKKHERHPIFGNIVDEVAYHEKYPTIYHLRKKLVDSTDKADLRLIYLALAHMIKFRGHFLIEGDLNPDNSDVDKLFIQLVQTYNQLFEENPINASGVDAKAILSARLSKSRRLENLIAQLPGEKKNGLFGNLIALSLGLTPNFKSNFDLAEDAKLQLSKDTYDDDLDNLLAQIGDQYADLFLAAKNLSDAILLSDILRVNTEITKAPLSASMIKRYDEHHQDLTLLKALVRQQLPEKYKEIFFDQSKNGYAGYIDGGASQEEFYKFIKPILEKMDGTEELLVKLNREDLLRKQRTFDNGSIPHQIHLGELHAILRRQEDFYPFLKDNREKIEKILTFRIPYYVGPLARGNSRFAWMTRKSEETITPWNFEEVVDKGASAQSFIERMTNFDKNLPNEKVLPKHSLLYEYFTVYNELTKVKYVTEGMRKPAFLSGEQKKAIVDLLFKTNRKVTVKQLKEDYFKKIECFDSVEISGVEDRFNASLGTYHDLLKIIKDKDFLDNEENEDILEDIVLTLTLFEDREMIEERLKTYAHLFDDKVMKQLKRRRYTGWGRLSRKLINGIRDKQSGKTILDFLKSDGFANRNFMQLIHDDSLTFKEDIQKAQVSGQGDSLHEHIANLAGSPAIKKGILQTVKVVDELVKVMGRHKPENIVIEMARENQTTQKGQKNSRERMKRIEEGIKELGSQILKEHPVENTQLQNEKLYLYYLQNGRDMYVDQELDINRLSDYDVDHIVPQSFLKDDSIDNKVLTRSDKARGKSDNVPSEEVVKKMKNYWRQLLNAKLITQRKFDNLTKAERGGLSELDKAGFIKRQLVETRQITKHVAQILDSRMNTKYDENDKLIREVKVITLKSKLVSDFRKDFQFYKVREINNYHHAHDAYLNAVVGTALIKKYPKLESEFVYGDYKVYDVRKMIAKSEQEIGKATAKYFFYSNIMNFFKTEITLANGEIRKRPLIETNGETGEIVWDKGRDFATVRKVLSMPQVNIVKKTEVQTGGFSKESILPKRNSDKLIARKKDWDPKKYGGFDSPTVAYSVLVVAKVEKGKSKKLKSVKELLGITIMERSSFEKNPIDFLEAKGYKEVKKDLIIKLPKYSLFELENGRKRMLASAGELQKGNELALPSKYVNFLYLASHYEKLKGSPEDNEQKQLFVEQHKHYLDEIIEQISEFSKRVILADANLDKVLSAYNKHRDKPIREQAENIIHLFTLTNLGAPAAFKYFDTTIDRKRYTSTKEVLDATLIHQSITGLYETRIDLSQLGGDGGEAAAKGGSGGTVSLQDEHRLFDIPVTTSLPDVWLQDFPQAWAETGGLGRAKCQAPIIIDLKPTAVPVSIKQYPMSLEAHMGIRQHIIKFLELGVLRPCRSPWNTPLLPVKKPGTQDYRPVQDLREINKRTVDIHPTVPNPYNLLSTLKPDYSWYTVLDLKDAFFCLPLAPQSQELFAFEWKDPERGISGQLTWTRLPQGFKNSPTLFNEALHRDLTDFRTQHPEVTLLQYVDDLLLAAPTKKACTQGTRHLLQELGEKGYRASAKKAQICQTKVTYLGYILSEGKRWLTPGRIETVARIPPPRNPREVREFLGTAGFCRLWIPGFAELAAPLYALTKPSTPFTWQTEHQLAFEALKKALLSAPALGLPDTSKPFTLFLDERQGIAKGVLTQKLGPWKRPVAYLSKKLDPVAAGWPPCLRIMAATAMLVKDSAKLTLGQPLTVITPHTLEAIVRQPPDRWITNARLTHYQALLLDTDRVQFGPPVTLNPATLLPVPENQPSPHDCRQVLAETHGTREDLKDQELPDADHTWYTDGSSYLDSGTRRAGAAVVDGHNTIWAQSLPPGTSAQKAELIALTKALELSKGKKANIYTDSRYAFATAHTHGSIYERRGWLTSEGKEIKNKAEIIALLKALFLPQEVAIIHCPGHQKGQDPVAVGNRQADRVARQAAMAEVLTLATEPDNTSHITAGKRTADGSEFEKRTADGSEFESPKKKAKVE

SEQ ID NO: 1558 - protein, 2097 aa, synthetic construct
MPAAKRVKLDGGDKKYSIGLDIGTNSVGWAVITDEYKVPSKKFKVLGNTDRHSIKKNLIGALLFDSGETAEATRLKRTARRRYTRRKNRICYLQEIFSNEMAKVDDSFFHRLEESFLVEEDKKHERHPIFGNIVDEVAYHEKYPTIYHLRKKLVDSTDKADLRLIYLALAHMIKFRGHFLIEGDLNPDNSDVDKLFIQLVQTYNQLFEENPINASGVDAKAILSARLSKSRRLENLIAQLPGEKKNGLFGNLIALSLGLTPNFKSNFDLAEDAKLQLSKDTYDDDLDNLLAQIGDQYADLFLAAKNLSDAILLSDILRVNTEITKAPLSASMIKRYDEHHQDLTLLKALVRQQLPEKYKEIFFDQSKNGYAGYIDGGASQEEFYKFIKPILEKMDGTEELLVKLNREDLLRKQRTFDNGSIPHQIHLGELHAILRRQEDFYPFLKDNREKIEKILTFRIPYYVGPLARGNSRFAWMTRKSEETITPWNFEEVVDKGASAQSFIERMTNFDKNLPNEKVLPKHSLLYEYFTVYNELTKVKYVTEGMRKPAFLSGEQKKAIVDLLFKTNRKVTVKQLKEDYFKKIECFDSVEISGVEDRFNASLGTYHDLLKIIKDKDFLDNEENEDILEDIVLTLTLFEDREMIEERLKTYAHLFDDKVMKQLKRRRYTGWGRLSRKLINGIRDKQSGKTILDFLKSDGFANRNFMQLIHDDSLTFKEDIQKAQVSGQGDSLHEHIANLAGSPAIKKGILQTVKVVDELVKVMGRHKPENIVIEMARENQTTQKGQKNSRERMKRIEEGIKELGSQILKEHPVENTQLQNEKLYLYYLQNGRDMYVDQELDINRLSDYDVDHIVPQSFLKDDSIDNKVLTRSDKARGKSDNVPSEEVVKKMKNYWRQLLNAKLITQRKFDNLTKAERGGLSELDKAGFIKRQLVETRQITKHVAQILDSRMNTKYDENDKLIREVKVITLKSKLVSDFRKDFQFYKVREINNYHHAHDAYLNAVVGTALIKKYPKLESEFVYGDYKVYDVRKMIAKSEQEIGKATAKYFFYSNIMNFFKTEITLANGEIRKRPLIETNGETGEIVWDKGRDFATVRKVLSMPQVNIVKKTEVQTGGFSKESILPKRNSDKLIARKKDWDPKKYGGFDSPTVAYSVLVVAKVEKGKSKKLKSVKELLGITIMERSSFEKNPIDFLEAKGYKEVKKDLIIKLPKYSLFELENGRKRMLASAGELQKGNELALPSKYVNFLYLASHYEKLKGSPEDNEQKQLFVEQHKHYLDEIIEQISEFSKRVILADANLDKVLSAYNKHRDKPIREQAENIIHLFTLTNLGAPAAFKYFDTTIDRKRYTSTKEVLDATLIHQSITGLYETRIDLSQLGGDGGPAPGSSGGTVSLQDEHRLFDIPVTTSLPDVWLQDFPQAWAETGGLGRAKCQAPIIIDLKPTAVPVSIKQYPMSLEAHMGIRQHIIKFLELGVLRPCRSPWNTPLLPVKKPGTQDYRPVQDLREINKRTVDIHPTVPNPYNLLSTLKPDYSWYTVLDLKDAFFCLPLAPQSQELFAFEWKDPERGISGQLTWTRLPQGFKNSPTLFNEALHRDLTDFRTQHPEVTLLQYVDDLLLAAPTKKACTQGTRHLLQELGEKGYRASAKKAQICQTKVTYLGYILSEGKRWLTPGRIETVARIPPPRNPREVREFLGTAGFCRLWIPGFAELAAPLYALTKPSTPFTWQTEHQLAFEALKKALLSAPALGLPDTSKPFTLFLDERQGIAKGVLTQKLGPWKRPVAYLSKKLDPVAAGWPPCLRIMAATAMLVKDSAKLTLGQPLTVITPHTLEAIVRQPPDRWITNARLTHYQALLLDTDRVQFGPPVTLNPATLLPVPENQPSPHDCRQVLAETHGTREDLKDQELPDADHTWYTDGSSYLDSGTRRAGAAVVDGHNTIWAQSLPPGTSAQKAELIALTKALELSKGKKANIYTDSRYAFATAHTHGSIYERRGWLTSEGKEIKNKAEIIALLKALFLPQEVAIIHCPGHQKGQDPVAVGNRQADRVARQAAMAEVLTLATEPDNTSHITAGKRTADGSEFEKRTADGSEFESPKKKAKVE

SEQ ID NO: 1559 - protein, 2096 aa, synthetic construct
MPAAKRVKLDGGDKKYSIGLDIGTNSVGWAVITDEYKVPSKKFKVLGNTDRHSIKKNLIGALLFDSGETAEATRLKRTARRRYTRRKNRICYLQEIFSNEMAKVDDSFFHRLEESFLVEEDKKHERHPIFGNIVDEVAYHEKYPTIYHLRKKLVDSTDKADLRLIYLALAHMIKFRGHFLIEGDLNPDNSDVDKLFIQLVQTYNQLFEENPINASGVDAKAILSARLSKSRRLENLIAQLPGEKKNGLFGNLIALSLGLTPNFKSNFDLAEDAKLQLSKDTYDDDLDNLLAQIGDQYADLFLAAKNLSDAILLSDILRVNTEITKAPLSASMIKRYDEHHQDLTLLKALVRQQLPEKYKEIFFDQSKNGYAGYIDGGASQEEFYKFIKPILEKMDGTEELLVKLNREDLLRKQRTFDNGSIPHQIHLGELHAILRRQEDFYPFLKDNREKIEKILTFRIPYYVGPLARGNSRFAWMTRKSEETITPWNFEEVVDKGASAQSFIERMTNFDKNLPNEKVLPKHSLLYEYFTVYNELTKVKYVTEGMRKPAFLSGEQKKAIVDLLFKTNRKVTVKQLKEDYFKKIECFDSVEISGVEDRFNASLGTYHDLLKIIKDKDFLDNEENEDILEDIVLTLTLFEDREMIEERLKTYAHLFDDKVMKQLKRRRYTGWGRLSRKLINGIRDKQSGKTILDFLKSDGFANRNFMQLIHDDSLTFKEDIQKAQVSGQGDSLHEHIANLAGSPAIKKGILQTVKVVDELVKVMGRHKPENIVIEMARENQTTQKGQKNSRERMKRIEEGIKELGSQILKEHPVENTQLQNEKLYLYYLQNGRDMYVDQELDINRLSDYDVDHIVPQSFLKDDSIDNKVLTRSDKARGKSDNVPSEEVVKKMKNYWRQLLNAKLITQRKFDNLTKAERGGLSELDKAGFIKRQLVETRQITKHVAQILDSRMNTKYDENDKLIREVKVITLKSKLVSDFRKDFQFYKVREINNYHHAHDAYLNAVVGTALIKKYPKLESEFVYGDYKVYDVRKMIAKSEQEIGKATAKYFFYSNIMNFFKTEITLANGEIRKRPLIETNGETGEIVWDKGRDFATVRKVLSMPQVNIVKKTEVQTGGFSKESILPKRNSDKLIARKKDWDPKKYGGFDSPTVAYSVLVVAKVEKGKSKKLKSVKELLGITIMERSSFEKNPIDFLEAKGYKEVKKDLIIKLPKYSLFELENGRKRMLASAGELQKGNELALPSKYVNFLYLASHYEKLKGSPEDNEQKQLFVEQHKHYLDEIIEQISEFSKRVILADANLDKVLSAYNKHRDKPIREQAENIIHLFTLTNLGAPAAFKYFDTTIDRKRYTSTKEVLDATLIHQSITGLYETRIDLSQLGGDGGGGGGSGGTVSLQDEHRLFDIPVTTSLPDVWLQDFPQAWAETGGLGRAKCQAPIIIDLKPTAVPVSIKQYPMSLEAHMGIRQHIIKFLELGVLRPCRSPWNTPLLPVKKPGTQDYRPVQDLREINKRTVDIHPTVPNPYNLLSTLKPDYSWYTVLDLKDAFFCLPLAPQSQELFAFEWKDPERGISGQLTWTRLPQGFKNSPTLFNEALHRDLTDFRTQHPEVTLLQYVDDLLLAAPTKKACTQGTRHLLQELGEKGYRASAKKAQICQTKVTYLGYILSEGKRWLTPGRIETVARIPPPRNPREVREFLGTAGFCRLWIPGFAELAAPLYALTKPSTPFTWQTEHQLAFEALKKALLSAPALGLPDTSKPFTLFLDERQGIAKGVLTQKLGPWKRPVAYLSKKLDPVAAGWPPCLRIMAATAMLVKDSAKLTLGQPLTVITPHTLEAIVRQPPDRWITNARLTHYQALLLDTDRVQFGPPVTLNPATLLPVPENQPSPHDCRQVLAETHGTREDLKDQELPDADHTWYTDGSSYLDSGTRRAGAAVVDGHNTIWAQSLPPGTSAQKAELIALTKALELSKGKKANIYTDSRYAFATAHTHGSIYERRGWLTSEGKEIKNKAEIIALLKALFLPQEVAIIHCPGHQKGQDPVAVGNRQADRVARQAAMAEVLTLATEPDNTSHITAGKRTADGSEFEKRTADGSEFESPKKKAKVE

SEQ ID NO: 1560 - protein, 2098 aa, synthetic construct
MPAAKRVKLDGGDKKYSIGLDIGTNSVGWAVITDEYKVPSKKFKVLGNTDRHSIKKNLIGALLFDSGETAEATRLKRTARRRYTRRKNRICYLQEIFSNEMAKVDDSFFHRLEESFLVEEDKKHERHPIFGNIVDEVAYHEKYPTIYHLRKKLVDSTDKADLRLIYLALAHMIKFRGHFLIEGDLNPDNSDVDKLFIQLVQTYNQLFEENPINASGVDAKAILSARLSKSRRLENLIAQLPGEKKNGLFGNLIALSLGLTPNFKSNFDLAEDAKLQLSKDTYDDDLDNLLAQIGDQYADLFLAAKNLSDAILLSDILRVNTEITKAPLSASMIKRYDEHHQDLTLLKALVRQQLPEKYKEIFFDQSKNGYAGYIDGGASQEEFYKFIKPILEKMDGTEELLVKLNREDLLRKQRTFDNGSIPHQIHLGELHAILRRQEDFYPFLKDNREKIEKILTFRIPYYVGPLARGNSRFAWMTRKSEETITPWNFEEVVDKGASAQSFIERMTNFDKNLPNEKVLPKHSLLYEYFTVYNELTKVKYVTEGMRKPAFLSGEQKKAIVDLLFKTNRKVTVKQLKEDYFKKIECFDSVEISGVEDRFNASLGTYHDLLKIIKDKDFLDNEENEDILEDIVLTLTLFEDREMIEERLKTYAHLFDDKVMKQLKRRRYTGWGRLSRKLINGIRDKQSGKTILDFLKSDGFANRNFMQLIHDDSLTFKEDIQKAQVSGQGDSLHEHIANLAGSPAIKKGILQTVKVVDELVKVMGRHKPENIVIEMARENQTTQKGQKNSRERMKRIEEGIKELGSQILKEHPVENTQLQNEKLYLYYLQNGRDMYVDQELDINRLSDYDVDHIVPQSFLKDDSIDNKVLTRSDKARGKSDNVPSEEVVKKMKNYWRQLLNAKLITQRKFDNLTKAERGGLSELDKAGFIKRQLVETRQITKHVAQILDSRMNTKYDENDKLIREVKVITLKSKLVSDFRKDFQFYKVREINNYHHAHDAYLNAVVGTALIKKYPKLESEFVYGDYKVYDVRKMIAKSEQEIGKATAKYFFYSNIMNFFKTEITLANGEIRKRPLIETNGETGEIVWDKGRDFATVRKVLSMPQVNIVKKTEVQTGGFSKESILPKRNSDKLIARKKDWDPKKYGGFDSPTVAYSVLVVAKVEKGKSKKLKSVKELLGITIMERSSFEKNPIDFLEAKGYKEVKKDLIIKLPKYSLFELENGRKRMLASAGELQKGNELALPSKYVNFLYLASHYEKLKGSPEDNEQKQLFVEQHKHYLDEIIEQISEFSKRVILADANLDKVLSAYNKHRDKPIREQAENIIHLFTLTNLGAPAAFKYFDTTIDRKRYTSTKEVLDATLIHQSITGLYETRIDLSQLGGDGGGGGGGGGGGTVSLQDEHRLFDIPVTTSLPDVWLQDFPQAWAETGGLGRAKCQAPIIIDLKPTAVPVSIKQYPMSLEAHMGIRQHIIKFLELGVLRPCRSPWNTPLLPVKKPGTQDYRPVQDLREINKRTVDIHPTVPNPYNLLSTLKPDYSWYTVLDLKDAFFCLPLAPQSQELFAFEWKDPERGISGQLTWTRLPQGFKNSPTLFNEALHRDLTDFRTQHPEVTLLQYVDDLLLAAPTKKACTQGTRHLLQELGEKGYRASAKKAQICQTKVTYLGYILSEGKRWLTPGRIETVARIPPPRNPREVREFLGTAGFCRLWIPGFAELAAPLYALTKPSTPFTWQTEHQLAFEALKKALLSAPALGLPDTSKPFTLFLDERQGIAKGVLTQKLGPWKRPVAYLSKKLDPVAAGWPPCLRIMAATAMLVKDSAKLTLGQPLTVITPHTLEAIVRQPPDRWITNARLTHYQALLLDTDRVQFGPPVTLNPATLLPVPENQPSPHDCRQVLAETHGTREDLKDQELPDADHTWYTDGSSYLDSGTRRAGAAVVDGHNTIWAQSLPPGTSAQKAELIALTKALELSKGKKANIYTDSRYAFATAHTHGSIYERRGWLTSEGKEIKNKAEIIALLKALFLPQEVAIIHCPGHQKGQDPVAVGNRQADRVARQAAMAEVLTLATEPDNTSHITAGKRTADGSEFEKRTADGSEFESPKKKAKVE

SEQ ID NO: 1561 - protein, 2106 aa, synthetic construct
MPAAKRVKLDGGDKKYSIGLDIGTNSVGWAVITDEYKVPSKKFKVLGNTDRHSIKKNLIGALLFDSGETAEATRLKRTARRRYTRRKNRICYLQEIFSNEMAKVDDSFFHRLEESFLVEEDKKHERHPIFGNIVDEVAYHEKYPTIYHLRKKLVDSTDKADLRLIYLALAHMIKFRGHFLIEGDLNPDNSDVDKLFIQLVQTYNQLFEENPINASGVDAKAILSARLSKSRRLENLIAQLPGEKKNGLFGNLIALSLGLTPNFKSNFDLAEDAKLQLSKDTYDDDLDNLLAQIGDQYADLFLAAKNLSDAILLSDILRVNTEITKAPLSASMIKRYDEHHQDLTLLKALVRQQLPEKYKEIFFDQSKNGYAGYIDGGASQEEFYKFIKPILEKMDGTEELLVKLNREDLLRKQRTFDNGSIPHQIHLGELHAILRRQEDFYPFLKDNREKIEKILTFRIPYYVGPLARGNSRFAWMTRKSEETITPWNFEEVVDKGASAQSFIERMTNFDKNLPNEKVLPKHSLLYEYFTVYNELTKVKYVTEGMRKPAFLSGEQKKAIVDLLFKTNRKVTVKQLKEDYFKKIECFDSVEISGVEDRFNASLGTYHDLLKIIKDKDFLDNEENEDILEDIVLTLTLFEDREMIEERLKTYAHLFDDKVMKQLKRRRYTGWGRLSRKLINGIRDKQSGKTILDFLKSDGFANRNFMQLIHDDSLTFKEDIQKAQVSGQGDSLHEHIANLAGSPAIKKGILQTVKVVDELVKVMGRHKPENIVIEMARENQTTQKGQKNSRERMKRIEEGIKELGSQILKEHPVENTQLQNEKLYLYYLQNGRDMYVDQELDINRLSDYDVDHIVPQSFLKDDSIDNKVLTRSDKARGKSDNVPSEEVVKKMKNYWRQLLNAKLITQRKFDNLTKAERGGLSELDKAGFIKRQLVETRQITKHVAQILDSRMNTKYDENDKLIREVKVITLKSKLVSDFRKDFQFYKVREINNYHHAHDAYLNAVVGTALIKKYPKLESEFVYGDYKVYDVRKMIAKSEQEIGKATAKYFFYSNIMNFFKTEITLANGEIRKRPLIETNGETGEIVWDKGRDFATVRKVLSMPQVNIVKKTEVQTGGFSKESILPKRNSDKLIARKKDWDPKKYGGFDSPTVAYSVLVVAKVEKGKSKKLKSVKELLGITIMERSSFEKNPIDFLEAKGYKEVKKDLIIKLPKYSLFELENGRKRMLASAGELQKGNELALPSKYVNFLYLASHYEKLKGSPEDNEQKQLFVEQHKHYLDEIIEQISEFSKRVILADANLDKVLSAYNKHRDKPIREQAENIIHLFTLTNLGAPAAFKYFDTTIDRKRYTSTKEVLDATLIHQSITGLYETRIDLSQLGGDGGGGGGSEAAAKGGGGSGGTVSLQDEHRLFDIPVTTSLPDVWLQDFPQAWAETGGLGRAKCQAPIIIDLKPTAVPVSIKQYPMSLEAHMGIRQHIIKFLELGVLRPCRSPWNTPLLPVKKPGTQDYRPVQDLREINKRTVDIHPTVPNPYNLLSTLKPDYSWYTVLDLKDAFFCLPLAPQSQELFAFEWKDPERGISGQLTWTRLPQGFKNSPTLFNEALHRDLTDFRTQHPEVTLLQYVDDLLLAAPTKKACTQGTRHLLQELGEKGYRASAKKAQICQTKVTYLGYILSEGKRWLTPGRIETVARIPPPRNPREVREFLGTAGFCRLWIPGFAELAAPLYALTKPSTPFTWQTEHQLAFEALKKALLSAPALGLPDTSKPFTLFLDERQGIAKGVLTQKLGPWKRPVAYLSKKLDPVAAGWPPCLRIMAATAMLVKDSAKLTLGQPLTVITPHTLEAIVRQPPDRWITNARLTHYQALLLDTDRVQFGPPVTLNPATLLPVPENQPSPHDCRQVLAETHGTREDLKDQELPDADHTWYTDGSSYLDSGTRRAGAAVVDGHNTIWAQSLPPGTSAQKAELIALTKALELSKGKKANIYTDSRYAFATAHTHGSIYERRGWLTSEGKEIKNKAEIIALLKALFLPQEVAIIHCPGHQKGQDPVAVGNRQADRVARQAAMAEVLTLATEPDNTSHITAGKRTADGSEFEKRTADGSEFESPKKKAKVE

SEQ ID NO: 1562 - protein, 2111 aa, synthetic construct
MPAAKRVKLDGGDKKYSIGLDIGTNSVGWAVITDEYKVPSKKFKVLGNTDRHSIKKNLIGALLFDSGETAEATRLKRTARRRYTRRKNRICYLQEIFSNEMAKVDDSFFHRLEESFLVEEDKKHERHPIFGNIVDEVAYHEKYPTIYHLRKKLVDSTDKADLRLIYLALAHMIKFRGHFLIEGDLNPDNSDVDKLFIQLVQTYNQLFEENPINASGVDAKAILSARLSKSRRLENLIAQLPGEKKNGLFGNLIALSLGLTPNFKSNFDLAEDAKLQLSKDTYDDDLDNLLAQIGDQYADLFLAAKNLSDAILLSDILRVNTEITKAPLSASMIKRYDEHHQDLTLLKALVRQQLPEKYKEIFFDQSKNGYAGYIDGGASQEEFYKFIKPILEKMDGTEELLVKLNREDLLRKQRTFDNGSIPHQIHLGELHAILRRQEDFYPFLKDNREKIEKILTFRIPYYVGPLARGNSRFAWMTRKSEETITPWNFEEVVDKGASAQSFIERMTNFDKNLPNEKVLPKHSLLYEYFTVYNELTKVKYVTEGMRKPAFLSGEQKKAIVDLLFKTNRKVTVKQLKEDYFKKIECFDSVEISGVEDRFNASLGTYHDLLKIIKDKDFLDNEENEDILEDIVLTLTLFEDREMIEERLKTYAHLFDDKVMKQLKRRRYTGWGRLSRKLINGIRDKQSGKTILDFLKSDGFANRNFMQLIHDDSLTFKEDIQKAQVSGQGDSLHEHIANLAGSPAIKKGILQTVKVVDELVKVMGRHKPENIVIEMARENQTTQKGQKNSRERMKRIEEGIKELGSQILKEHPVENTQLQNEKLYLYYLQNGRDMYVDQELDINRLSDYDVDHIVPQSFLKDDSIDNKVLTRSDKARGKSDNVPSEEVVKKMKNYWRQLLNAKLITQRKFDNLTKAERGGLSELDKAGFIKRQLVETRQITKHVAQILDSRMNTKYDENDKLIREVKVITLKSKLVSDFRKDFQFYKVREINNYHHAHDAYLNAVVGTALIKKYPKLESEFVYGDYKVYDVRKMIAKSEQEIGKATAKYFFYSNIMNFFKTEITLANGEIRKRPLIETNGETGEIVWDKGRDFATVRKVLSMPQVNIVKKTEVQTGGFSKESILPKRNSDKLIARKKDWDPKKYGGFDSPTVAYSVLVVAKVEKGKSKKLKSVKELLGITIMERSSFEKNPIDFLEAKGYKEVKKDLIIKLPKYSLFELENGRKRMLASAGELQKGNELALPSKYVNFLYLASHYEKLKGSPEDNEQKQLFVEQHKHYLDEIIEQISEFSKRVILADANLDKVLSAYNKHRDKPIREQAENIIHLFTLTNLGAPAAFKYFDTTIDRKRYTSTKEVLDATLIHQSITGLYETRIDLSQLGGDGGEAAAKEAAAKEAAAKEAAAKGGTVSLQDEHRLFDIPVTTSLPDVWLQDFPQAWAETGGLGRAKCQAPIIIDLKPTAVPVSIKQYPMSLEAHMGIRQHIIKFLELGVLRPCRSPWNTPLLPVKKPGTQDYRPVQDLREINKRTVDIHPTVPNPYNLLSTLKPDYSWYTVLDLKDAFFCLPLAPQSQELFAFEWKDPERGISGQLTWTRLPQGFKNSPTLFNEALHRDLTDFRTQHPEVTLLQYVDDLLLAAPTKKACTQGTRHLLQELGEKGYRASAKKAQICQTKVTYLGYILSEGKRWLTPGRIETVARIPPPRNPREVREFLGTAGFCRLWIPGFAELAAPLYALTKPSTPFTWQTEHQLAFEALKKALLSAPALGLPDTSKPFTLFLDERQGIAKGVLTQKLGPWKRPVAYLSKKLDPVAAGWPPCLRIMAATAMLVKDSAKLTLGQPLTVITPHTLEAIVRQPPDRWITNARLTHYQALLLDTDRVQFGPPVTLNPATLLPVPENQPSPHDCRQVLAETHGTREDLKDQELPDADHTWYTDGSSYLDSGTRRAGAAVVDGHNTIWAQSLPPGTSAQKAELIALTKALELSKGKKANIYTDSRYAFATAHTHGSIYERRGWLTSEGKEIKNKAEIIALLKALFLPQEVAIIHCPGHQKGQDPVAVGNRQADRVARQAAMAEVLTLATEPDNTSHITAGKRTADGSEFEKRTADGSEFESPKKKAKVE

SEQ ID NO: 1563 - protein, 2102 aa, synthetic construct
MPAAKRVKLDGGDKKYSIGLDIGTNSVGWAVITDEYKVPSKKFKVLGNTDRHSIKKNLIGALLFDSGETAEATRLKRTARRRYTRRKNRICYLQEIFSNEMAKVDDSFFHRLEESFLVEEDKKHERHPIFGNIVDEVAYHEKYPTIYHLRKKLVDSTDKADLRLIYLALAHMIKFRGHFLIEGDLNPDNSDVDKLFIQLVQTYNQLFEENPINASGVDAKAILSARLSKSRRLENLIAQLPGEKKNGLFGNLIALSLGLTPNFKSNFDLAEDAKLQLSKDTYDDDLDNLLAQIGDQYADLFLAAKNLSDAILLSDILRVNTEITKAPLSASMIKRYDEHHQDLTLLKALVRQQLPEKYKEIFFDQSKNGYAGYIDGGASQEEFYKFIKPILEKMDGTEELLVKLNREDLLRKQRTFDNGSIPHQIHLGELHAILRRQEDFYPFLKDNREKIEKILTFRIPYYVGPLARGNSRFAWMTRKSEETITPWNFEEVVDKGASAQSFIERMTNFDKNLPNEKVLPKHSLLYEYFTVYNELTKVKYVTEGMRKPAFLSGEQKKAIVDLLFKTNRKVTVKQLKEDYFKKIECFDSVEISGVEDRFNASLGTYHDLLKIIKDKDFLDNEENEDILEDIVLTLTLFEDREMIEERLKTYAHLFDDKVMKQLKRRRYTGWGRLSRKLINGIRDKQSGKTILDFLKSDGFANRNFMQLIHDDSLTFKEDIQKAQVSGQGDSLHEHIANLAGSPAIKKGILQTVKVVDELVKVMGRHKPENIVIEMARENQTTQKGQKNSRERMKRIEEGIKELGSQILKEHPVENTQLQNEKLYLYYLQNGRDMYVDQELDINRLSDYDVDHIVPQSFLKDDSIDNKVLTRSDKARGKSDNVPSEEVVKKMKNYWRQLLNAKLITQRKFDNLTKAERGGLSELDKAGFIKRQLVETRQITKHVAQILDSRMNTKYDENDKLIREVKVITLKSKLVSDFRKDFQFYKVREINNYHHAHDAYLNAVVGTALIKKYPKLESEFVYGDYKVYDVRKMIAKSEQEIGKATAKYFFYSNIMNFFKTEITLANGEIRKRPLIETNGETGEIVWDKGRDFATVRKVLSMPQVNIVKKTEVQTGGFSKESILPKRNSDKLIARKKDWDPKKYGGFDSPTVAYSVLVVAKVEKGKSKKLKSVKELLGITIMERSSFEKNPIDFLEAKGYKEVKKDLIIKLPKYSLFELENGRKRMLASAGELQKGNELALPSKYVNFLYLASHYEKLKGSPEDNEQKQLFVEQHKHYLDEIIEQISEFSKRVILADANLDKVLSAYNKHRDKPIREQAENIIHLFTLTNLGAPAAFKYFDTTIDRKRYTSTKEVLDATLIHQSITGLYETRIDLSQLGGDGGGGSEAAAKPAPGGTVSLQDEHRLFDIPVTTSLPDVWLQDFPQAWAETGGLGRAKCQAPIIIDLKPTAVPVSIKQYPMSLEAHMGIRQHIIKFLELGVLRPCRSPWNTPLLPVKKPGTQDYRPVQDLREINKRTVDIHPTVPNPYNLLSTLKPDYSWYTVLDLKDAFFCLPLAPQSQELFAFEWKDPERGISGQLTWTRLPQGFKNSPTLFNEALHRDLTDFRTQHPEVTLLQYVDDLLLAAPTKKACTQGTRHLLQELGEKGYRASAKKAQICQTKVTYLGYILSEGKRWLTPGRIETVARIPPPRNPREVREFLGTAGFCRLWIPGFAELAAPLYALTKPSTPFTWQTEHQLAFEALKKALLSAPALGLPDTSKPFTLFLDERQGIAKGVLTQKLGPWKRPVAYLSKKLDPVAAGWPPCLRIMAATAMLVKDSAKLTLGQPLTVITPHTLEAIVRQPPDRWITNARLTHYQALLLDTDRVQFGPPVTLNPATLLPVPENQPSPHDCRQVLAETHGTREDLKDQELPDADHTWYTDGSSYLDSGTRRAGAAVVDGHNTIWAQSLPPGTSAQKAELIALTKALELSKGKKANIYTDSRYAFATAHTHGSIYERRGWLTSEGKEIKNKAEIIALLKALFLPQEVAIIHCPGHQKGQDPVAVGNRQADRVARQAAMAEVLTLATEPDNTSHITAGKRTADGSEFEKRTADGSEFESPKKKAKVE

SEQ ID NO: 1564 - protein, 2096 aa, synthetic construct
MPAAKRVKLDGGDKKYSIGLDIGTNSVGWAVITDEYKVPSKKFKVLGNTDRHSIKKNLIGALLFDSGETAEATRLKRTARRRYTRRKNRICYLQEIFSNEMAKVDDSFFHRLEESFLVEEDKKHERHPIFGNIVDEVAYHEKYPTIYHLRKKLVDSTDKADLRLIYLALAHMIKFRGHFLIEGDLNPDNSDVDKLFIQLVQTYNQLFEENPINASGVDAKAILSARLSKSRRLENLIAQLPGEKKNGLFGNLIALSLGLTPNFKSNFDLAEDAKLQLSKDTYDDDLDNLLAQIGDQYADLFLAAKNLSDAILLSDILRVNTEITKAPLSASMIKRYDEHHQDLTLLKALVRQQLPEKYKEIFFDQSKNGYAGYIDGGASQEEFYKFIKPILEKMDGTEELLVKLNREDLLRKQRTFDNGSIPHQIHLGELHAILRRQEDFYPFLKDNREKIEKILTFRIPYYVGPLARGNSRFAWMTRKSEETITPWNFEEVVDKGASAQSFIERMTNFDKNLPNEKVLPKHSLLYEYFTVYNELTKVKYVTEGMRKPAFLSGEQKKAIVDLLFKTNRKVTVKQLKEDYFKKIECFDSVEISGVEDRFNASLGTYHDLLKIIKDKDFLDNEENEDILEDIVLTLTLFEDREMIEERLKTYAHLFDDKVMKQLKRRRYTGWGRLSRKLINGIRDKQSGKTILDFLKSDGFANRNFMQLIHDDSLTFKEDIQKAQVSGQGDSLHEHIANLAGSPAIKKGILQTVKVVDELVKVMGRHKPENIVIEMARENQTTQKGQKNSRERMKRIEEGIKELGSQILKEHPVENTQLQNEKLYLYYLQNGRDMYVDQELDINRLSDYDVDHIVPQSFLKDDSIDNKVLTRSDKARGKSDNVPSEEVVKKMKNYWRQLLNAKLITQRKFDNLTKAERGGLSELDKAGFIKRQLVETRQITKHVAQILDSRMNTKYDENDKLIREVKVITLKSKLVSDFRKDFQFYKVREINNYHHAHDAYLNAVVGTALIKKYPKLESEFVYGDYKVYDVRKMIAKSEQEIGKATAKYFFYSNIMNFFKTEITLANGEIRKRPLIETNGETGEIVWDKGRDFATVRKVLSMPQVNIVKKTEVQTGGFSKESILPKRNSDKLIARKKDWDPKKYGGFDSPTVAYSVLVVAKVEKGKSKKLKSVKELLGITIMERSSFEKNPIDFLEAKGYKEVKKDLIIKLPKYSLFELENGRKRMLASAGELQKGNELALPSKYVNFLYLASHYEKLKGSPEDNEQKQLFVEQHKHYLDEIIEQISEFSKRVILADANLDKVLSAYNKHRDKPIREQAENIIHLFTLTNLGAPAAFKYFDTTIDRKRYTSTKEVLDATLIHQSITGLYETRIDLSQLGGDGGPAPAPGGTVSLQDEHRLFDIPVTTSLPDVWLQDFPQAWAETGGLGRAKCQAPIIIDLKPTAVPVSIKQYPMSLEAHMGIRQHIIKFLELGVLRPCRSPWNTPLLPVKKPGTQDYRPVQDLREINKRTVDIHPTVPNPYNLLSTLKPDYSWYTVLDLKDAFFCLPLAPQSQELFAFEWKDPERGISGQLTWTRLPQGFKNSPTLFNEALHRDLTDFRTQHPEVTLLQYVDDLLLAAPTKKACTQGTRHLLQELGEKGYRASAKKAQICQTKVTYLGYILSEGKRWLTPGRIETVARIPPPRNPREVREFLGTAGFCRLWIPGFAELAAPLYALTKPSTPFTWQTEHQLAFEALKKALLSAPALGLPDTSKPFTLFLDERQGIAKGVLTQKLGPWKRPVAYLSKKLDPVAAGWPPCLRIMAATAMLVKDSAKLTLGQPLTVITPHTLEAIVRQPPDRWITNARLTHYQALLLDTDRVQFGPPVTLNPATLLPVPENQPSPHDCRQVLAETHGTREDLKDQELPDADHTWYTDGSSYLDSGTRRAGAAVVDGHNTIWAQSLPPGTSAQKAELIALTKALELSKGKKANIYTDSRYAFATAHTHGSIYERRGWLTSEGKEIKNKAEIIALLKALFLPQEVAIIHCPGHQKGQDPVAVGNRQADRVARQAAMAEVLTLATEPDNTSHITAGKRTADGSEFEKRTADGSEFESPKKKAKVE

SEQ ID NO: 1565 - protein, 2097 aa, synthetic construct
MPAAKRVKLDGGDKKYSIGLDIGTNSVGWAVITDEYKVPSKKFKVLGNTDRHSIKKNLIGALLFDSGETAEATRLKRTARRRYTRRKNRICYLQEIFSNEMAKVDDSFFHRLEESFLVEEDKKHERHPIFGNIVDEVAYHEKYPTIYHLRKKLVDSTDKADLRLIYLALAHMIKFRGHFLIEGDLNPDNSDVDKLFIQLVQTYNQLFEENPINASGVDAKAILSARLSKSRRLENLIAQLPGEKKNGLFGNLIALSLGLTPNFKSNFDLAEDAKLQLSKDTYDDDLDNLLAQIGDQYADLFLAAKNLSDAILLSDILRVNTEITKAPLSASMIKRYDEHHQDLTLLKALVRQQLPEKYKEIFFDQSKNGYAGYIDGGASQEEFYKFIKPILEKMDGTEELLVKLNREDLLRKQRTFDNGSIPHQIHLGELHAILRRQEDFYPFLKDNREKIEKILTFRIPYYVGPLARGNSRFAWMTRKSEETITPWNFEEVVDKGASAQSFIERMTNFDKNLPNEKVLPKHSLLYEYFTVYNELTKVKYVTEGMRKPAFLSGEQKKAIVDLLFKTNRKVTVKQLKEDYFKKIECFDSVEISGVEDRFNASLGTYHDLLKIIKDKDFLDNEENEDILEDIVLTLTLFEDREMIEERLKTYAHLFDDKVMKQLKRRRYTGWGRLSRKLINGIRDKQSGKTILDFLKSDGFANRNFMQLIHDDSLTFKEDIQKAQVSGQGDSLHEHIANLAGSPAIKKGILQTVKVVDELVKVMGRHKPENIVIEMARENQTTQKGQKNSRERMKRIEEGIKELGSQILKEHPVENTQLQNEKLYLYYLQNGRDMYVDQELDINRLSDYDVDHIVPQSFLKDDSIDNKVLTRSDKARGKSDNVPSEEVVKKMKNYWRQLLNAKLITQRKFDNLTKAERGGLSELDKAGFIKRQLVETRQITKHVAQILDSRMNTKYDENDKLIREVKVITLKSKLVSDFRKDFQFYKVREINNYHHAHDAYLNAVVGTALIKKYPKLESEFVYGDYKVYDVRKMIAKSEQEIGKATAKYFFYSNIMNFFKTEITLANGEIRKRPLIETNGETGEIVWDKGRDFATVRKVLSMPQVNIVKKTEVQTGGFSKESILPKRNSDKLIARKKDWDPKKYGGFDSPTVAYSVLVVAKVEKGKSKKLKSVKELLGITIMERSSFEKNPIDFLEAKGYKEVKKDLIIKLPKYSLFELENGRKRMLASAGELQKGNELALPSKYVNFLYLASHYEKLKGSPEDNEQKQLFVEQHKHYLDEIIEQISEFSKRVILADANLDKVLSAYNKHRDKPIREQAENIIHLFTLTNLGAPAAFKYFDTTIDRKRYTSTKEVLDATLIHQSITGLYETRIDLSQLGGDGGGGGGSSGGTVSLQDEHRLFDIPVTTSLPDVWLQDFPQAWAETGGLGRAKCQAPIIIDLKPTAVPVSIKQYPMSLEAHMGIRQHIIKFLELGVLRPCRSPWNTPLLPVKKPGTQDYRPVQDLREINKRTVDIHPTVPNPYNLLSTLKPDYSWYTVLDLKDAFFCLPLAPQSQELFAFEWKDPERGISGQLTWTRLPQGFKNSPTLFNEALHRDLTDFRTQHPEVTLLQYVDDLLLAAPTKKACTQGTRHLLQELGEKGYRASAKKAQICQTKVTYLGYILSEGKRWLTPGRIETVARIPPPRNPREVREFLGTAGFCRLWIPGFAELAAPLYALTKPSTPFTWQTEHQLAFEALKKALLSAPALGLPDTSKPFTLFLDERQGIAKGVLTQKLGPWKRPVAYLSKKLDPVAAGWPPCLRIMAATAMLVKDSAKLTLGQPLTVITPHTLEAIVRQPPDRWITNARLTHYQALLLDTDRVQFGPPVTLNPATLLPVPENQPSPHDCRQVLAETHGTREDLKDQELPDADHTWYTDGSSYLDSGTRRAGAAVVDGHNTIWAQSLPPGTSAQKAELIALTKALELSKGKKANIYTDSRYAFATAHTHGSIYERRGWLTSEGKEIKNKAEIIALLKALFLPQEVAIIHCPGHQKGQDPVAVGNRQADRVARQAAMAEVLTLATEPDNTSHITAGKRTADGSEFEKRTADGSEFESPKKKAKVE

SEQ ID NO: 1566 - protein, 2099 aa, synthetic construct
MPAAKRVKLDGGDKKYSIGLDIGTNSVGWAVITDEYKVPSKKFKVLGNTDRHSIKKNLIGALLFDSGETAEATRLKRTARRRYTRRKNRICYLQEIFSNEMAKVDDSFFHRLEESFLVEEDKKHERHPIFGNIVDEVAYHEKYPTIYHLRKKLVDSTDKADLRLIYLALAHMIKFRGHFLIEGDLNPDNSDVDKLFIQLVQTYNQLFEENPINASGVDAKAILSARLSKSRRLENLIAQLPGEKKNGLFGNLIALSLGLTPNFKSNFDLAEDAKLQLSKDTYDDDLDNLLAQIGDQYADLFLAAKNLSDAILLSDILRVNTEITKAPLSASMIKRYDEHHQDLTLLKALVRQQLPEKYKEIFFDQSKNGYAGYIDGGASQEEFYKFIKPILEKMDGTEELLVKLNREDLLRKQRTFDNGSIPHQIHLGELHAILRRQEDFYPFLKDNREKIEKILTFRIPYYVGPLARGNSRFAWMTRKSEETITPWNFEEVVDKGASAQSFIERMTNFDKNLPNEKVLPKHSLLYEYFTVYNELTKVKYVTEGMRKPAFLSGEQKKAIVDLLFKTNRKVTVKQLKEDYFKKIECFDSVEISGVEDRFNASLGTYHDLLKIIKDKDFLDNEENEDILEDIVLTLTLFEDREMIEERLKTYAHLFDDKVMKQLKRRRYTGWGRLSRKLINGIRDKQSGKTILDFLKSDGFANRNFMQLIHDDSLTFKEDIQKAQVSGQGDSLHEHIANLAGSPAIKKGILQTVKVVDELVKVMGRHKPENIVIEMARENQTTQKGQKNSRERMKRIEEGIKELGSQILKEHPVENTQLQNEKLYLYYLQNGRDMYVDQELDINRLSDYDVDHIVPQSFLKDDSIDNKVLTRSDKARGKSDNVPSEEVVKKMKNYWRQLLNAKLITQRKFDNLTKAERGGLSELDKAGFIKRQLVETRQITKHVAQILDSRMNTKYDENDKLIREVKVITLKSKLVSDFRKDFQFYKVREINNYHHAHDAYLNAVVGTALIKKYPKLESEFVYGDYKVYDVRKMIAKSEQEIGKATAKYFFYSNIMNFFKTEITLANGEIRKRPLIETNGETGEIVWDKGRDFATVRKVLSMPQVNIVKKTEVQTGGFSKESILPKRNSDKLIARKKDWDPKKYGGFDSPTVAYSVLVVAKVEKGKSKKLKSVKELLGITIMERSSFEKNPIDFLEAKGYKEVKKDLIIKLPKYSLFELENGRKRMLASAGELQKGNELALPSKYVNFLYLASHYEKLKGSPEDNEQKQLFVEQHKHYLDEIIEQISEFSKRVILADANLDKVLSAYNKHRDKPIREQAENIIHLFTLTNLGAPAAFKYFDTTIDRKRYTSTKEVLDATLIHQSITGLYETRIDLSQLGGDGGGGGEAAAKGGTVSLQDEHRLFDIPVTTSLPDVWLQDFPQAWAETGGLGRAKCQAPIIIDLKPTAVPVSIKQYPMSLEAHMGIRQHIIKFLELGVLRPCRSPWNTPLLPVKKPGTQDYRPVQDLREINKRTVDIHPTVPNPYNLLSTLKPDYSWYTVLDLKDAFFCLPLAPQSQELFAFEWKDPERGISGQLTWTRLPQGFKNSPTLFNEALHRDLTDFRTQHPEVTLLQYVDDLLLAAPTKKACTQGTRHLLQELGEKGYRASAKKAQICQTKVTYLGYILSEGKRWLTPGRIETVARIPPPRNPREVREFLGTAGFCRLWIPGFAELAAPLYALTKPSTPFTWQTEHQLAFEALKKALLSAPALGLPDTSKPFTLFLDERQGIAKGVLTQKLGPWKRPVAYLSKKLDPVAAGWPPCLRIMAATAMLVKDSAKLTLGQPLTVITPHTLEAIVRQPPDRWITNARLTHYQALLLDTDRVQFGPPVTLNPATLLPVPENQPSPHDCRQVLAETHGTREDLKDQELPDADHTWYTDGSSYLDSGTRRAGAAVVDGHNTIWAQSLPPGTSAQKAELIALTKALELSKGKKANIYTDSRYAFATAHTHGSIYERRGWLTSEGKEIKNKAEIIALLKALFLPQEVAIIHCPGHQKGQDPVAVGNRQADRVARQAAMAEVLTLATEPDNTSHITAGKRTADGSEFEKRTADGSEFESPKKKAKVE

SEQ ID NO: 1567 - protein, 2102 aa, synthetic construct
MPAAKRVKLDGGDKKYSIGLDIGTNSVGWAVITDEYKVPSKKFKVLGNTDRHSIKKNLIGALLFDSGETAEATRLKRTARRRYTRRKNRICYLQEIFSNEMAKVDDSFFHRLEESFLVEEDKKHERHPIFGNIVDEVAYHEKYPTIYHLRKKLVDSTDKADLRLIYLALAHMIKFRGHFLIEGDLNPDNSDVDKLFIQLVQTYNQLFEENPINASGVDAKAILSARLSKSRRLENLIAQLPGEKKNGLFGNLIALSLGLTPNFKSNFDLAEDAKLQLSKDTYDDDLDNLLAQIGDQYADLFLAAKNLSDAILLSDILRVNTEITKAPLSASMIKRYDEHHQDLTLLKALVRQQLPEKYKEIFFDQSKNGYAGYIDGGASQEEFYKFIKPILEKMDGTEELLVKLNREDLLRKQRTFDNGSIPHQIHLGELHAILRRQEDFYPFLKDNREKIEKILTFRIPYYVGPLARGNSRFAWMTRKSEETITPWNFEEVVDKGASAQSFIERMTNFDKNLPNEKVLPKHSLLYEYFTVYNELTKVKYVTEGMRKPAFLSGEQKKAIVDLLFKTNRKVTVKQLKEDYFKKIECFDSVEISGVEDRFNASLGTYHDLLKIIKDKDFLDNEENEDILEDIVLTLTLFEDREMIEERLKTYAHLFDDKVMKQLKRRRYTGWGRLSRKLINGIRDKQSGKTILDFLKSDGFANRNFMQLIHDDSLTFKEDIQKAQVSGQGDSLHEHIANLAGSPAIKKGILQTVKVVDELVKVMGRHKPENIVIEMARENQTTQKGQKNSRERMKRIEEGIKELGSQILKEHPVENTQLQNEKLYLYYLQNGRDMYVDQELDINRLSDYDVDHIVPQSFLKDDSIDNKVLTRSDKARGKSDNVPSEEVVKKMKNYWRQLLNAKLITQRKFDNLTKAERGGLSELDKAGFIKRQLVETRQITKHVAQILDSRMNTKYDENDKLIREVKVITLKSKLVSDFRKDFQFYKVREINNYHHAHDAYLNAVVGTALIKKYPKLESEFVYGDYKVYDVRKMIAKSEQEIGKATAKYFFYSNIMNFFKTEITLANGEIRKRPLIETNGETGEIVWDKGRDFATVRKVLSMPQVNIVKKTEVQTGGFSKESILPKRNSDKLIARKKDWDPKKYGGFDSPTVAYSVLVVAKVEKGKSKKLKSVKELLGITIMERSSFEKNPIDFLEAKGYKEVKKDLIIKLPKYSLFELENGRKRMLASAGELQKGNELALPSKYVNFLYLASHYEKLKGSPEDNEQKQLFVEQHKHYLDEIIEQISEFSKRVILADANLDKVLSAYNKHRDKPIREQAENIIHLFTLTNLGAPAAFKYFDTTIDRKRYTSTKEVLDATLIHQSITGLYETRIDLSQLGGDGGGSSGGSEAAAKGGTVSLQDEHRLFDIPVTTSLPDVWLQDFPQAWAETGGLGRAKCQAPIIIDLKPTAVPVSIKQYPMSLEAHMGIRQHIIKFLELGVLRPCRSPWNTPLLPVKKPGTQDYRPVQDLREINKRTVDIHPTVPNPYNLLSTLKPDYSWYTVLDLKDAFFCLPLAPQSQELFAFEWKDPERGISGQLTWTRLPQGFKNSPTLFNEALHRDLTDFRTQHPEVTLLQYVDDLLLAAPTKKACTQGTRHLLQELGEKGYRASAKKAQICQTKVTYLGYILSEGKRWLTPGRIETVARIPPPRNPREVREFLGTAGFCRLWIPGFAELAAPLYALTKPSTPFTWQTEHQLAFEALKKALLSAPALGLPDTSKPFTLFLDERQGIAKGVLTQKLGPWKRPVAYLSKKLDPVAAGWPPCLRIMAATAMLVKDSAKLTLGQPLTVITPHTLEAIVRQPPDRWITNARLTHYQALLLDTDRVQFGPPVTLNPATLLPVPENQPSPHDCRQVLAETHGTREDLKDQELPDADHTWYTDGSSYLDSGTRRAGAAVVDGHNTIWAQSLPPGTSAQKAELIALTKALELSKGKKANIYTDSRYAFATAHTHGSIYERRGWLTSEGKEIKNKAEIIALLKALFLPQEVAIIHCPGHQKGQDPVAVGNRQADRVARQAAMAEVLTLATEPDNTSHITAGKRTADGSEFEKRTADGSEFESPKKKAKVE

SEQ ID NO: 1568 - protein, 2100 aa, synthetic construct
MPAAKRVKLDGGDKKYSIGLDIGTNSVGWAVITDEYKVPSKKFKVLGNTDRHSIKKNLIGALLFDSGETAEATRLKRTARRRYTRRKNRICYLQEIFSNEMAKVDDSFFHRLEESFLVEEDKKHERHPIFGNIVDEVAYHEKYPTIYHLRKKLVDSTDKADLRLIYLALAHMIKFRGHFLIEGDLNPDNSDVDKLFIQLVQTYNQLFEENPINASGVDAKAILSARLSKSRRLENLIAQLPGEKKNGLFGNLIALSLGLTPNFKSNFDLAEDAKLQLSKDTYDDDLDNLLAQIGDQYADLFLAAKNLSDAILLSDILRVNTEITKAPLSASMIKRYDEHHQDLTLLKALVRQQLPEKYKEIFFDQSKNGYAGYIDGGASQEEFYKFIKPILEKMDGTEELLVKLNREDLLRKQRTFDNGSIPHQIHLGELHAILRRQEDFYPFLKDNREKIEKILTFRIPYYVGPLARGNSRFAWMTRKSEETITPWNFEEVVDKGASAQSFIERMTNFDKNLPNEKVLPKHSLLYEYFTVYNELTKVKYVTEGMRKPAFLSGEQKKAIVDLLFKTNRKVTVKQLKEDYFKKIECFDSVEISGVEDRFNASLGTYHDLLKIIKDKDFLDNEENEDILEDIVLTLTLFEDREMIEERLKTYAHLFDDKVMKQLKRRRYTGWGRLSRKLINGIRDKQSGKTILDFLKSDGFANRNFMQLIHDDSLTFKEDIQKAQVSGQGDSLHEHIANLAGSPAIKKGILQTVKVVDELVKVMGRHKPENIVIEMARENQTTQKGQKNSRERMKRIEEGIKELGSQILKEHPVENTQLQNEKLYLYYLQNGRDMYVDQELDINRLSDYDVDHIVPQSFLKDDSIDNKVLTRSDKARGKSDNVPSEEVVKKMKNYWRQLLNAKLITQRKFDNLTKAERGGLSELDKAGFIKRQLVETRQITKHVAQILDSRMNTKYDENDKLIREVKVITLKSKLVSDFRKDFQFYKVREINNYHHAHDAYLNAVVGTALIKKYPKLESEFVYGDYKVYDVRKMIAKSEQEIGKATAKYFFYSNIMNFFKTEITLANGEIRKRPLIETNGETGEIVWDKGRDFATVRKVLSMPQVNIVKKTEVQTGGFSKESILPKRNSDKLIARKKDWDPKKYGGFDSPTVAYSVLVVAKVEKGKSKKLKSVKELLGITIMERSSFEKNPIDFLEAKGYKEVKKDLIIKLPKYSLFELENGRKRMLASAGELQKGNELALPSKYVNFLYLASHYEKLKGSPEDNEQKQLFVEQHKHYLDEIIEQISEFSKRVILADANLDKVLSAYNKHRDKPIREQAENIIHLFTLTNLGAPAAFKYFDTTIDRKRYTSTKEVLDATLIHQSITGLYETRIDLSQLGGDGGPAPGSSGGGGGTVSLQDEHRLFDIPVTTSLPDVWLQDFPQAWAETGGLGRAKCQAPIIIDLKPTAVPVSIKQYPMSLEAHMGIRQHIIKFLELGVLRPCRSPWNTPLLPVKKPGTQDYRPVQDLREINKRTVDIHPTVPNPYNLLSTLKPDYSWYTVLDLKDAFFCLPLAPQSQELFAFEWKDPERGISGQLTWTRLPQGFKNSPTLFNEALHRDLTDFRTQHPEVTLLQYVDDLLLAAPTKKACTQGTRHLLQELGEKGYRASAKKAQICQTKVTYLGYILSEGKRWLTPGRIETVARIPPPRNPREVREFLGTAGFCRLWIPGFAELAAPLYALTKPSTPFTWQTEHQLAFEALKKALLSAPALGLPDTSKPFTLFLDERQGIAKGVLTQKLGPWKRPVAYLSKKLDPVAAGWPPCLRIMAATAMLVKDSAKLTLGQPLTVITPHTLEAIVRQPPDRWITNARLTHYQALLLDTDRVQFGPPVTLNPATLLPVPENQPSPHDCRQVLAETHGTREDLKDQELPDADHTWYTDGSSYLDSGTRRAGAAVVDGHNTIWAQSLPPGTSAQKAELIALTKALELSKGKKANIYTDSRYAFATAHTHGSIYERRGWLTSEGKEIKNKAEIIALLKALFLPQEVAIIHCPGHQKGQDPVAVGNRQADRVARQAAMAEVLTLATEPDNTSHITAGKRTADGSEFEKRTADGSEFESPKKKAKVE

SEQ ID NO: 1569 - protein, 2099 aa, synthetic construct
MPAAKRVKLDGGDKKYSIGLDIGTNSVGWAVITDEYKVPSKKFKVLGNTDRHSIKKNLIGALLFDSGETAEATRLKRTARRRYTRRKNRICYLQEIFSNEMAKVDDSFFHRLEESFLVEEDKKHERHPIFGNIVDEVAYHEKYPTIYHLRKKLVDSTDKADLRLIYLALAHMIKFRGHFLIEGDLNPDNSDVDKLFIQLVQTYNQLFEENPINASGVDAKAILSARLSKSRRLENLIAQLPGEKKNGLFGNLIALSLGLTPNFKSNFDLAEDAKLQLSKDTYDDDLDNLLAQIGDQYADLFLAAKNLSDAILLSDILRVNTEITKAPLSASMIKRYDEHHQDLTLLKALVRQQLPEKYKEIFFDQSKNGYAGYIDGGASQEEFYKFIKPILEKMDGTEELLVKLNREDLLRKQRTFDNGSIPHQIHLGELHAILRRQEDFYPFLKDNREKIEKILTFRIPYYVGPLARGNSRFAWMTRKSEETITPWNFEEVVDKGASAQSFIERMTNFDKNLPNEKVLPKHSLLYEYFTVYNELTKVKYVTEGMRKPAFLSGEQKKAIVDLLFKTNRKVTVKQLKEDYFKKIECFDSVEISGVEDRFNASLGTYHDLLKIIKDKDFLDNEENEDILEDIVLTLTLFEDREMIEERLKTYAHLFDDKVMKQLKRRRYTGWGRLSRKLINGIRDKQSGKTILDFLKSDGFANRNFMQLIHDDSLTFKEDIQKAQVSGQGDSLHEHIANLAGSPAIKKGILQTVKVVDELVKVMGRHKPENIVIEMARENQTTQKGQKNSRERMKRIEEGIKELGSQILKEHPVENTQLQNEKLYLYYLQNGRDMYVDQELDINRLSDYDVDHIVPQSFLKDDSIDNKVLTRSDKARGKSDNVPSEEVVKKMKNYWRQLLNAKLITQRKFDNLTKAERGGLSELDKAGFIKRQLVETRQITKHVAQILDSRMNTKYDENDKLIREVKVITLKSKLVSDFRKDFQFYKVREINNYHHAHDAYLNAVVGTALIKKYPKLESEFVYGDYKVYDVRKMIAKSEQEIGKATAKYFFYSNIMNFFKTEITLANGEIRKRPLIETNGETGEIVWDKGRDFATVRKVLSMPQVNIVKKTEVQTGGFSKESILPKRNSDKLIARKKDWDPKKYGGFDSPTVAYSVLVVAKVEKGKSKKLKSVKELLGITIMERSSFEKNPIDFLEAKGYKEVKKDLIIKLPKYSLFELENGRKRMLASAGELQKGNELALPSKYVNFLYLASHYEKLKGSPEDNEQKQLFVEQHKHYLDEIIEQISEFSKRVILADANLDKVLSAYNKHRDKPIREQAENIIHLFTLTNLGAPAAFKYFDTTIDRKRYTSTKEVLDATLIHQSITGLYETRIDLSQLGGDGGPAPEAAAKGGTVSLQDEHRLFDIPVTTSLPDVWLQDFPQAWAETGGLGRAKCQAPIIIDLKPTAVPVSIKQYPMSLEAHMGIRQHIIKFLELGVLRPCRSPWNTPLLPVKKPGTQDYRPVQDLREINKRTVDIHPTVPNPYNLLSTLKPDYSWYTVLDLKDAFFCLPLAPQSQELFAFEWKDPERGISGQLTWTRLPQGFKNSPTLFNEALHRDLTDFRTQHPEVTLLQYVDDLLLAAPTKKACTQGTRHLLQELGEKGYRASAKKAQICQTKVTYLGYILSEGKRWLTPGRIETVARIPPPRNPREVREFLGTAGFCRLWIPGFAELAAPLYALTKPSTPFTWQTEHQLAFEALKKALLSAPALGLPDTSKPFTLFLDERQGIAKGVLTQKLGPWKRPVAYLSKKLDPVAAGWPPCLRIMAATAMLVKDSAKLTLGQPLTVITPHTLEAIVRQPPDRWITNARLTHYQALLLDTDRVQFGPPVTLNPATLLPVPENQPSPHDCRQVLAETHGTREDLKDQELPDADHTWYTDGSSYLDSGTRRAGAAVVDGHNTIWAQSLPPGTSAQKAELIALTKALELSKGKKANIYTDSRYAFATAHTHGSIYERRGWLTSEGKEIKNKAEIIALLKALFLPQEVAIIHCPGHQKGQDPVAVGNRQADRVARQAAMAEVLTLATEPDNTSHITAGKRTADGSEFEKRTADGSEFESPKKKAKVE

SEQ ID NO: 1570 - protein, 2107 aa, synthetic construct
MPAAKRVKLDGGDKKYSIGLDIGTNSVGWAVITDEYKVPSKKFKVLGNTDRHSIKKNLIGALLFDSGETAEATRLKRTARRRYTRRKNRICYLQEIFSNEMAKVDDSFFHRLEESFLVEEDKKHERHPIFGNIVDEVAYHEKYPTIYHLRKKLVDSTDKADLRLIYLALAHMIKFRGHFLIEGDLNPDNSDVDKLFIQLVQTYNQLFEENPINASGVDAKAILSARLSKSRRLENLIAQLPGEKKNGLFGNLIALSLGLTPNFKSNFDLAEDAKLQLSKDTYDDDLDNLLAQIGDQYADLFLAAKNLSDAILLSDILRVNTEITKAPLSASMIKRYDEHHQDLTLLKALVRQQLPEKYKEIFFDQSKNGYAGYIDGGASQEEFYKFIKPILEKMDGTEELLVKLNREDLLRKQRTFDNGSIPHQIHLGELHAILRRQEDFYPFLKDNREKIEKILTFRIPYYVGPLARGNSRFAWMTRKSEETITPWNFEEVVDKGASAQSFIERMTNFDKNLPNEKVLPKHSLLYEYFTVYNELTKVKYVTEGMRKPAFLSGEQKKAIVDLLFKTNRKVTVKQLKEDYFKKIECFDSVEISGVEDRFNASLGTYHDLLKIIKDKDFLDNEENEDILEDIVLTLTLFEDREMIEERLKTYAHLFDDKVMKQLKRRRYTGWGRLSRKLINGIRDKQSGKTILDFLKSDGFANRNFMQLIHDDSLTFKEDIQKAQVSGQGDSLHEHIANLAGSPAIKKGILQTVKVVDELVKVMGRHKPENIVIEMARENQTTQKGQKNSRERMKRIEEGIKELGSQILKEHPVENTQLQNEKLYLYYLQNGRDMYVDQELDINRLSDYDVDHIVPQSFLKDDSIDNKVLTRSDKARGKSDNVPSEEVVKKMKNYWRQLLNAKLITQRKFDNLTKAERGGLSELDKAGFIKRQLVETRQITKHVAQILDSRMNTKYDENDKLIREVKVITLKSKLVSDFRKDFQFYKVREINNYHHAHDAYLNAVVGTALIKKYPKLESEFVYGDYKVYDVRKMIAKSEQEIGKATAKYFFYSNIMNFFKTEITLANGEIRKRPLIETNGETGEIVWDKGRDFATVRKVLSMPQVNIVKKTEVQTGGFSKESILPKRNSDKLIARKKDWDPKKYGGFDSPTVAYSVLVVAKVEKGKSKKLKSVKELLGITIMERSSFEKNPIDFLEAKGYKEVKKDLIIKLPKYSLFELENGRKRMLASAGELQKGNELALPSKYVNFLYLASHYEKLKGSPEDNEQKQLFVEQHKHYLDEIIEQISEFSKRVILADANLDKVLSAYNKHRDKPIREQAENIIHLFTLTNLGAPAAFKYFDTTIDRKRYTSTKEVLDATLIHQSITGLYETRIDLSQLGGDGGSGSETPGTSESATPESGGTVSLQDEHRLFDIPVTTSLPDVWLQDFPQAWAETGGLGRAKCQAPIIIDLKPTAVPVSIKQYPMSLEAHMGIRQHIIKFLELGVLRPCRSPWNTPLLPVKKPGTQDYRPVQDLREINKRTVDIHPTVPNPYNLLSTLKPDYSWYTVLDLKDAFFCLPLAPQSQELFAFEWKDPERGISGQLTWTRLPQGFKNSPTLFNEALHRDLTDFRTQHPEVTLLQYVDDLLLAAPTKKACTQGTRHLLQELGEKGYRASAKKAQICQTKVTYLGYILSEGKRWLTPGRIETVARIPPPRNPREVREFLGTAGFCRLWIPGFAELAAPLYALTKPSTPFTWQTEHQLAFEALKKALLSAPALGLPDTSKPFTLFLDERQGIAKGVLTQKLGPWKRPVAYLSKKLDPVAAGWPPCLRIMAATAMLVKDSAKLTLGQPLTVITPHTLEAIVRQPPDRWITNARLTHYQALLLDTDRVQFGPPVTLNPATLLPVPENQPSPHDCRQVLAETHGTREDLKDQELPDADHTWYTDGSSYLDSGTRRAGAAVVDGHNTIWAQSLPPGTSAQKAELIALTKALELSKGKKANIYTDSRYAFATAHTHGSIYERRGWLTSEGKEIKNKAEIIALLKALFLPQEVAIIHCPGHQKGQDPVAVGNRQADRVARQAAMAEVLTLATEPDNTSHITAGKRTADGSEFEKRTADGSEFESPKKKAKVE

SEQ ID NO: 1571 - protein, 2102 aa, synthetic construct
MPAAKRVKLDGGDKKYSIGLDIGTNSVGWAVITDEYKVPSKKFKVLGNTDRHSIKKNLIGALLFDSGETAEATRLKRTARRRYTRRKNRICYLQEIFSNEMAKVDDSFFHRLEESFLVEEDKKHERHPIFGNIVDEVAYHEKYPTIYHLRKKLVDSTDKADLRLIYLALAHMIKFRGHFLIEGDLNPDNSDVDKLFIQLVQTYNQLFEENPINASGVDAKAILSARLSKSRRLENLIAQLPGEKKNGLFGNLIALSLGLTPNFKSNFDLAEDAKLQLSKDTYDDDLDNLLAQIGDQYADLFLAAKNLSDAILLSDILRVNTEITKAPLSASMIKRYDEHHQDLTLLKALVRQQLPEKYKEIFFDQSKNGYAGYIDGGASQEEFYKFIKPILEKMDGTEELLVKLNREDLLRKQRTFDNGSIPHQIHLGELHAILRRQEDFYPFLKDNREKIEKILTFRIPYYVGPLARGNSRFAWMTRKSEETITPWNFEEVVDKGASAQSFIERMTNFDKNLPNEKVLPKHSLLYEYFTVYNELTKVKYVTEGMRKPAFLSGEQKKAIVDLLFKTNRKVTVKQLKEDYFKKIECFDSVEISGVEDRFNASLGTYHDLLKIIKDKDFLDNEENEDILEDIVLTLTLFEDREMIEERLKTYAHLFDDKVMKQLKRRRYTGWGRLSRKLINGIRDKQSGKTILDFLKSDGFANRNFMQLIHDDSLTFKEDIQKAQVSGQGDSLHEHIANLAGSPAIKKGILQTVKVVDELVKVMGRHKPENIVIEMARENQTTQKGQKNSRERMKRIEEGIKELGSQILKEHPVENTQLQNEKLYLYYLQNGRDMYVDQELDINRLSDYDVDHIVPQSFLKDDSIDNKVLTRSDKARGKSDNVPSEEVVKKMKNYWRQLLNAKLITQRKFDNLTKAERGGLSELDKAGFIKRQLVETRQITKHVAQILDSRMNTKYDENDKLIREVKVITLKSKLVSDFRKDFQFYKVREINNYHHAHDAYLNAVVGTALIKKYPKLESEFVYGDYKVYDVRKMIAKSEQEIGKATAKYFFYSNIMNFFKTEITLANGEIRKRPLIETNGETGEIVWDKGRDFATVRKVLSMPQVNIVKKTEVQTGGFSKESILPKRNSDKLIARKKDWDPKKYGGFDSPTVAYSVLVVAKVEKGKSKKLKSVKELLGITIMERSSFEKNPIDFLEAKGYKEVKKDLIIKLPKYSLFELENGRKRMLASAGELQKGNELALPSKYVNFLYLASHYEKLKGSPEDNEQKQLFVEQHKHYLDEIIEQISEFSKRVILADANLDKVLSAYNKHRDKPIREQAENIIHLFTLTNLGAPAAFKYFDTTIDRKRYTSTKEVLDATLIHQSITGLYETRIDLSQLGGDGGEAAAKGSSPAPGGTVSLQDEHRLFDIPVTTSLPDVWLQDFPQAWAETGGLGRAKCQAPIIIDLKPTAVPVSIKQYPMSLEAHMGIRQHIIKFLELGVLRPCRSPWNTPLLPVKKPGTQDYRPVQDLREINKRTVDIHPTVPNPYNLLSTLKPDYSWYTVLDLKDAFFCLPLAPQSQELFAFEWKDPERGISGQLTWTRLPQGFKNSPTLFNEALHRDLTDFRTQHPEVTLLQYVDDLLLAAPTKKACTQGTRHLLQELGEKGYRASAKKAQICQTKVTYLGYILSEGKRWLTPGRIETVARIPPPRNPREVREFLGTAGFCRLWIPGFAELAAPLYALTKPSTPFTWQTEHQLAFEALKKALLSAPALGLPDTSKPFTLFLDERQGIAKGVLTQKLGPWKRPVAYLSKKLDPVAAGWPPCLRIMAATAMLVKDSAKLTLGQPLTVITPHTLEAIVRQPPDRWITNARLTHYQALLLDTDRVQFGPPVTLNPATLLPVPENQPSPHDCRQVLAETHGTREDLKDQELPDADHTWYTDGSSYLDSGTRRAGAAVVDGHNTIWAQSLPPGTSAQKAELIALTKALELSKGKKANIYTDSRYAFATAHTHGSIYERRGWLTSEGKEIKNKAEIIALLKALFLPQEVAIIHCPGHQKGQDPVAVGNRQADRVARQAAMAEVLTLATEPDNTSHITAGKRTADGSEFEKRTADGSEFESPKKKAKVE

SEQ ID NO: 1572 - protein, 2097 aa, synthetic construct
MPAAKRVKLDGGDKKYSIGLDIGTNSVGWAVITDEYKVPSKKFKVLGNTDRHSIKKNLIGALLFDSGETAEATRLKRTARRRYTRRKNRICYLQEIFSNEMAKVDDSFFHRLEESFLVEEDKKHERHPIFGNIVDEVAYHEKYPTIYHLRKKLVDSTDKADLRLIYLALAHMIKFRGHFLIEGDLNPDNSDVDKLFIQLVQTYNQLFEENPINASGVDAKAILSARLSKSRRLENLIAQLPGEKKNGLFGNLIALSLGLTPNFKSNFDLAEDAKLQLSKDTYDDDLDNLLAQIGDQYADLFLAAKNLSDAILLSDILRVNTEITKAPLSASMIKRYDEHHQDLTLLKALVRQQLPEKYKEIFFDQSKNGYAGYIDGGASQEEFYKFIKPILEKMDGTEELLVKLNREDLLRKQRTFDNGSIPHQIHLGELHAILRRQEDFYPFLKDNREKIEKILTFRIPYYVGPLARGNSRFAWMTRKSEETITPWNFEEVVDKGASAQSFIERMTNFDKNLPNEKVLPKHSLLYEYFTVYNELTKVKYVTEGMRKPAFLSGEQKKAIVDLLFKTNRKVTVKQLKEDYFKKIECFDSVEISGVEDRFNASLGTYHDLLKIIKDKDFLDNEENEDILEDIVLTLTLFEDREMIEERLKTYAHLFDDKVMKQLKRRRYTGWGRLSRKLINGIRDKQSGKTILDFLKSDGFANRNFMQLIHDDSLTFKEDIQKAQVSGQGDSLHEHIANLAGSPAIKKGILQTVKVVDELVKVMGRHKPENIVIEMARENQTTQKGQKNSRERMKRIEEGIKELGSQILKEHPVENTQLQNEKLYLYYLQNGRDMYVDQELDINRLSDYDVDHIVPQSFLKDDSIDNKVLTRSDKARGKSDNVPSEEVVKKMKNYWRQLLNAKLITQRKFDNLTKAERGGLSELDKAGFIKRQLVETRQITKHVAQILDSRMNTKYDENDKLIREVKVITLKSKLVSDFRKDFQFYKVREINNYHHAHDAYLNAVVGTALIKKYPKLESEFVYGDYKVYDVRKMIAKSEQEIGKATAKYFFYSNIMNFFKTEITLANGEIRKRPLIETNGETGEIVWDKGRDFATVRKVLSMPQVNIVKKTEVQTGGFSKESILPKRNSDKLIARKKDWDPKKYGGFDSPTVAYSVLVVAKVEKGKSKKLKSVKELLGITIMERSSFEKNPIDFLEAKGYKEVKKDLIIKLPKYSLFELENGRKRMLASAGELQKGNELALPSKYVNFLYLASHYEKLKGSPEDNEQKQLFVEQHKHYLDEIIEQISEFSKRVILADANLDKVLSAYNKHRDKPIREQAENIIHLFTLTNLGAPAAFKYFDTTIDRKRYTSTKEVLDATLIHQSITGLYETRIDLSQLGGDGGGGGGGGGGTVSLQDEHRLFDIPVTTSLPDVWLQDFPQAWAETGGLGRAKCQAPIIIDLKPTAVPVSIKQYPMSLEAHMGIRQHIIKFLELGVLRPCRSPWNTPLLPVKKPGTQDYRPVQDLREINKRTVDIHPTVPNPYNLLSTLKPDYSWYTVLDLKDAFFCLPLAPQSQELFAFEWKDPERGISGQLTWTRLPQGFKNSPTLFNEALHRDLTDFRTQHPEVTLLQYVDDLLLAAPTKKACTQGTRHLLQELGEKGYRASAKKAQICQTKVTYLGYILSEGKRWLTPGRIETVARIPPPRNPREVREFLGTAGFCRLWIPGFAELAAPLYALTKPSTPFTWQTEHQLAFEALKKALLSAPALGLPDTSKPFTLFLDERQGIAKGVLTQKLGPWKRPVAYLSKKLDPVAAGWPPCLRIMAATAMLVKDSAKLTLGQPLTVITPHTLEAIVRQPPDRWITNARLTHYQALLLDTDRVQFGPPVTLNPATLLPVPENQPSPHDCRQVLAETHGTREDLKDQELPDADHTWYTDGSSYLDSGTRRAGAAVVDGHNTIWAQSLPPGTSAQKAELIALTKALELSKGKKANIYTDSRYAFATAHTHGSIYERRGWLTSEGKEIKNKAEIIALLKALFLPQEVAIIHCPGHQKGQDPVAVGNRQADRVARQAAMAEVLTLATEPDNTSHITAGKRTADGSEFEKRTADGSEFESPKKKAKVE

SEQ ID NO: 1573 - protein, 2100 aa, synthetic construct
MPAAKRVKLDGGDKKYSIGLDIGTNSVGWAVITDEYKVPSKKFKVLGNTDRHSIKKNLIGALLFDSGETAEATRLKRTARRRYTRRKNRICYLQEIFSNEMAKVDDSFFHRLEESFLVEEDKKHERHPIFGNIVDEVAYHEKYPTIYHLRKKLVDSTDKADLRLIYLALAHMIKFRGHFLIEGDLNPDNSDVDKLFIQLVQTYNQLFEENPINASGVDAKAILSARLSKSRRLENLIAQLPGEKKNGLFGNLIALSLGLTPNFKSNFDLAEDAKLQLSKDTYDDDLDNLLAQIGDQYADLFLAAKNLSDAILLSDILRVNTEITKAPLSASMIKRYDEHHQDLTLLKALVRQQLPEKYKEIFFDQSKNGYAGYIDGGASQEEFYKFIKPILEKMDGTEELLVKLNREDLLRKQRTFDNGSIPHQIHLGELHAILRRQEDFYPFLKDNREKIEKILTFRIPYYVGPLARGNSRFAWMTRKSEETITPWNFEEVVDKGASAQSFIERMTNFDKNLPNEKVLPKHSLLYEYFTVYNELTKVKYVTEGMRKPAFLSGEQKKAIVDLLFKTNRKVTVKQLKEDYFKKIECFDSVEISGVEDRFNASLGTYHDLLKIIKDKDFLDNEENEDILEDIVLTLTLFEDREMIEERLKTYAHLFDDKVMKQLKRRRYTGWGRLSRKLINGIRDKQSGKTILDFLKSDGFANRNFMQLIHDDSLTFKEDIQKAQVSGQGDSLHEHIANLAGSPAIKKGILQTVKVVDELVKVMGRHKPENIVIEMARENQTTQKGQKNSRERMKRIEEGIKELGSQILKEHPVENTQLQNEKLYLYYLQNGRDMYVDQELDINRLSDYDVDHIVPQSFLKDDSIDNKVLTRSDKARGKSDNVPSEEVVKKMKNYWRQLLNAKLITQRKFDNLTKAERGGLSELDKAGFIKRQLVETRQITKHVAQILDSRMNTKYDENDKLIREVKVITLKSKLVSDFRKDFQFYKVREINNYHHAHDAYLNAVVGTALIKKYPKLESEFVYGDYKVYDVRKMIAKSEQEIGKATAKYFFYSNIMNFFKTEITLANGEIRKRPLIETNGETGEIVWDKGRDFATVRKVLSMPQVNIVKKTEVQTGGFSKESILPKRNSDKLIARKKDWDPKKYGGFDSPTVAYSVLVVAKVEKGKSKKLKSVKELLGITIMERSSFEKNPIDFLEAKGYKEVKKDLIIKLPKYSLFELENGRKRMLASAGELQKGNELALPSKYVNFLYLASHYEKLKGSPEDNEQKQLFVEQHKHYLDEIIEQISEFSKRVILADANLDKVLSAYNKHRDKPIREQAENIIHLFTLTNLGAPAAFKYFDTTIDRKRYTSTKEVLDATLIHQSITGLYETRIDLSQLGGDGGGGSGGSGGSGGTVSLQDEHRLFDIPVTTSLPDVWLQDFPQAWAETGGLGRAKCQAPIIIDLKPTAVPVSIKQYPMSLEAHMGIRQHIIKFLELGVLRPCRSPWNTPLLPVKKPGTQDYRPVQDLREINKRTVDIHPTVPNPYNLLSTLKPDYSWYTVLDLKDAFFCLPLAPQSQELFAFEWKDPERGISGQLTWTRLPQGFKNSPTLFNEALHRDLTDFRTQHPEVTLLQYVDDLLLAAPTKKACTQGTRHLLQELGEKGYRASAKKAQICQTKVTYLGYILSEGKRWLTPGRIETVARIPPPRNPREVREFLGTAGFCRLWIPGFAELAAPLYALTKPSTPFTWQTEHQLAFEALKKALLSAPALGLPDTSKPFTLFLDERQGIAKGVLTQKLGPWKRPVAYLSKKLDPVAAGWPPCLRIMAATAMLVKDSAKLTLGQPLTVITPHTLEAIVRQPPDRWITNARLTHYQALLLDTDRVQFGPPVTLNPATLLPVPENQPSPHDCRQVLAETHGTREDLKDQELPDADHTWYTDGSSYLDSGTRRAGAAVVDGHNTIWAQSLPPGTSAQKAELIALTKALELSKGKKANIYTDSRYAFATAHTHGSIYERRGWLTSEGKEIKNKAEIIALLKALFLPQEVAIIHCPGHQKGQDPVAVGNRQADRVARQAAMAEVLTLATEPDNTSHITAGKRTADGSEFEKRTADGSEFESPKKKAKVE

SEQ ID NO: 1574 - protein, 2102 aa, synthetic construct
MPAAKRVKLDGGDKKYSIGLDIGTNSVGWAVITDEYKVPSKKFKVLGNTDRHSIKKNLIGALLFDSGETAEATRLKRTARRRYTRRKNRICYLQEIFSNEMAKVDDSFFHRLEESFLVEEDKKHERHPIFGNIVDEVAYHEKYPTIYHLRKKLVDSTDKADLRLIYLALAHMIKFRGHFLIEGDLNPDNSDVDKLFIQLVQTYNQLFEENPINASGVDAKAILSARLSKSRRLENLIAQLPGEKKNGLFGNLIALSLGLTPNFKSNFDLAEDAKLQLSKDTYDDDLDNLLAQIGDQYADLFLAAKNLSDAILLSDILRVNTEITKAPLSASMIKRYDEHHQDLTLLKALVRQQLPEKYKEIFFDQSKNGYAGYIDGGASQEEFYKFIKPILEKMDGTEELLVKLNREDLLRKQRTFDNGSIPHQIHLGELHAILRRQEDFYPFLKDNREKIEKILTFRIPYYVGPLARGNSRFAWMTRKSEETITPWNFEEVVDKGASAQSFIERMTNFDKNLPNEKVLPKHSLLYEYFTVYNELTKVKYVTEGMRKPAFLSGEQKKAIVDLLFKTNRKVTVKQLKEDYFKKIECFDSVEISGVEDRFNASLGTYHDLLKIIKDKDFLDNEENEDILEDIVLTLTLFEDREMIEERLKTYAHLFDDKVMKQLKRRRYTGWGRLSRKLINGIRDKQSGKTILDFLKSDGFANRNFMQLIHDDSLTFKEDIQKAQVSGQGDSLHEHIANLAGSPAIKKGILQTVKVVDELVKVMGRHKPENIVIEMARENQTTQKGQKNSRERMKRIEEGIKELGSQILKEHPVENTQLQNEKLYLYYLQNGRDMYVDQELDINRLSDYDVDHIVPQSFLKDDSIDNKVLTRSDKARGKSDNVPSEEVVKKMKNYWRQLLNAKLITQRKFDNLTKAERGGLSELDKAGFIKRQLVETRQITKHVAQILDSRMNTKYDENDKLIREVKVITLKSKLVSDFRKDFQFYKVREINNYHHAHDAYLNAVVGTALIKKYPKLESEFVYGDYKVYDVRKMIAKSEQEIGKATAKYFFYSNIMNFFKTEITLANGEIRKRPLIETNGETGEIVWDKGRDFATVRKVLSMPQVNIVKKTEVQTGGFSKESILPKRNSDKLIARKKDWDPKKYGGFDSPTVAYSVLVVAKVEKGKSKKLKSVKELLGITIMERSSFEKNPIDFLEAKGYKEVKKDLIIKLPKYSLFELENGRKRMLASAGELQKGNELALPSKYVNFLYLASHYEKLKGSPEDNEQKQLFVEQHKHYLDEIIEQISEFSKRVILADANLDKVLSAYNKHRDKPIREQAENIIHLFTLTNLGAPAAFKYFDTTIDRKRYTSTKEVLDATLIHQSITGLYETRIDLSQLGGDGGGGGEAAAKGSSGGTVSLQDEHRLFDIPVTTSLPDVWLQDFPQAWAETGGLGRAKCQAPIIIDLKPTAVPVSIKQYPMSLEAHMGIRQHIIKFLELGVLRPCRSPWNTPLLPVKKPGTQDYRPVQDLREINKRTVDIHPTVPNPYNLLSTLKPDYSWYTVLDLKDAFFCLPLAPQSQELFAFEWKDPERGISGQLTWTRLPQGFKNSPTLFNEALHRDLTDFRTQHPEVTLLQYVDDLLLAAPTKKACTQGTRHLLQELGEKGYRASAKKAQICQTKVTYLGYILSEGKRWLTPGRIETVARIPPPRNPREVREFLGTAGFCRLWIPGFAELAAPLYALTKPSTPFTWQTEHQLAFEALKKALLSAPALGLPDTSKPFTLFLDERQGIAKGVLTQKLGPWKRPVAYLSKKLDPVAAGWPPCLRIMAATAMLVKDSAKLTLGQPLTVITPHTLEAIVRQPPDRWITNARLTHYQALLLDTDRVQFGPPVTLNPATLLPVPENQPSPHDCRQVLAETHGTREDLKDQELPDADHTWYTDGSSYLDSGTRRAGAAVVDGHNTIWAQSLPPGTSAQKAELIALTKALELSKGKKANIYTDSRYAFATAHTHGSIYERRGWLTSEGKEIKNKAEIIALLKALFLPQEVAIIHCPGHQKGQDPVAVGNRQADRVARQAAMAEVLTLATEPDNTSHITAGKRTADGSEFEKRTADGSEFESPKKKAKVE

SEQ ID NO: 1575 - protein, 2102 aa, synthetic construct
MPAAKRVKLDGGDKKYSIGLDIGTNSVGWAVITDEYKVPSKKFKVLGNTDRHSIKKNLIGALLFDSGETAEATRLKRTARRRYTRRKNRICYLQEIFSNEMAKVDDSFFHRLEESFLVEEDKKHERHPIFGNIVDEVAYHEKYPTIYHLRKKLVDSTDKADLRLIYLALAHMIKFRGHFLIEGDLNPDNSDVDKLFIQLVQTYNQLFEENPINASGVDAKAILSARLSKSRRLENLIAQLPGEKKNGLFGNLIALSLGLTPNFKSNFDLAEDAKLQLSKDTYDDDLDNLLAQIGDQYADLFLAAKNLSDAILLSDILRVNTEITKAPLSASMIKRYDEHHQDLTLLKALVRQQLPEKYKEIFFDQSKNGYAGYIDGGASQEEFYKFIKPILEKMDGTEELLVKLNREDLLRKQRTFDNGSIPHQIHLGELHAILRRQEDFYPFLKDNREKIEKILTFRIPYYVGPLARGNSRFAWMTRKSEETITPWNFEEVVDKGASAQSFIERMTNFDKNLPNEKVLPKHSLLYEYFTVYNELTKVKYVTEGMRKPAFLSGEQKKAIVDLLFKTNRKVTVKQLKEDYFKKIECFDSVEISGVEDRFNASLGTYHDLLKIIKDKDFLDNEENEDILEDIVLTLTLFEDREMIEERLKTYAHLFDDKVMKQLKRRRYTGWGRLSRKLINGIRDKQSGKTILDFLKSDGFANRNFMQLIHDDSLTFKEDIQKAQVSGQGDSLHEHIANLAGSPAIKKGILQTVKVVDELVKVMGRHKPENIVIEMARENQTTQKGQKNSRERMKRIEEGIKELGSQILKEHPVENTQLQNEKLYLYYLQNGRDMYVDQELDINRLSDYDVDHIVPQSFLKDDSIDNKVLTRSDKARGKSDNVPSEEVVKKMKNYWRQLLNAKLITQRKFDNLTKAERGGLSELDKAGFIKRQLVETRQITKHVAQILDSRMNTKYDENDKLIREVKVITLKSKLVSDFRKDFQFYKVREINNYHHAHDAYLNAVVGTALIKKYPKLESEFVYGDYKVYDVRKMIAKSEQEIGKATAKYFFYSNIMNFFKTEITLANGEIRKRPLIETNGETGEIVWDKGRDFATVRKVLSMPQVNIVKKTEVQTGGFSKESILPKRNSDKLIARKKDWDPKKYGGFDSPTVAYSVLVVAKVEKGKSKKLKSVKELLGITIMERSSFEKNPIDFLEAKGYKEVKKDLIIKLPKYSLFELENGRKRMLASAGELQKGNELALPSKYVNFLYLASHYEKLKGSPEDNEQKQLFVEQHKHYLDEIIEQISEFSKRVILADANLDKVLSAYNKHRDKPIREQAENIIHLFTLTNLGAPAAFKYFDTTIDRKRYTSTKEVLDATLIHQSITGLYETRIDLSQLGGDGGPAPEAAAKGSSGGTVSLQDEHRLFDIPVTTSLPDVWLQDFPQAWAETGGLGRAKCQAPIIIDLKPTAVPVSIKQYPMSLEAHMGIRQHIIKFLELGVLRPCRSPWNTPLLPVKKPGTQDYRPVQDLREINKRTVDIHPTVPNPYNLLSTLKPDYSWYTVLDLKDAFFCLPLAPQSQELFAFEWKDPERGISGQLTWTRLPQGFKNSPTLFNEALHRDLTDFRTQHPEVTLLQYVDDLLLAAPTKKACTQGTRHLLQELGEKGYRASAKKAQICQTKVTYLGYILSEGKRWLTPGRIETVARIPPPRNPREVREFLGTAGFCRLWIPGFAELAAPLYALTKPSTPFTWQTEHQLAFEALKKALLSAPALGLPDTSKPFTLFLDERQGIAKGVLTQKLGPWKRPVAYLSKKLDPVAAGWPPCLRIMAATAMLVKDSAKLTLGQPLTVITPHTLEAIVRQPPDRWITNARLTHYQALLLDTDRVQFGPPVTLNPATLLPVPENQPSPHDCRQVLAETHGTREDLKDQELPDADHTWYTDGSSYLDSGTRRAGAAVVDGHNTIWAQSLPPGTSAQKAELIALTKALELSKGKKANIYTDSRYAFATAHTHGSIYERRGWLTSEGKEIKNKAEIIALLKALFLPQEVAIIHCPGHQKGQDPVAVGNRQADRVARQAAMAEVLTLATEPDNTSHITAGKRTADGSEFEKRTADGSEFESPKKKAKVE

SEQ ID NO: 1576 - protein, 2102 aa, synthetic construct
MPAAKRVKLDGGDKKYSIGLDIGTNSVGWAVITDEYKVPSKKFKVLGNTDRHSIKKNLIGALLFDSGETAEATRLKRTARRRYTRRKNRICYLQEIFSNEMAKVDDSFFHRLEESFLVEEDKKHERHPIFGNIVDEVAYHEKYPTIYHLRKKLVDSTDKADLRLIYLALAHMIKFRGHFLIEGDLNPDNSDVDKLFIQLVQTYNQLFEENPINASGVDAKAILSARLSKSRRLENLIAQLPGEKKNGLFGNLIALSLGLTPNFKSNFDLAEDAKLQLSKDTYDDDLDNLLAQIGDQYADLFLAAKNLSDAILLSDILRVNTEITKAPLSASMIKRYDEHHQDLTLLKALVRQQLPEKYKEIFFDQSKNGYAGYIDGGASQEEFYKFIKPILEKMDGTEELLVKLNREDLLRKQRTFDNGSIPHQIHLGELHAILRRQEDFYPFLKDNREKIEKILTFRIPYYVGPLARGNSRFAWMTRKSEETITPWNFEEVVDKGASAQSFIERMTNFDKNLPNEKVLPKHSLLYEYFTVYNELTKVKYVTEGMRKPAFLSGEQKKAIVDLLFKTNRKVTVKQLKEDYFKKIECFDSVEISGVEDRFNASLGTYHDLLKIIKDKDFLDNEENEDILEDIVLTLTLFEDREMIEERLKTYAHLFDDKVMKQLKRRRYTGWGRLSRKLINGIRDKQSGKTILDFLKSDGFANRNFMQLIHDDSLTFKEDIQKAQVSGQGDSLHEHIANLAGSPAIKKGILQTVKVVDELVKVMGRHKPENIVIEMARENQTTQKGQKNSRERMKRIEEGIKELGSQILKEHPVENTQLQNEKLYLYYLQNGRDMYVDQELDINRLSDYDVDHIVPQSFLKDDSIDNKVLTRSDKARGKSDNVPSEEVVKKMKNYWRQLLNAKLITQRKFDNLTKAERGGLSELDKAGFIKRQLVETRQITKHVAQILDSRMNTKYDENDKLIREVKVITLKSKLVSDFRKDFQFYKVREINNYHHAHDAYLNAVVGTALIKKYPKLESEFVYGDYKVYDVRKMIAKSEQEIGKATAKYFFYSNIMNFFKTEITLANGEIRKRPLIETNGETGEIVWDKGRDFATVRKVLSMPQVNIVKKTEVQTGGFSKESILPKRNSDKLIARKKDWDPKKYGGFDSPTVAYSVLVVAKVEKGKSKKLKSVKELLGITIMERSSFEKNPIDFLEAKGYKEVKKDLIIKLPKYSLFELENGRKRMLASAGELQKGNELALPSKYVNFLYLASHYEKLKGSPEDNEQKQLFVEQHKHYLDEIIEQISEFSKRVILADANLDKVLSAYNKHRDKPIREQAENIIHLFTLTNLGAPAAFKYFDTTIDRKRYTSTKEVLDATLIHQSITGLYETRIDLSQLGGDGGEAAAKGSSGGGGGTVSLQDEHRLFDIPVTTSLPDVWLQDFPQAWAETGGLGRAKCQAPIIIDLKPTAVPVSIKQYPMSLEAHMGIRQHIIKFLELGVLRPCRSPWNTPLLPVKKPGTQDYRPVQDLREINKRTVDIHPTVPNPYNLLSTLKPDYSWYTVLDLKDAFFCLPLAPQSQELFAFEWKDPERGISGQLTWTRLPQGFKNSPTLFNEALHRDLTDFRTQHPEVTLLQYVDDLLLAAPTKKACTQGTRHLLQELGEKGYRASAKKAQICQTKVTYLGYILSEGKRWLTPGRIETVARIPPPRNPREVREFLGTAGFCRLWIPGFAELAAPLYALTKPSTPFTWQTEHQLAFEALKKALLSAPALGLPDTSKPFTLFLDERQGIAKGVLTQKLGPWKRPVAYLSKKLDPVAAGWPPCLRIMAATAMLVKDSAKLTLGQPLTVITPHTLEAIVRQPPDRWITNARLTHYQALLLDTDRVQFGPPVTLNPATLLPVPENQPSPHDCRQVLAETHGTREDLKDQELPDADHTWYTDGSSYLDSGTRRAGAAVVDGHNTIWAQSLPPGTSAQKAELIALTKALELSKGKKANIYTDSRYAFATAHTHGSIYERRGWLTSEGKEIKNKAEIIALLKALFLPQEVAIIHCPGHQKGQDPVAVGNRQADRVARQAAMAEVLTLATEPDNTSHITAGKRTADGSEFEKRTADGSEFESPKKKAKVE

SEQ ID NO: 1577 - protein, 2102 aa, synthetic construct
MPAAKRVKLDGGDKKYSIGLDIGTNSVGWAVITDEYKVPSKKFKVLGNTDRHSIKKNLIGALLFDSGETAEATRLKRTARRRYTRRKNRICYLQEIFSNEMAKVDDSFFHRLEESFLVEEDKKHERHPIFGNIVDEVAYHEKYPTIYHLRKKLVDSTDKADLRLIYLALAHMIKFRGHFLIEGDLNPDNSDVDKLFIQLVQTYNQLFEENPINASGVDAKAILSARLSKSRRLENLIAQLPGEKKNGLFGNLIALSLGLTPNFKSNFDLAEDAKLQLSKDTYDDDLDNLLAQIGDQYADLFLAAKNLSDAILLSDILRVNTEITKAPLSASMIKRYDEHHQDLTLLKALVRQQLPEKYKEIFFDQSKNGYAGYIDGGASQEEFYKFIKPILEKMDGTEELLVKLNREDLLRKQRTFDNGSIPHQIHLGELHAILRRQEDFYPFLKDNREKIEKILTFRIPYYVGPLARGNSRFAWMTRKSEETITPWNFEEVVDKGASAQSFIERMTNFDKNLPNEKVLPKHSLLYEYFTVYNELTKVKYVTEGMRKPAFLSGEQKKAIVDLLFKTNRKVTVKQLKEDYFKKIECFDSVEISGVEDRFNASLGTYHDLLKIIKDKDFLDNEENEDILEDIVLTLTLFEDREMIEERLKTYAHLFDDKVMKQLKRRRYTGWGRLSRKLINGIRDKQSGKTILDFLKSDGFANRNFMQLIHDDSLTFKEDIQKAQVSGQGDSLHEHIANLAGSPAIKKGILQTVKVVDELVKVMGRHKPENIVIEMARENQTTQKGQKNSRERMKRIEEGIKELGSQILKEHPVENTQLQNEKLYLYYLQNGRDMYVDQELDINRLSDYDVDHIVPQSFLKDDSIDNKVLTRSDKARGKSDNVPSEEVVKKMKNYWRQLLNAKLITQRKFDNLTKAERGGLSELDKAGFIKRQLVETRQITKHVAQILDSRMNTKYDENDKLIREVKVITLKSKLVSDFRKDFQFYKVREINNYHHAHDAYLNAVVGTALIKKYPKLESEFVYGDYKVYDVRKMIAKSEQEIGKATAKYFFYSNIMNFFKTEITLANGEIRKRPLIETNGETGEIVWDKGRDFATVRKVLSMPQVNIVKKTEVQTGGFSKESILPKRNSDKLIARKKDWDPKKYGGFDSPTVAYSVLVVAKVEKGKSKKLKSVKELLGITIMERSSFEKNPIDFLEAKGYKEVKKDLIIKLPKYSLFELENGRKRMLASAGELQKGNELALPSKYVNFLYLASHYEKLKGSPEDNEQKQLFVEQHKHYLDEIIEQISEFSKRVILADANLDKVLSAYNKHRDKPIREQAENIIHLFTLTNLGAPAAFKYFDTTIDRKRYTSTKEVLDATLIHQSITGLYETRIDLSQLGGDGGEAAAKGGGGGSGGTVSLQDEHRLFDIPVTTSLPDVWLQDFPQAWAETGGLGRAKCQAPIIIDLKPTAVPVSIKQYPMSLEAHMGIRQHIIKFLELGVLRPCRSPWNTPLLPVKKPGTQDYRPVQDLREINKRTVDIHPTVPNPYNLLSTLKPDYSWYTVLDLKDAFFCLPLAPQSQELFAFEWKDPERGISGQLTWTRLPQGFKNSPTLFNEALHRDLTDFRTQHPEVTLLQYVDDLLLAAPTKKACTQGTRHLLQELGEKGYRASAKKAQICQTKVTYLGYILSEGKRWLTPGRIETVARIPPPRNPREVREFLGTAGFCRLWIPGFAELAAPLYALTKPSTPFTWQTEHQLAFEALKKALLSAPALGLPDTSKPFTLFLDERQGIAKGVLTQKLGPWKRPVAYLSKKLDPVAAGWPPCLRIMAATAMLVKDSAKLTLGQPLTVITPHTLEAIVRQPPDRWITNARLTHYQALLLDTDRVQFGPPVTLNPATLLPVPENQPSPHDCRQVLAETHGTREDLKDQELPDADHTWYTDGSSYLDSGTRRAGAAVVDGHNTIWAQSLPPGTSAQKAELIALTKALELSKGKKANIYTDSRYAFATAHTHGSIYERRGWLTSEGKEIKNKAEIIALLKALFLPQEVAIIHCPGHQKGQDPVAVGNRQADRVARQAAMAEVLTLATEPDNTSHITAGKRTADGSEFEKRTADGSEFESPKKKAKVE

SEQ ID NO: 1578 - protein, 2100 aa, synthetic construct
MPAAKRVKLDGGDKKYSIGLDIGTNSVGWAVITDEYKVPSKKFKVLGNTDRHSIKKNLIGALLFDSGETAEATRLKRTARRRYTRRKNRICYLQEIFSNEMAKVDDSFFHRLEESFLVEEDKKHERHPIFGNIVDEVAYHEKYPTIYHLRKKLVDSTDKADLRLIYLALAHMIKFRGHFLIEGDLNPDNSDVDKLFIQLVQTYNQLFEENPINASGVDAKAILSARLSKSRRLENLIAQLPGEKKNGLFGNLIALSLGLTPNFKSNFDLAEDAKLQLSKDTYDDDLDNLLAQIGDQYADLFLAAKNLSDAILLSDILRVNTEITKAPLSASMIKRYDEHHQDLTLLKALVRQQLPEKYKEIFFDQSKNGYAGYIDGGASQEEFYKFIKPILEKMDGTEELLVKLNREDLLRKQRTFDNGSIPHQIHLGELHAILRRQEDFYPFLKDNREKIEKILTFRIPYYVGPLARGNSRFAWMTRKSEETITPWNFEEVVDKGASAQSFIERMTNFDKNLPNEKVLPKHSLLYEYFTVYNELTKVKYVTEGMRKPAFLSGEQKKAIVDLLFKTNRKVTVKQLKEDYFKKIECFDSVEISGVEDRFNASLGTYHDLLKIIKDKDFLDNEENEDILEDIVLTLTLFEDREMIEERLKTYAHLFDDKVMKQLKRRRYTGWGRLSRKLINGIRDKQSGKTILDFLKSDGFANRNFMQLIHDDSLTFKEDIQKAQVSGQGDSLHEHIANLAGSPAIKKGILQTVKVVDELVKVMGRHKPENIVIEMARENQTTQKGQKNSRERMKRIEEGIKELGSQILKEHPVENTQLQNEKLYLYYLQNGRDMYVDQELDINRLSDYDVDHIVPQSFLKDDSIDNKVLTRSDKARGKSDNVPSEEVVKKMKNYWRQLLNAKLITQRKFDNLTKAERGGLSELDKAGFIKRQLVETRQITKHVAQILDSRMNTKYDENDKLIREVKVITLKSKLVSDFRKDFQFYKVREINNYHHAHDAYLNAVVGTALIKKYPKLESEFVYGDYKVYDVRKMIAKSEQEIGKATAKYFFYSNIMNFFKTEITLANGEIRKRPLIETNGETGEIVWDKGRDFATVRKVLSMPQVNIVKKTEVQTGGFSKESILPKRNSDKLIARKKDWDPKKYGGFDSPTVAYSVLVVAKVEKGKSKKLKSVKELLGITIMERSSFEKNPIDFLEAKGYKEVKKDLIIKLPKYSLFELENGRKRMLASAGELQKGNELALPSKYVNFLYLASHYEKLKGSPEDNEQKQLFVEQHKHYLDEIIEQISEFSKRVILADANLDKVLSAYNKHRDKPIREQAENIIHLFTLTNLGAPAAFKYFDTTIDRKRYTSTKEVLDATLIHQSITGLYETRIDLSQLGGDGGGGGGSSPAPGGTVSLQDEHRLFDIPVTTSLPDVWLQDFPQAWAETGGLGRAKCQAPIIIDLKPTAVPVSIKQYPMSLEAHMGIRQHIIKFLELGVLRPCRSPWNTPLLPVKKPGTQDYRPVQDLREINKRTVDIHPTVPNPYNLLSTLKPDYSWYTVLDLKDAFFCLPLAPQSQELFAFEWKDPERGISGQLTWTRLPQGFKNSPTLFNEALHRDLTDFRTQHPEVTLLQYVDDLLLAAPTKKACTQGTRHLLQELGEKGYRASAKKAQICQTKVTYLGYILSEGKRWLTPGRIETVARIPPPRNPREVREFLGTAGFCRLWIPGFAELAAPLYALTKPSTPFTWQTEHQLAFEALKKALLSAPALGLPDTSKPFTLFLDERQGIAKGVLTQKLGPWKRPVAYLSKKLDPVAAGWPPCLRIMAATAMLVKDSAKLTLGQPLTVITPHTLEAIVRQPPDRWITNARLTHYQALLLDTDRVQFGPPVTLNPATLLPVPENQPSPHDCRQVLAETHGTREDLKDQELPDADHTWYTDGSSYLDSGTRRAGAAVVDGHNTIWAQSLPPGTSAQKAELIALTKALELSKGKKANIYTDSRYAFATAHTHGSIYERRGWLTSEGKEIKNKAEIIALLKALFLPQEVAIIHCPGHQKGQDPVAVGNRQADRVARQAAMAEVLTLATEPDNTSHITAGKRTADGSEFEKRTADGSEFESPKKKAKVE

SEQ ID NO: 1579 - protein, 2102 aa, synthetic construct
MPAAKRVKLDGGDKKYSIGLDIGTNSVGWAVITDEYKVPSKKFKVLGNTDRHSIKKNLIGALLFDSGETAEATRLKRTARRRYTRRKNRICYLQEIFSNEMAKVDDSFFHRLEESFLVEEDKKHERHPIFGNIVDEVAYHEKYPTIYHLRKKLVDSTDKADLRLIYLALAHMIKFRGHFLIEGDLNPDNSDVDKLFIQLVQTYNQLFEENPINASGVDAKAILSARLSKSRRLENLIAQLPGEKKNGLFGNLIALSLGLTPNFKSNFDLAEDAKLQLSKDTYDDDLDNLLAQIGDQYADLFLAAKNLSDAILLSDILRVNTEITKAPLSASMIKRYDEHHQDLTLLKALVRQQLPEKYKEIFFDQSKNGYAGYIDGGASQEEFYKFIKPILEKMDGTEELLVKLNREDLLRKQRTFDNGSIPHQIHLGELHAILRRQEDFYPFLKDNREKIEKILTFRIPYYVGPLARGNSRFAWMTRKSEETITPWNFEEVVDKGASAQSFIERMTNFDKNLPNEKVLPKHSLLYEYFTVYNELTKVKYVTEGMRKPAFLSGEQKKAIVDLLFKTNRKVTVKQLKEDYFKKIECFDSVEISGVEDRFNASLGTYHDLLKIIKDKDFLDNEENEDILEDIVLTLTLFEDREMIEERLKTYAHLFDDKVMKQLKRRRYTGWGRLSRKLINGIRDKQSGKTILDFLKSDGFANRNFMQLIHDDSLTFKEDIQKAQVSGQGDSLHEHIANLAGSPAIKKGILQTVKVVDELVKVMGRHKPENIVIEMARENQTTQKGQKNSRERMKRIEEGIKELGSQILKEHPVENTQLQNEKLYLYYLQNGRDMYVDQELDINRLSDYDVDHIVPQSFLKDDSIDNKVLTRSDKARGKSDNVPSEEVVKKMKNYWRQLLNAKLITQRKFDNLTKAERGGLSELDKAGFIKRQLVETRQITKHVAQILDSRMNTKYDENDKLIREVKVITLKSKLVSDFRKDFQFYKVREINNYHHAHDAYLNAVVGTALIKKYPKLESEFVYGDYKVYDVRKMIAKSEQEIGKATAKYFFYSNIMNFFKTEITLANGEIRKRPLIETNGETGEIVWDKGRDFATVRKVLSMPQVNIVKKTEVQTGGFSKESILPKRNSDKLIARKKDWDPKKYGGFDSPTVAYSVLVVAKVEKGKSKKLKSVKELLGITIMERSSFEKNPIDFLEAKGYKEVKKDLIIKLPKYSLFELENGRKRMLASAGELQKGNELALPSKYVNFLYLASHYEKLKGSPEDNEQKQLFVEQHKHYLDEIIEQISEFSKRVILADANLDKVLSAYNKHRDKPIREQAENIIHLFTLTNLGAPAAFKYFDTTIDRKRYTSTKEVLDATLIHQSITGLYETRIDLSQLGGDGGEAAAKPAPGGSGGTVSLQDEHRLFDIPVTTSLPDVWLQDFPQAWAETGGLGRAKCQAPIIIDLKPTAVPVSIKQYPMSLEAHMGIRQHIIKFLELGVLRPCRSPWNTPLLPVKKPGTQDYRPVQDLREINKRTVDIHPTVPNPYNLLSTLKPDYSWYTVLDLKDAFFCLPLAPQSQELFAFEWKDPERGISGQLTWTRLPQGFKNSPTLFNEALHRDLTDFRTQHPEVTLLQYVDDLLLAAPTKKACTQGTRHLLQELGEKGYRASAKKAQICQTKVTYLGYILSEGKRWLTPGRIETVARIPPPRNPREVREFLGTAGFCRLWIPGFAELAAPLYALTKPSTPFTWQTEHQLAFEALKKALLSAPALGLPDTSKPFTLFLDERQGIAKGVLTQKLGPWKRPVAYLSKKLDPVAAGWPPCLRIMAATAMLVKDSAKLTLGQPLTVITPHTLEAIVRQPPDRWITNARLTHYQALLLDTDRVQFGPPVTLNPATLLPVPENQPSPHDCRQVLAETHGTREDLKDQELPDADHTWYTDGSSYLDSGTRRAGAAVVDGHNTIWAQSLPPGTSAQKAELIALTKALELSKGKKANIYTDSRYAFATAHTHGSIYERRGWLTSEGKEIKNKAEIIALLKALFLPQEVAIIHCPGHQKGQDPVAVGNRQADRVARQAAMAEVLTLATEPDNTSHITAGKRTADGSEFEKRTADGSEFESPKKKAKVE

SEQ ID NO: 1580 - protein, 2102 aa, synthetic construct
MPAAKRVKLDGGDKKYSIGLDIGTNSVGWAVITDEYKVPSKKFKVLGNTDRHSIKKNLIGALLFDSGETAEATRLKRTARRRYTRRKNRICYLQEIFSNEMAKVDDSFFHRLEESFLVEEDKKHERHPIFGNIVDEVAYHEKYPTIYHLRKKLVDSTDKADLRLIYLALAHMIKFRGHFLIEGDLNPDNSDVDKLFIQLVQTYNQLFEENPINASGVDAKAILSARLSKSRRLENLIAQLPGEKKNGLFGNLIALSLGLTPNFKSNFDLAEDAKLQLSKDTYDDDLDNLLAQIGDQYADLFLAAKNLSDAILLSDILRVNTEITKAPLSASMIKRYDEHHQDLTLLKALVRQQLPEKYKEIFFDQSKNGYAGYIDGGASQEEFYKFIKPILEKMDGTEELLVKLNREDLLRKQRTFDNGSIPHQIHLGELHAILRRQEDFYPFLKDNREKIEKILTFRIPYYVGPLARGNSRFAWMTRKSEETITPWNFEEVVDKGASAQSFIERMTNFDKNLPNEKVLPKHSLLYEYFTVYNELTKVKYVTEGMRKPAFLSGEQKKAIVDLLFKTNRKVTVKQLKEDYFKKIECFDSVEISGVEDRFNASLGTYHDLLKIIKDKDFLDNEENEDILEDIVLTLTLFEDREMIEERLKTYAHLFDDKVMKQLKRRRYTGWGRLSRKLINGIRDKQSGKTILDFLKSDGFANRNFMQLIHDDSLTFKEDIQKAQVSGQGDSLHEHIANLAGSPAIKKGILQTVKVVDELVKVMGRHKPENIVIEMARENQTTQKGQKNSRERMKRIEEGIKELGSQILKEHPVENTQLQNEKLYLYYLQNGRDMYVDQELDINRLSDYDVDHIVPQSFLKDDSIDNKVLTRSDKARGKSDNVPSEEVVKKMKNYWRQLLNAKLITQRKFDNLTKAERGGLSELDKAGFIKRQLVETRQITKHVAQILDSRMNTKYDENDKLIREVKVITLKSKLVSDFRKDFQFYKVREINNYHHAHDAYLNAVVGTALIKKYPKLESEFVYGDYKVYDVRKMIAKSEQEIGKATAKYFFYSNIMNFFKTEITLANGEIRKRPLIETNGETGEIVWDKGRDFATVRKVLSMPQVNIVKKTEVQTGGFSKESILPKRNSDKLIARKKDWDPKKYGGFDSPTVAYSVLVVAKVEKGKSKKLKSVKELLGITIMERSSFEKNPIDFLEAKGYKEVKKDLIIKLPKYSLFELENGRKRMLASAGELQKGNELALPSKYVNFLYLASHYEKLKGSPEDNEQKQLFVEQHKHYLDEIIEQISEFSKRVILADANLDKVLSAYNKHRDKPIREQAENIIHLFTLTNLGAPAAFKYFDTTIDRKRYTSTKEVLDATLIHQSITGLYETRIDLSQLGGDGGPAPGGGEAAAKGGTVSLQDEHRLFDIPVTTSLPDVWLQDFPQAWAETGGLGRAKCQAPIIIDLKPTAVPVSIKQYPMSLEAHMGIRQHIIKFLELGVLRPCRSPWNTPLLPVKKPGTQDYRPVQDLREINKRTVDIHPTVPNPYNLLSTLKPDYSWYTVLDLKDAFFCLPLAPQSQELFAFEWKDPERGISGQLTWTRLPQGFKNSPTLFNEALHRDLTDFRTQHPEVTLLQYVDDLLLAAPTKKACTQGTRHLLQELGEKGYRASAKKAQICQTKVTYLGYILSEGKRWLTPGRIETVARIPPPRNPREVREFLGTAGFCRLWIPGFAELAAPLYALTKPSTPFTWQTEHQLAFEALKKALLSAPALGLPDTSKPFTLFLDERQGIAKGVLTQKLGPWKRPVAYLSKKLDPVAAGWPPCLRIMAATAMLVKDSAKLTLGQPLTVITPHTLEAIVRQPPDRWITNARLTHYQALLLDTDRVQFGPPVTLNPATLLPVPENQPSPHDCRQVLAETHGTREDLKDQELPDADHTWYTDGSSYLDSGTRRAGAAVVDGHNTIWAQSLPPGTSAQKAELIALTKALELSKGKKANIYTDSRYAFATAHTHGSIYERRGWLTSEGKEIKNKAEIIALLKALFLPQEVAIIHCPGHQKGQDPVAVGNRQADRVARQAAMAEVLTLATEPDNTSHITAGKRTADGSEFEKRTADGSEFESPKKKAKVE

SEQ ID NO: 1581 - protein, 2102 aa, synthetic construct
MPAAKRVKLDGGDKKYSIGLDIGTNSVGWAVITDEYKVPSKKFKVLGNTDRHSIKKNLIGALLFDSGETAEATRLKRTARRRYTRRKNRICYLQEIFSNEMAKVDDSFFHRLEESFLVEEDKKHERHPIFGNIVDEVAYHEKYPTIYHLRKKLVDSTDKADLRLIYLALAHMIKFRGHFLIEGDLNPDNSDVDKLFIQLVQTYNQLFEENPINASGVDAKAILSARLSKSRRLENLIAQLPGEKKNGLFGNLIALSLGLTPNFKSNFDLAEDAKLQLSKDTYDDDLDNLLAQIGDQYADLFLAAKNLSDAILLSDILRVNTEITKAPLSASMIKRYDEHHQDLTLLKALVRQQLPEKYKEIFFDQSKNGYAGYIDGGASQEEFYKFIKPILEKMDGTEELLVKLNREDLLRKQRTFDNGSIPHQIHLGELHAILRRQEDFYPFLKDNREKIEKILTFRIPYYVGPLARGNSRFAWMTRKSEETITPWNFEEVVDKGASAQSFIERMTNFDKNLPNEKVLPKHSLLYEYFTVYNELTKVKYVTEGMRKPAFLSGEQKKAIVDLLFKTNRKVTVKQLKEDYFKKIECFDSVEISGVEDRFNASLGTYHDLLKIIKDKDFLDNEENEDILEDIVLTLTLFEDREMIEERLKTYAHLFDDKVMKQLKRRRYTGWGRLSRKLINGIRDKQSGKTILDFLKSDGFANRNFMQLIHDDSLTFKEDIQKAQVSGQGDSLHEHIANLAGSPAIKKGILQTVKVVDELVKVMGRHKPENIVIEMARENQTTQKGQKNSRERMKRIEEGIKELGSQILKEHPVENTQLQNEKLYLYYLQNGRDMYVDQELDINRLSDYDVDHIVPQSFLKDDSIDNKVLTRSDKARGKSDNVPSEEVVKKMKNYWRQLLNAKLITQRKFDNLTKAERGGLSELDKAGFIKRQLVETRQITKHVAQILDSRMNTKYDENDKLIREVKVITLKSKLVSDFRKDFQFYKVREINNYHHAHDAYLNAVVGTALIKKYPKLESEFVYGDYKVYDVRKMIAKSEQEIGKATAKYFFYSNIMNFFKTEITLANGEIRKRPLIETNGETGEIVWDKGRDFATVRKVLSMPQVNIVKKTEVQTGGFSKESILPKRNSDKLIARKKDWDPKKYGGFDSPTVAYSVLVVAKVEKGKSKKLKSVKELLGITIMERSSFEKNPIDFLEAKGYKEVKKDLIIKLPKYSLFELENGRKRMLASAGELQKGNELALPSKYVNFLYLASHYEKLKGSPEDNEQKQLFVEQHKHYLDEIIEQISEFSKRVILADANLDKVLSAYNKHRDKPIREQAENIIHLFTLTNLGAPAAFKYFDTTIDRKRYTSTKEVLDATLIHQSITGLYETRIDLSQLGGDGGPAPEAAAKGGGGGTVSLQDEHRLFDIPVTTSLPDVWLQDFPQAWAETGGLGRAKCQAPIIIDLKPTAVPVSIKQYPMSLEAHMGIRQHIIKFLELGVLRPCRSPWNTPLLPVKKPGTQDYRPVQDLREINKRTVDIHPTVPNPYNLLSTLKPDYSWYTVLDLKDAFFCLPLAPQSQELFAFEWKDPERGISGQLTWTRLPQGFKNSPTLFNEALHRDLTDFRTQHPEVTLLQYVDDLLLAAPTKKACTQGTRHLLQELGEKGYRASAKKAQICQTKVTYLGYILSEGKRWLTPGRIETVARIPPPRNPREVREFLGTAGFCRLWIPGFAELAAPLYALTKPSTPFTWQTEHQLAFEALKKALLSAPALGLPDTSKPFTLFLDERQGIAKGVLTQKLGPWKRPVAYLSKKLDPVAAGWPPCLRIMAATAMLVKDSAKLTLGQPLTVITPHTLEAIVRQPPDRWITNARLTHYQALLLDTDRVQFGPPVTLNPATLLPVPENQPSPHDCRQVLAETHGTREDLKDQELPDADHTWYTDGSSYLDSGTRRAGAAVVDGHNTIWAQSLPPGTSAQKAELIALTKALELSKGKKANIYTDSRYAFATAHTHGSIYERRGWLTSEGKEIKNKAEIIALLKALFLPQEVAIIHCPGHQKGQDPVAVGNRQADRVARQAAMAEVLTLATEPDNTSHITAGKRTADGSEFEKRTADGSEFESPKKKAKVE

SEQ ID NO: 1582 - protein, 2100 aa, synthetic construct
MPAAKRVKLDGGDKKYSIGLDIGTNSVGWAVITDEYKVPSKKFKVLGNTDRHSIKKNLIGALLFDSGETAEATRLKRTARRRYTRRKNRICYLQEIFSNEMAKVDDSFFHRLEESFLVEEDKKHERHPIFGNIVDEVAYHEKYPTIYHLRKKLVDSTDKADLRLIYLALAHMIKFRGHFLIEGDLNPDNSDVDKLFIQLVQTYNQLFEENPINASGVDAKAILSARLSKSRRLENLIAQLPGEKKNGLFGNLIALSLGLTPNFKSNFDLAEDAKLQLSKDTYDDDLDNLLAQIGDQYADLFLAAKNLSDAILLSDILRVNTEITKAPLSASMIKRYDEHHQDLTLLKALVRQQLPEKYKEIFFDQSKNGYAGYIDGGASQEEFYKFIKPILEKMDGTEELLVKLNREDLLRKQRTFDNGSIPHQIHLGELHAILRRQEDFYPFLKDNREKIEKILTFRIPYYVGPLARGNSRFAWMTRKSEETITPWNFEEVVDKGASAQSFIERMTNFDKNLPNEKVLPKHSLLYEYFTVYNELTKVKYVTEGMRKPAFLSGEQKKAIVDLLFKTNRKVTVKQLKEDYFKKIECFDSVEISGVEDRFNASLGTYHDLLKIIKDKDFLDNEENEDILEDIVLTLTLFEDREMIEERLKTYAHLFDDKVMKQLKRRRYTGWGRLSRKLINGIRDKQSGKTILDFLKSDGFANRNFMQLIHDDSLTFKEDIQKAQVSGQGDSLHEHIANLAGSPAIKKGILQTVKVVDELVKVMGRHKPENIVIEMARENQTTQKGQKNSRERMKRIEEGIKELGSQILKEHPVENTQLQNEKLYLYYLQNGRDMYVDQELDINRLSDYDVDHIVPQSFLKDDSIDNKVLTRSDKARGKSDNVPSEEVVKKMKNYWRQLLNAKLITQRKFDNLTKAERGGLSELDKAGFIKRQLVETRQITKHVAQILDSRMNTKYDENDKLIREVKVITLKSKLVSDFRKDFQFYKVREINNYHHAHDAYLNAVVGTALIKKYPKLESEFVYGDYKVYDVRKMIAKSEQEIGKATAKYFFYSNIMNFFKTEITLANGEIRKRPLIETNGETGEIVWDKGRDFATVRKVLSMPQVNIVKKTEVQTGGFSKESILPKRNSDKLIARKKDWDPKKYGGFDSPTVAYSVLVVAKVEKGKSKKLKSVKELLGITIMERSSFEKNPIDFLEAKGYKEVKKDLIIKLPKYSLFELENGRKRMLASAGELQKGNELALPSKYVNFLYLASHYEKLKGSPEDNEQKQLFVEQHKHYLDEIIEQISEFSKRVILADANLDKVLSAYNKHRDKPIREQAENIIHLFTLTNLGAPAAFKYFDTTIDRKRYTSTKEVLDATLIHQSITGLYETRIDLSQLGGDGGGSSGSSGSSGGTVSLQDEHRLFDIPVTTSLPDVWLQDFPQAWAETGGLGRAKCQAPIIIDLKPTAVPVSIKQYPMSLEAHMGIRQHIIKFLELGVLRPCRSPWNTPLLPVKKPGTQDYRPVQDLREINKRTVDIHPTVPNPYNLLSTLKPDYSWYTVLDLKDAFFCLPLAPQSQELFAFEWKDPERGISGQLTWTRLPQGFKNSPTLFNEALHRDLTDFRTQHPEVTLLQYVDDLLLAAPTKKACTQGTRHLLQELGEKGYRASAKKAQICQTKVTYLGYILSEGKRWLTPGRIETVARIPPPRNPREVREFLGTAGFCRLWIPGFAELAAPLYALTKPSTPFTWQTEHQLAFEALKKALLSAPALGLPDTSKPFTLFLDERQGIAKGVLTQKLGPWKRPVAYLSKKLDPVAAGWPPCLRIMAATAMLVKDSAKLTLGQPLTVITPHTLEAIVRQPPDRWITNARLTHYQALLLDTDRVQFGPPVTLNPATLLPVPENQPSPHDCRQVLAETHGTREDLKDQELPDADHTWYTDGSSYLDSGTRRAGAAVVDGHNTIWAQSLPPGTSAQKAELIALTKALELSKGKKANIYTDSRYAFATAHTHGSIYERRGWLTSEGKEIKNKAEIIALLKALFLPQEVAIIHCPGHQKGQDPVAVGNRQADRVARQAAMAEVLTLATEPDNTSHITAGKRTADGSEFEKRTADGSEFESPKKKAKVE

SEQ ID NO: 1583 - protein, 2099 aa, synthetic construct
MPAAKRVKLDGGDKKYSIGLDIGTNSVGWAVITDEYKVPSKKFKVLGNTDRHSIKKNLIGALLFDSGETAEATRLKRTARRRYTRRKNRICYLQEIFSNEMAKVDDSFFHRLEESFLVEEDKKHERHPIFGNIVDEVAYHEKYPTIYHLRKKLVDSTDKADLRLIYLALAHMIKFRGHFLIEGDLNPDNSDVDKLFIQLVQTYNQLFEENPINASGVDAKAILSARLSKSRRLENLIAQLPGEKKNGLFGNLIALSLGLTPNFKSNFDLAEDAKLQLSKDTYDDDLDNLLAQIGDQYADLFLAAKNLSDAILLSDILRVNTEITKAPLSASMIKRYDEHHQDLTLLKALVRQQLPEKYKEIFFDQSKNGYAGYIDGGASQEEFYKFIKPILEKMDGTEELLVKLNREDLLRKQRTFDNGSIPHQIHLGELHAILRRQEDFYPFLKDNREKIEKILTFRIPYYVGPLARGNSRFAWMTRKSEETITPWNFEEVVDKGASAQSFIERMTNFDKNLPNEKVLPKHSLLYEYFTVYNELTKVKYVTEGMRKPAFLSGEQKKAIVDLLFKTNRKVTVKQLKEDYFKKIECFDSVEISGVEDRFNASLGTYHDLLKIIKDKDFLDNEENEDILEDIVLTLTLFEDREMIEERLKTYAHLFDDKVMKQLKRRRYTGWGRLSRKLINGIRDKQSGKTILDFLKSDGFANRNFMQLIHDDSLTFKEDIQKAQVSGQGDSLHEHIANLAGSPAIKKGILQTVKVVDELVKVMGRHKPENIVIEMARENQTTQKGQKNSRERMKRIEEGIKELGSQILKEHPVENTQLQNEKLYLYYLQNGRDMYVDQELDINRLSDYDVDHIVPQSFLKDDSIDNKVLTRSDKARGKSDNVPSEEVVKKMKNYWRQLLNAKLITQRKFDNLTKAERGGLSELDKAGFIKRQLVETRQITKHVAQILDSRMNTKYDENDKLIREVKVITLKSKLVSDFRKDFQFYKVREINNYHHAHDAYLNAVVGTALIKKYPKLESEFVYGDYKVYDVRKMIAKSEQEIGKATAKYFFYSNIMNFFKTEITLANGEIRKRPLIETNGETGEIVWDKGRDFATVRKVLSMPQVNIVKKTEVQTGGFSKESILPKRNSDKLIARKKDWDPKKYGGFDSPTVAYSVLVVAKVEKGKSKKLKSVKELLGITIMERSSFEKNPIDFLEAKGYKEVKKDLIIKLPKYSLFELENGRKRMLASAGELQKGNELALPSKYVNFLYLASHYEKLKGSPEDNEQKQLFVEQHKHYLDEIIEQISEFSKRVILADANLDKVLSAYNKHRDKPIREQAENIIHLFTLTNLGAPAAFKYFDTTIDRKRYTSTKEVLDATLIHQSITGLYETRIDLSQLGGDGGEAAAKGSSGGTVSLQDEHRLFDIPVTTSLPDVWLQDFPQAWAETGGLGRAKCQAPIIIDLKPTAVPVSIKQYPMSLEAHMGIRQHIIKFLELGVLRPCRSPWNTPLLPVKKPGTQDYRPVQDLREINKRTVDIHPTVPNPYNLLSTLKPDYSWYTVLDLKDAFFCLPLAPQSQELFAFEWKDPERGISGQLTWTRLPQGFKNSPTLFNEALHRDLTDFRTQHPEVTLLQYVDDLLLAAPTKKACTQGTRHLLQELGEKGYRASAKKAQICQTKVTYLGYILSEGKRWLTPGRIETVARIPPPRNPREVREFLGTAGFCRLWIPGFAELAAPLYALTKPSTPFTWQTEHQLAFEALKKALLSAPALGLPDTSKPFTLFLDERQGIAKGVLTQKLGPWKRPVAYLSKKLDPVAAGWPPCLRIMAATAMLVKDSAKLTLGQPLTVITPHTLEAIVRQPPDRWITNARLTHYQALLLDTDRVQFGPPVTLNPATLLPVPENQPSPHDCRQVLAETHGTREDLKDQELPDADHTWYTDGSSYLDSGTRRAGAAVVDGHNTIWAQSLPPGTSAQKAELIALTKALELSKGKKANIYTDSRYAFATAHTHGSIYERRGWLTSEGKEIKNKAEIIALLKALFLPQEVAIIHCPGHQKGQDPVAVGNRQADRVARQAAMAEVLTLATEPDNTSHITAGKRTADGSEFEKRTADGSEFESPKKKAKVE

SEQ ID NO: 1584 - protein, 2100 aa, synthetic construct
MPAAKRVKLDGGDKKYSIGLDIGTNSVGWAVITDEYKVPSKKFKVLGNTDRHSIKKNLIGALLFDSGETAEATRLKRTARRRYTRRKNRICYLQEIFSNEMAKVDDSFFHRLEESFLVEEDKKHERHPIFGNIVDEVAYHEKYPTIYHLRKKLVDSTDKADLRLIYLALAHMIKFRGHFLIEGDLNPDNSDVDKLFIQLVQTYNQLFEENPINASGVDAKAILSARLSKSRRLENLIAQLPGEKKNGLFGNLIALSLGLTPNFKSNFDLAEDAKLQLSKDTYDDDLDNLLAQIGDQYADLFLAAKNLSDAILLSDILRVNTEITKAPLSASMIKRYDEHHQDLTLLKALVRQQLPEKYKEIFFDQSKNGYAGYIDGGASQEEFYKFIKPILEKMDGTEELLVKLNREDLLRKQRTFDNGSIPHQIHLGELHAILRRQEDFYPFLKDNREKIEKILTFRIPYYVGPLARGNSRFAWMTRKSEETITPWNFEEVVDKGASAQSFIERMTNFDKNLPNEKVLPKHSLLYEYFTVYNELTKVKYVTEGMRKPAFLSGEQKKAIVDLLFKTNRKVTVKQLKEDYFKKIECFDSVEISGVEDRFNASLGTYHDLLKIIKDKDFLDNEENEDILEDIVLTLTLFEDREMIEERLKTYAHLFDDKVMKQLKRRRYTGWGRLSRKLINGIRDKQSGKTILDFLKSDGFANRNFMQLIHDDSLTFKEDIQKAQVSGQGDSLHEHIANLAGSPAIKKGILQTVKVVDELVKVMGRHKPENIVIEMARENQTTQKGQKNSRERMKRIEEGIKELGSQILKEHPVENTQLQNEKLYLYYLQNGRDMYVDQELDINRLSDYDVDHIVPQSFLKDDSIDNKVLTRSDKARGKSDNVPSEEVVKKMKNYWRQLLNAKLITQRKFDNLTKAERGGLSELDKAGFIKRQLVETRQITKHVAQILDSRMNTKYDENDKLIREVKVITLKSKLVSDFRKDFQFYKVREINNYHHAHDAYLNAVVGTALIKKYPKLESEFVYGDYKVYDVRKMIAKSEQEIGKATAKYFFYSNIMNFFKTEITLANGEIRKRPLIETNGETGEIVWDKGRDFATVRKVLSMPQVNIVKKTEVQTGGFSKESILPKRNSDKLIARKKDWDPKKYGGFDSPTVAYSVLVVAKVEKGKSKKLKSVKELLGITIMERSSFEKNPIDFLEAKGYKEVKKDLIIKLPKYSLFELENGRKRMLASAGELQKGNELALPSKYVNFLYLASHYEKLKGSPEDNEQKQLFVEQHKHYLDEIIEQISEFSKRVILADANLDKVLSAYNKHRDKPIREQAENIIHLFTLTNLGAPAAFKYFDTTIDRKRYTSTKEVLDATLIHQSITGLYETRIDLSQLGGDGGGSSGGSPAPGGTVSLQDEHRLFDIPVTTSLPDVWLQDFPQAWAETGGLGRAKCQAPIIIDLKPTAVPVSIKQYPMSLEAHMGIRQHIIKFLELGVLRPCRSPWNTPLLPVKKPGTQDYRPVQDLREINKRTVDIHPTVPNPYNLLSTLKPDYSWYTVLDLKDAFFCLPLAPQSQELFAFEWKDPERGISGQLTWTRLPQGFKNSPTLFNEALHRDLTDFRTQHPEVTLLQYVDDLLLAAPTKKACTQGTRHLLQELGEKGYRASAKKAQICQTKVTYLGYILSEGKRWLTPGRIETVARIPPPRNPREVREFLGTAGFCRLWIPGFAELAAPLYALTKPSTPFTWQTEHQLAFEALKKALLSAPALGLPDTSKPFTLFLDERQGIAKGVLTQKLGPWKRPVAYLSKKLDPVAAGWPPCLRIMAATAMLVKDSAKLTLGQPLTVITPHTLEAIVRQPPDRWITNARLTHYQALLLDTDRVQFGPPVTLNPATLLPVPENQPSPHDCRQVLAETHGTREDLKDQELPDADHTWYTDGSSYLDSGTRRAGAAVVDGHNTIWAQSLPPGTSAQKAELIALTKALELSKGKKANIYTDSRYAFATAHTHGSIYERRGWLTSEGKEIKNKAEIIALLKALFLPQEVAIIHCPGHQKGQDPVAVGNRQADRVARQAAMAEVLTLATEPDNTSHITAGKRTADGSEFEKRTADGSEFESPKKKAKVE

SEQ ID NO: 1585 - protein, 2102 aa, synthetic construct
MPAAKRVKLDGGDKKYSIGLDIGTNSVGWAVITDEYKVPSKKFKVLGNTDRHSIKKNLIGALLFDSGETAEATRLKRTARRRYTRRKNRICYLQEIFSNEMAKVDDSFFHRLEESFLVEEDKKHERHPIFGNIVDEVAYHEKYPTIYHLRKKLVDSTDKADLRLIYLALAHMIKFRGHFLIEGDLNPDNSDVDKLFIQLVQTYNQLFEENPINASGVDAKAILSARLSKSRRLENLIAQLPGEKKNGLFGNLIALSLGLTPNFKSNFDLAEDAKLQLSKDTYDDDLDNLLAQIGDQYADLFLAAKNLSDAILLSDILRVNTEITKAPLSASMIKRYDEHHQDLTLLKALVRQQLPEKYKEIFFDQSKNGYAGYIDGGASQEEFYKFIKPILEKMDGTEELLVKLNREDLLRKQRTFDNGSIPHQIHLGELHAILRRQEDFYPFLKDNREKIEKILTFRIPYYVGPLARGNSRFAWMTRKSEETITPWNFEEVVDKGASAQSFIERMTNFDKNLPNEKVLPKHSLLYEYFTVYNELTKVKYVTEGMRKPAFLSGEQKKAIVDLLFKTNRKVTVKQLKEDYFKKIECFDSVEISGVEDRFNASLGTYHDLLKIIKDKDFLDNEENEDILEDIVLTLTLFEDREMIEERLKTYAHLFDDKVMKQLKRRRYTGWGRLSRKLINGIRDKQSGKTILDFLKSDGFANRNFMQLIHDDSLTFKEDIQKAQVSGQGDSLHEHIANLAGSPAIKKGILQTVKVVDELVKVMGRHKPENIVIEMARENQTTQKGQKNSRERMKRIEEGIKELGSQILKEHPVENTQLQNEKLYLYYLQNGRDMYVDQELDINRLSDYDVDHIVPQSFLKDDSIDNKVLTRSDKARGKSDNVPSEEVVKKMKNYWRQLLNAKLITQRKFDNLTKAERGGLSELDKAGFIKRQLVETRQITKHVAQILDSRMNTKYDENDKLIREVKVITLKSKLVSDFRKDFQFYKVREINNYHHAHDAYLNAVVGTALIKKYPKLESEFVYGDYKVYDVRKMIAKSEQEIGKATAKYFFYSNIMNFFKTEITLANGEIRKRPLIETNGETGEIVWDKGRDFATVRKVLSMPQVNIVKKTEVQTGGFSKESILPKRNSDKLIARKKDWDPKKYGGFDSPTVAYSVLVVAKVEKGKSKKLKSVKELLGITIMERSSFEKNPIDFLEAKGYKEVKKDLIIKLPKYSLFELENGRKRMLASAGELQKGNELALPSKYVNFLYLASHYEKLKGSPEDNEQKQLFVEQHKHYLDEIIEQISEFSKRVILADANLDKVLSAYNKHRDKPIREQAENIIHLFTLTNLGAPAAFKYFDTTIDRKRYTSTKEVLDATLIHQSITGLYETRIDLSQLGGDGGGGGEAAAKGGSGGTVSLQDEHRLFDIPVTTSLPDVWLQDFPQAWAETGGLGRAKCQAPIIIDLKPTAVPVSIKQYPMSLEAHMGIRQHIIKFLELGVLRPCRSPWNTPLLPVKKPGTQDYRPVQDLREINKRTVDIHPTVPNPYNLLSTLKPDYSWYTVLDLKDAFFCLPLAPQSQELFAFEWKDPERGISGQLTWTRLPQGFKNSPTLFNEALHRDLTDFRTQHPEVTLLQYVDDLLLAAPTKKACTQGTRHLLQELGEKGYRASAKKAQICQTKVTYLGYILSEGKRWLTPGRIETVARIPPPRNPREVREFLGTAGFCRLWIPGFAELAAPLYALTKPSTPFTWQTEHQLAFEALKKALLSAPALGLPDTSKPFTLFLDERQGIAKGVLTQKLGPWKRPVAYLSKKLDPVAAGWPPCLRIMAATAMLVKDSAKLTLGQPLTVITPHTLEAIVRQPPDRWITNARLTHYQALLLDTDRVQFGPPVTLNPATLLPVPENQPSPHDCRQVLAETHGTREDLKDQELPDADHTWYTDGSSYLDSGTRRAGAAVVDGHNTIWAQSLPPGTSAQKAELIALTKALELSKGKKANIYTDSRYAFATAHTHGSIYERRGWLTSEGKEIKNKAEIIALLKALFLPQEVAIIHCPGHQKGQDPVAVGNRQADRVARQAAMAEVLTLATEPDNTSHITAGKRTADGSEFEKRTADGSEFESPKKKAKVE

SEQ ID NO: 1586 - protein, 2100 aa, synthetic construct
MPAAKRVKLDGGDKKYSIGLDIGTNSVGWAVITDEYKVPSKKFKVLGNTDRHSIKKNLIGALLFDSGETAEATRLKRTARRRYTRRKNRICYLQEIFSNEMAKVDDSFFHRLEESFLVEEDKKHERHPIFGNIVDEVAYHEKYPTIYHLRKKLVDSTDKADLRLIYLALAHMIKFRGHFLIEGDLNPDNSDVDKLFIQLVQTYNQLFEENPINASGVDAKAILSARLSKSRRLENLIAQLPGEKKNGLFGNLIALSLGLTPNFKSNFDLAEDAKLQLSKDTYDDDLDNLLAQIGDQYADLFLAAKNLSDAILLSDILRVNTEITKAPLSASMIKRYDEHHQDLTLLKALVRQQLPEKYKEIFFDQSKNGYAGYIDGGASQEEFYKFIKPILEKMDGTEELLVKLNREDLLRKQRTFDNGSIPHQIHLGELHAILRRQEDFYPFLKDNREKIEKILTFRIPYYVGPLARGNSRFAWMTRKSEETITPWNFEEVVDKGASAQSFIERMTNFDKNLPNEKVLPKHSLLYEYFTVYNELTKVKYVTEGMRKPAFLSGEQKKAIVDLLFKTNRKVTVKQLKEDYFKKIECFDSVEISGVEDRFNASLGTYHDLLKIIKDKDFLDNEENEDILEDIVLTLTLFEDREMIEERLKTYAHLFDDKVMKQLKRRRYTGWGRLSRKLINGIRDKQSGKTILDFLKSDGFANRNFMQLIHDDSLTFKEDIQKAQVSGQGDSLHEHIANLAGSPAIKKGILQTVKVVDELVKVMGRHKPENIVIEMARENQTTQKGQKNSRERMKRIEEGIKELGSQILKEHPVENTQLQNEKLYLYYLQNGRDMYVDQELDINRLSDYDVDHIVPQSFLKDDSIDNKVLTRSDKARGKSDNVPSEEVVKKMKNYWRQLLNAKLITQRKFDNLTKAERGGLSELDKAGFIKRQLVETRQITKHVAQILDSRMNTKYDENDKLIREVKVITLKSKLVSDFRKDFQFYKVREINNYHHAHDAYLNAVVGTALIKKYPKLESEFVYGDYKVYDVRKMIAKSEQEIGKATAKYFFYSNIMNFFKTEITLANGEIRKRPLIETNGETGEIVWDKGRDFATVRKVLSMPQVNIVKKTEVQTGGFSKESILPKRNSDKLIARKKDWDPKKYGGFDSPTVAYSVLVVAKVEKGKSKKLKSVKELLGITIMERSSFEKNPIDFLEAKGYKEVKKDLIIKLPKYSLFELENGRKRMLASAGELQKGNELALPSKYVNFLYLASHYEKLKGSPEDNEQKQLFVEQHKHYLDEIIEQISEFSKRVILADANLDKVLSAYNKHRDKPIREQAENIIHLFTLTNLGAPAAFKYFDTTIDRKRYTSTKEVLDATLIHQSITGLYETRIDLSQLGGDGGPAPGSSGGSGGTVSLQDEHRLFDIPVTTSLPDVWLQDFPQAWAETGGLGRAKCQAPIIIDLKPTAVPVSIKQYPMSLEAHMGIRQHIIKFLELGVLRPCRSPWNTPLLPVKKPGTQDYRPVQDLREINKRTVDIHPTVPNPYNLLSTLKPDYSWYTVLDLKDAFFCLPLAPQSQELFAFEWKDPERGISGQLTWTRLPQGFKNSPTLFNEALHRDLTDFRTQHPEVTLLQYVDDLLLAAPTKKACTQGTRHLLQELGEKGYRASAKKAQICQTKVTYLGYILSEGKRWLTPGRIETVARIPPPRNPREVREFLGTAGFCRLWIPGFAELAAPLYALTKPSTPFTWQTEHQLAFEALKKALLSAPALGLPDTSKPFTLFLDERQGIAKGVLTQKLGPWKRPVAYLSKKLDPVAAGWPPCLRIMAATAMLVKDSAKLTLGQPLTVITPHTLEAIVRQPPDRWITNARLTHYQALLLDTDRVQFGPPVTLNPATLLPVPENQPSPHDCRQVLAETHGTREDLKDQELPDADHTWYTDGSSYLDSGTRRAGAAVVDGHNTIWAQSLPPGTSAQKAELIALTKALELSKGKKANIYTDSRYAFATAHTHGSIYERRGWLTSEGKEIKNKAEIIALLKALFLPQEVAIIHCPGHQKGQDPVAVGNRQADRVARQAAMAEVLTLATEPDNTSHITAGKRTADGSEFEKRTADGSEFESPKKKAKVE

SEQ ID NO: 1587 - protein, 2101 aa, synthetic construct
MPAAKRVKLDGGDKKYSIGLDIGTNSVGWAVITDEYKVPSKKFKVLGNTDRHSIKKNLIGALLFDSGETAEATRLKRTARRRYTRRKNRICYLQEIFSNEMAKVDDSFFHRLEESFLVEEDKKHERHPIFGNIVDEVAYHEKYPTIYHLRKKLVDSTDKADLRLIYLALAHMIKFRGHFLIEGDLNPDNSDVDKLFIQLVQTYNQLFEENPINASGVDAKAILSARLSKSRRLENLIAQLPGEKKNGLFGNLIALSLGLTPNFKSNFDLAEDAKLQLSKDTYDDDLDNLLAQIGDQYADLFLAAKNLSDAILLSDILRVNTEITKAPLSASMIKRYDEHHQDLTLLKALVRQQLPEKYKEIFFDQSKNGYAGYIDGGASQEEFYKFIKPILEKMDGTEELLVKLNREDLLRKQRTFDNGSIPHQIHLGELHAILRRQEDFYPFLKDNREKIEKILTFRIPYYVGPLARGNSRFAWMTRKSEETITPWNFEEVVDKGASAQSFIERMTNFDKNLPNEKVLPKHSLLYEYFTVYNELTKVKYVTEGMRKPAFLSGEQKKAIVDLLFKTNRKVTVKQLKEDYFKKIECFDSVEISGVEDRFNASLGTYHDLLKIIKDKDFLDNEENEDILEDIVLTLTLFEDREMIEERLKTYAHLFDDKVMKQLKRRRYTGWGRLSRKLINGIRDKQSGKTILDFLKSDGFANRNFMQLIHDDSLTFKEDIQKAQVSGQGDSLHEHIANLAGSPAIKKGILQTVKVVDELVKVMGRHKPENIVIEMARENQTTQKGQKNSRERMKRIEEGIKELGSQILKEHPVENTQLQNEKLYLYYLQNGRDMYVDQELDINRLSDYDVDHIVPQSFLKDDSIDNKVLTRSDKARGKSDNVPSEEVVKKMKNYWRQLLNAKLITQRKFDNLTKAERGGLSELDKAGFIKRQLVETRQITKHVAQILDSRMNTKYDENDKLIREVKVITLKSKLVSDFRKDFQFYKVREINNYHHAHDAYLNAVVGTALIKKYPKLESEFVYGDYKVYDVRKMIAKSEQEIGKATAKYFFYSNIMNFFKTEITLANGEIRKRPLIETNGETGEIVWDKGRDFATVRKVLSMPQVNIVKKTEVQTGGFSKESILPKRNSDKLIARKKDWDPKKYGGFDSPTVAYSVLVVAKVEKGKSKKLKSVKELLGITIMERSSFEKNPIDFLEAKGYKEVKKDLIIKLPKYSLFELENGRKRMLASAGELQKGNELALPSKYVNFLYLASHYEKLKGSPEDNEQKQLFVEQHKHYLDEIIEQISEFSKRVILADANLDKVLSAYNKHRDKPIREQAENIIHLFTLTNLGAPAAFKYFDTTIDRKRYTSTKEVLDATLIHQSITGLYETRIDLSQLGGDGGEAAAKEAAAKGGTVSLQDEHRLFDIPVTTSLPDVWLQDFPQAWAETGGLGRAKCQAPIIIDLKPTAVPVSIKQYPMSLEAHMGIRQHIIKFLELGVLRPCRSPWNTPLLPVKKPGTQDYRPVQDLREINKRTVDIHPTVPNPYNLLSTLKPDYSWYTVLDLKDAFFCLPLAPQSQELFAFEWKDPERGISGQLTWTRLPQGFKNSPTLFNEALHRDLTDFRTQHPEVTLLQYVDDLLLAAPTKKACTQGTRHLLQELGEKGYRASAKKAQICQTKVTYLGYILSEGKRWLTPGRIETVARIPPPRNPREVREFLGTAGFCRLWIPGFAELAAPLYALTKPSTPFTWQTEHQLAFEALKKALLSAPALGLPDTSKPFTLFLDERQGIAKGVLTQKLGPWKRPVAYLSKKLDPVAAGWPPCLRIMAATAMLVKDSAKLTLGQPLTVITPHTLEAIVRQPPDRWITNARLTHYQALLLDTDRVQFGPPVTLNPATLLPVPENQPSPHDCRQVLAETHGTREDLKDQELPDADHTWYTDGSSYLDSGTRRAGAAVVDGHNTIWAQSLPPGTSAQKAELIALTKALELSKGKKANIYTDSRYAFATAHTHGSIYERRGWLTSEGKEIKNKAEIIALLKALFLPQEVAIIHCPGHQKGQDPVAVGNRQADRVARQAAMAEVLTLATEPDNTSHITAGKRTADGSEFEKRTADGSEFESPKKKAKVE

SEQ ID NO: 1588 - protein, 2109 aa, synthetic construct
MPAAKRVKLDGGDKKYSIGLDIGTNSVGWAVITDEYKVPSKKFKVLGNTDRHSIKKNLIGALLFDSGETAEATRLKRTARRRYTRRKNRICYLQEIFSNEMAKVDDSFFHRLEESFLVEEDKKHERHPIFGNIVDEVAYHEKYPTIYHLRKKLVDSTDKADLRLIYLALAHMIKFRGHFLIEGDLNPDNSDVDKLFIQLVQTYNQLFEENPINASGVDAKAILSARLSKSRRLENLIAQLPGEKKNGLFGNLIALSLGLTPNFKSNFDLAEDAKLQLSKDTYDDDLDNLLAQIGDQYADLFLAAKNLSDAILLSDILRVNTEITKAPLSASMIKRYDEHHQDLTLLKALVRQQLPEKYKEIFFDQSKNGYAGYIDGGASQEEFYKFIKPILEKMDGTEELLVKLNREDLLRKQRTFDNGSIPHQIHLGELHAILRRQEDFYPFLKDNREKIEKILTFRIPYYVGPLARGNSRFAWMTRKSEETITPWNFEEVVDKGASAQSFIERMTNFDKNLPNEKVLPKHSLLYEYFTVYNELTKVKYVTEGMRKPAFLSGEQKKAIVDLLFKTNRKVTVKQLKEDYFKKIECFDSVEISGVEDRFNASLGTYHDLLKIIKDKDFLDNEENEDILEDIVLTLTLFEDREMIEERLKTYAHLFDDKVMKQLKRRRYTGWGRLSRKLINGIRDKQSGKTILDFLKSDGFANRNFMQLIHDDSLTFKEDIQKAQVSGQGDSLHEHIANLAGSPAIKKGILQTVKVVDELVKVMGRHKPENIVIEMARENQTTQKGQKNSRERMKRIEEGIKELGSQILKEHPVENTQLQNEKLYLYYLQNGRDMYVDQELDINRLSDYDVDHIVPQSFLKDDSIDNKVLTRSDKARGKSDNVPSEEVVKKMKNYWRQLLNAKLITQRKFDNLTKAERGGLSELDKAGFIKRQLVETRQITKHVAQILDSRMNTKYDENDKLIREVKVITLKSKLVSDFRKDFQFYKVREINNYHHAHDAYLNAVVGTALIKKYPKLESEFVYGDYKVYDVRKMIAKSEQEIGKATAKYFFYSNIMNFFKTEITLANGEIRKRPLIETNGETGEIVWDKGRDFATVRKVLSMPQVNIVKKTEVQTGGFSKESILPKRNSDKLIARKKDWDPKKYGGFDSPTVAYSVLVVAKVEKGKSKKLKSVKELLGITIMERSSFEKNPIDFLEAKGYKEVKKDLIIKLPKYSLFELENGRKRMLASAGELQKGNELALPSKYVNFLYLASHYEKLKGSPEDNEQKQLFVEQHKHYLDEIIEQISEFSKRVILADANLDKVLSAYNKHRDKPIREQAENIIHLFTLTNLGAPAAFKYFDTTIDRKRYTSTKEVLDATLIHQSITGLYETRIDLSQLGGDGGGSSGSSGSSGSSGSSGSSGGTVSLQDEHRLFDIPVTTSLPDVWLQDFPQAWAETGGLGRAKCQAPIIIDLKPTAVPVSIKQYPMSLEAHMGIRQHIIKFLELGVLRPCRSPWNTPLLPVKKPGTQDYRPVQDLREINKRTVDIHPTVPNPYNLLSTLKPDYSWYTVLDLKDAFFCLPLAPQSQELFAFEWKDPERGISGQLTWTRLPQGFKNSPTLFNEALHRDLTDFRTQHPEVTLLQYVDDLLLAAPTKKACTQGTRHLLQELGEKGYRASAKKAQICQTKVTYLGYILSEGKRWLTPGRIETVARIPPPRNPREVREFLGTAGFCRLWIPGFAELAAPLYALTKPSTPFTWQTEHQLAFEALKKALLSAPALGLPDTSKPFTLFLDERQGIAKGVLTQKLGPWKRPVAYLSKKLDPVAAGWPPCLRIMAATAMLVKDSAKLTLGQPLTVITPHTLEAIVRQPPDRWITNARLTHYQALLLDTDRVQFGPPVTLNPATLLPVPENQPSPHDCRQVLAETHGTREDLKDQELPDADHTWYTDGSSYLDSGTRRAGAAVVDGHNTIWAQSLPPGTSAQKAELIALTKALELSKGKKANIYTDSRYAFATAHTHGSIYERRGWLTSEGKEIKNKAEIIALLKALFLPQEVAIIHCPGHQKGQDPVAVGNRQADRVARQAAMAEVLTLATEPDNTSHITAGKRTADGSEFEKRTADGSEFESPKKKAKVE

SEQ ID NO: 1589 - protein, 2102 aa, synthetic construct
MPAAKRVKLDGGDKKYSIGLDIGTNSVGWAVITDEYKVPSKKFKVLGNTDRHSIKKNLIGALLFDSGETAEATRLKRTARRRYTRRKNRICYLQEIFSNEMAKVDDSFFHRLEESFLVEEDKKHERHPIFGNIVDEVAYHEKYPTIYHLRKKLVDSTDKADLRLIYLALAHMIKFRGHFLIEGDLNPDNSDVDKLFIQLVQTYNQLFEENPINASGVDAKAILSARLSKSRRLENLIAQLPGEKKNGLFGNLIALSLGLTPNFKSNFDLAEDAKLQLSKDTYDDDLDNLLAQIGDQYADLFLAAKNLSDAILLSDILRVNTEITKAPLSASMIKRYDEHHQDLTLLKALVRQQLPEKYKEIFFDQSKNGYAGYIDGGASQEEFYKFIKPILEKMDGTEELLVKLNREDLLRKQRTFDNGSIPHQIHLGELHAILRRQEDFYPFLKDNREKIEKILTFRIPYYVGPLARGNSRFAWMTRKSEETITPWNFEEVVDKGASAQSFIERMTNFDKNLPNEKVLPKHSLLYEYFTVYNELTKVKYVTEGMRKPAFLSGEQKKAIVDLLFKTNRKVTVKQLKEDYFKKIECFDSVEISGVEDRFNASLGTYHDLLKIIKDKDFLDNEENEDILEDIVLTLTLFEDREMIEERLKTYAHLFDDKVMKQLKRRRYTGWGRLSRKLINGIRDKQSGKTILDFLKSDGFANRNFMQLIHDDSLTFKEDIQKAQVSGQGDSLHEHIANLAGSPAIKKGILQTVKVVDELVKVMGRHKPENIVIEMARENQTTQKGQKNSRERMKRIEEGIKELGSQILKEHPVENTQLQNEKLYLYYLQNGRDMYVDQELDINRLSDYDVDHIVPQSFLKDDSIDNKVLTRSDKARGKSDNVPSEEVVKKMKNYWRQLLNAKLITQRKFDNLTKAERGGLSELDKAGFIKRQLVETRQITKHVAQILDSRMNTKYDENDKLIREVKVITLKSKLVSDFRKDFQFYKVREINNYHHAHDAYLNAVVGTALIKKYPKLESEFVYGDYKVYDVRKMIAKSEQEIGKATAKYFFYSNIMNFFKTEITLANGEIRKRPLIETNGETGEIVWDKGRDFATVRKVLSMPQVNIVKKTEVQTGGFSKESILPKRNSDKLIARKKDWDPKKYGGFDSPTVAYSVLVVAKVEKGKSKKLKSVKELLGITIMERSSFEKNPIDFLEAKGYKEVKKDLIIKLPKYSLFELENGRKRMLASAGELQKGNELALPSKYVNFLYLASHYEKLKGSPEDNEQKQLFVEQHKHYLDEIIEQISEFSKRVILADANLDKVLSAYNKHRDKPIREQAENIIHLFTLTNLGAPAAFKYFDTTIDRKRYTSTKEVLDATLIHQSITGLYETRIDLSQLGGDGGGGGEAAAKPAPGGTVSLQDEHRLFDIPVTTSLPDVWLQDFPQAWAETGGLGRAKCQAPIIIDLKPTAVPVSIKQYPMSLEAHMGIRQHIIKFLELGVLRPCRSPWNTPLLPVKKPGTQDYRPVQDLREINKRTVDIHPTVPNPYNLLSTLKPDYSWYTVLDLKDAFFCLPLAPQSQELFAFEWKDPERGISGQLTWTRLPQGFKNSPTLFNEALHRDLTDFRTQHPEVTLLQYVDDLLLAAPTKKACTQGTRHLLQELGEKGYRASAKKAQICQTKVTYLGYILSEGKRWLTPGRIETVARIPPPRNPREVREFLGTAGFCRLWIPGFAELAAPLYALTKPSTPFTWQTEHQLAFEALKKALLSAPALGLPDTSKPFTLFLDERQGIAKGVLTQKLGPWKRPVAYLSKKLDPVAAGWPPCLRIMAATAMLVKDSAKLTLGQPLTVITPHTLEAIVRQPPDRWITNARLTHYQALLLDTDRVQFGPPVTLNPATLLPVPENQPSPHDCRQVLAETHGTREDLKDQELPDADHTWYTDGSSYLDSGTRRAGAAVVDGHNTIWAQSLPPGTSAQKAELIALTKALELSKGKKANIYTDSRYAFATAHTHGSIYERRGWLTSEGKEIKNKAEIIALLKALFLPQEVAIIHCPGHQKGQDPVAVGNRQADRVARQAAMAEVLTLATEPDNTSHITAGKRTADGSEFEKRTADGSEFESPKKKAKVE

SEQ ID NO: 1590 - protein, 2097 aa, synthetic construct
MPAAKRVKLDGGDKKYSIGLDIGTNSVGWAVITDEYKVPSKKFKVLGNTDRHSIKKNLIGALLFDSGETAEATRLKRTARRRYTRRKNRICYLQEIFSNEMAKVDDSFFHRLEESFLVEEDKKHERHPIFGNIVDEVAYHEKYPTIYHLRKKLVDSTDKADLRLIYLALAHMIKFRGHFLIEGDLNPDNSDVDKLFIQLVQTYNQLFEENPINASGVDAKAILSARLSKSRRLENLIAQLPGEKKNGLFGNLIALSLGLTPNFKSNFDLAEDAKLQLSKDTYDDDLDNLLAQIGDQYADLFLAAKNLSDAILLSDILRVNTEITKAPLSASMIKRYDEHHQDLTLLKALVRQQLPEKYKEIFFDQSKNGYAGYIDGGASQEEFYKFIKPILEKMDGTEELLVKLNREDLLRKQRTFDNGSIPHQIHLGELHAILRRQEDFYPFLKDNREKIEKILTFRIPYYVGPLARGNSRFAWMTRKSEETITPWNFEEVVDKGASAQSFIERMTNFDKNLPNEKVLPKHSLLYEYFTVYNELTKVKYVTEGMRKPAFLSGEQKKAIVDLLFKTNRKVTVKQLKEDYFKKIECFDSVEISGVEDRFNASLGTYHDLLKIIKDKDFLDNEENEDILEDIVLTLTLFEDREMIEERLKTYAHLFDDKVMKQLKRRRYTGWGRLSRKLINGIRDKQSGKTILDFLKSDGFANRNFMQLIHDDSLTFKEDIQKAQVSGQGDSLHEHIANLAGSPAIKKGILQTVKVVDELVKVMGRHKPENIVIEMARENQTTQKGQKNSRERMKRIEEGIKELGSQILKEHPVENTQLQNEKLYLYYLQNGRDMYVDQELDINRLSDYDVDHIVPQSFLKDDSIDNKVLTRSDKARGKSDNVPSEEVVKKMKNYWRQLLNAKLITQRKFDNLTKAERGGLSELDKAGFIKRQLVETRQITKHVAQILDSRMNTKYDENDKLIREVKVITLKSKLVSDFRKDFQFYKVREINNYHHAHDAYLNAVVGTALIKKYPKLESEFVYGDYKVYDVRKMIAKSEQEIGKATAKYFFYSNIMNFFKTEITLANGEIRKRPLIETNGETGEIVWDKGRDFATVRKVLSMPQVNIVKKTEVQTGGFSKESILPKRNSDKLIARKKDWDPKKYGGFDSPTVAYSVLVVAKVEKGKSKKLKSVKELLGITIMERSSFEKNPIDFLEAKGYKEVKKDLIIKLPKYSLFELENGRKRMLASAGELQKGNELALPSKYVNFLYLASHYEKLKGSPEDNEQKQLFVEQHKHYLDEIIEQISEFSKRVILADANLDKVLSAYNKHRDKPIREQAENIIHLFTLTNLGAPAAFKYFDTTIDRKRYTSTKEVLDATLIHQSITGLYETRIDLSQLGGDGGPAPGGGGGTVSLQDEHRLFDIPVTTSLPDVWLQDFPQAWAETGGLGRAKCQAPIIIDLKPTAVPVSIKQYPMSLEAHMGIRQHIIKFLELGVLRPCRSPWNTPLLPVKKPGTQDYRPVQDLREINKRTVDIHPTVPNPYNLLSTLKPDYSWYTVLDLKDAFFCLPLAPQSQELFAFEWKDPERGISGQLTWTRLPQGFKNSPTLFNEALHRDLTDFRTQHPEVTLLQYVDDLLLAAPTKKACTQGTRHLLQELGEKGYRASAKKAQICQTKVTYLGYILSEGKRWLTPGRIETVARIPPPRNPREVREFLGTAGFCRLWIPGFAELAAPLYALTKPSTPFTWQTEHQLAFEALKKALLSAPALGLPDTSKPFTLFLDERQGIAKGVLTQKLGPWKRPVAYLSKKLDPVAAGWPPCLRIMAATAMLVKDSAKLTLGQPLTVITPHTLEAIVRQPPDRWITNARLTHYQALLLDTDRVQFGPPVTLNPATLLPVPENQPSPHDCRQVLAETHGTREDLKDQELPDADHTWYTDGSSYLDSGTRRAGAAVVDGHNTIWAQSLPPGTSAQKAELIALTKALELSKGKKANIYTDSRYAFATAHTHGSIYERRGWLTSEGKEIKNKAEIIALLKALFLPQEVAIIHCPGHQKGQDPVAVGNRQADRVARQAAMAEVLTLATEPDNTSHITAGKRTADGSEFEKRTADGSEFESPKKKAKVE

SEQ ID NO: 1591 - protein, 2100 aa, synthetic construct
MPAAKRVKLDGGDKKYSIGLDIGTNSVGWAVITDEYKVPSKKFKVLGNTDRHSIKKNLIGALLFDSGETAEATRLKRTARRRYTRRKNRICYLQEIFSNEMAKVDDSFFHRLEESFLVEEDKKHERHPIFGNIVDEVAYHEKYPTIYHLRKKLVDSTDKADLRLIYLALAHMIKFRGHFLIEGDLNPDNSDVDKLFIQLVQTYNQLFEENPINASGVDAKAILSARLSKSRRLENLIAQLPGEKKNGLFGNLIALSLGLTPNFKSNFDLAEDAKLQLSKDTYDDDLDNLLAQIGDQYADLFLAAKNLSDAILLSDILRVNTEITKAPLSASMIKRYDEHHQDLTLLKALVRQQLPEKYKEIFFDQSKNGYAGYIDGGASQEEFYKFIKPILEKMDGTEELLVKLNREDLLRKQRTFDNGSIPHQIHLGELHAILRRQEDFYPFLKDNREKIEKILTFRIPYYVGPLARGNSRFAWMTRKSEETITPWNFEEVVDKGASAQSFIERMTNFDKNLPNEKVLPKHSLLYEYFTVYNELTKVKYVTEGMRKPAFLSGEQKKAIVDLLFKTNRKVTVKQLKEDYFKKIECFDSVEISGVEDRFNASLGTYHDLLKIIKDKDFLDNEENEDILEDIVLTLTLFEDREMIEERLKTYAHLFDDKVMKQLKRRRYTGWGRLSRKLINGIRDKQSGKTILDFLKSDGFANRNFMQLIHDDSLTFKEDIQKAQVSGQGDSLHEHIANLAGSPAIKKGILQTVKVVDELVKVMGRHKPENIVIEMARENQTTQKGQKNSRERMKRIEEGIKELGSQILKEHPVENTQLQNEKLYLYYLQNGRDMYVDQELDINRLSDYDVDHIVPQSFLKDDSIDNKVLTRSDKARGKSDNVPSEEVVKKMKNYWRQLLNAKLITQRKFDNLTKAERGGLSELDKAGFIKRQLVETRQITKHVAQILDSRMNTKYDENDKLIREVKVITLKSKLVSDFRKDFQFYKVREINNYHHAHDAYLNAVVGTALIKKYPKLESEFVYGDYKVYDVRKMIAKSEQEIGKATAKYFFYSNIMNFFKTEITLANGEIRKRPLIETNGETGEIVWDKGRDFATVRKVLSMPQVNIVKKTEVQTGGFSKESILPKRNSDKLIARKKDWDPKKYGGFDSPTVAYSVLVVAKVEKGKSKKLKSVKELLGITIMERSSFEKNPIDFLEAKGYKEVKKDLIIKLPKYSLFELENGRKRMLASAGELQKGNELALPSKYVNFLYLASHYEKLKGSPEDNEQKQLFVEQHKHYLDEIIEQISEFSKRVILADANLDKVLSAYNKHRDKPIREQAENIIHLFTLTNLGAPAAFKYFDTTIDRKRYTSTKEVLDATLIHQSITGLYETRIDLSQLGGDGGGGSPAPGSSGGTVSLQDEHRLFDIPVTTSLPDVWLQDFPQAWAETGGLGRAKCQAPIIIDLKPTAVPVSIKQYPMSLEAHMGIRQHIIKFLELGVLRPCRSPWNTPLLPVKKPGTQDYRPVQDLREINKRTVDIHPTVPNPYNLLSTLKPDYSWYTVLDLKDAFFCLPLAPQSQELFAFEWKDPERGISGQLTWTRLPQGFKNSPTLFNEALHRDLTDFRTQHPEVTLLQYVDDLLLAAPTKKACTQGTRHLLQELGEKGYRASAKKAQICQTKVTYLGYILSEGKRWLTPGRIETVARIPPPRNPREVREFLGTAGFCRLWIPGFAELAAPLYALTKPSTPFTWQTEHQLAFEALKKALLSAPALGLPDTSKPFTLFLDERQGIAKGVLTQKLGPWKRPVAYLSKKLDPVAAGWPPCLRIMAATAMLVKDSAKLTLGQPLTVITPHTLEAIVRQPPDRWITNARLTHYQALLLDTDRVQFGPPVTLNPATLLPVPENQPSPHDCRQVLAETHGTREDLKDQELPDADHTWYTDGSSYLDSGTRRAGAAVVDGHNTIWAQSLPPGTSAQKAELIALTKALELSKGKKANIYTDSRYAFATAHTHGSIYERRGWLTSEGKEIKNKAEIIALLKALFLPQEVAIIHCPGHQKGQDPVAVGNRQADRVARQAAMAEVLTLATEPDNTSHITAGKRTADGSEFEKRTADGSEFESPKKKAKVE

SEQ ID NO: 1592 - protein, 2097 aa, synthetic construct
MPAAKRVKLDGGDKKYSIGLDIGTNSVGWAVITDEYKVPSKKFKVLGNTDRHSIKKNLIGALLFDSGETAEATRLKRTARRRYTRRKNRICYLQEIFSNEMAKVDDSFFHRLEESFLVEEDKKHERHPIFGNIVDEVAYHEKYPTIYHLRKKLVDSTDKADLRLIYLALAHMIKFRGHFLIEGDLNPDNSDVDKLFIQLVQTYNQLFEENPINASGVDAKAILSARLSKSRRLENLIAQLPGEKKNGLFGNLIALSLGLTPNFKSNFDLAEDAKLQLSKDTYDDDLDNLLAQIGDQYADLFLAAKNLSDAILLSDILRVNTEITKAPLSASMIKRYDEHHQDLTLLKALVRQQLPEKYKEIFFDQSKNGYAGYIDGGASQEEFYKFIKPILEKMDGTEELLVKLNREDLLRKQRTFDNGSIPHQIHLGELHAILRRQEDFYPFLKDNREKIEKILTFRIPYYVGPLARGNSRFAWMTRKSEETITPWNFEEVVDKGASAQSFIERMTNFDKNLPNEKVLPKHSLLYEYFTVYNELTKVKYVTEGMRKPAFLSGEQKKAIVDLLFKTNRKVTVKQLKEDYFKKIECFDSVEISGVEDRFNASLGTYHDLLKIIKDKDFLDNEENEDILEDIVLTLTLFEDREMIEERLKTYAHLFDDKVMKQLKRRRYTGWGRLSRKLINGIRDKQSGKTILDFLKSDGFANRNFMQLIHDDSLTFKEDIQKAQVSGQGDSLHEHIANLAGSPAIKKGILQTVKVVDELVKVMGRHKPENIVIEMARENQTTQKGQKNSRERMKRIEEGIKELGSQILKEHPVENTQLQNEKLYLYYLQNGRDMYVDQELDINRLSDYDVDHIVPQSFLKDDSIDNKVLTRSDKARGKSDNVPSEEVVKKMKNYWRQLLNAKLITQRKFDNLTKAERGGLSELDKAGFIKRQLVETRQITKHVAQILDSRMNTKYDENDKLIREVKVITLKSKLVSDFRKDFQFYKVREINNYHHAHDAYLNAVVGTALIKKYPKLESEFVYGDYKVYDVRKMIAKSEQEIGKATAKYFFYSNIMNFFKTEITLANGEIRKRPLIETNGETGEIVWDKGRDFATVRKVLSMPQVNIVKKTEVQTGGFSKESILPKRNSDKLIARKKDWDPKKYGGFDSPTVAYSVLVVAKVEKGKSKKLKSVKELLGITIMERSSFEKNPIDFLEAKGYKEVKKDLIIKLPKYSLFELENGRKRMLASAGELQKGNELALPSKYVNFLYLASHYEKLKGSPEDNEQKQLFVEQHKHYLDEIIEQISEFSKRVILADANLDKVLSAYNKHRDKPIREQAENIIHLFTLTNLGAPAAFKYFDTTIDRKRYTSTKEVLDATLIHQSITGLYETRIDLSQLGGDGGGSSPAPGGTVSLQDEHRLFDIPVTTSLPDVWLQDFPQAWAETGGLGRAKCQAPIIIDLKPTAVPVSIKQYPMSLEAHMGIRQHIIKFLELGVLRPCRSPWNTPLLPVKKPGTQDYRPVQDLREINKRTVDIHPTVPNPYNLLSTLKPDYSWYTVLDLKDAFFCLPLAPQSQELFAFEWKDPERGISGQLTWTRLPQGFKNSPTLFNEALHRDLTDFRTQHPEVTLLQYVDDLLLAAPTKKACTQGTRHLLQELGEKGYRASAKKAQICQTKVTYLGYILSEGKRWLTPGRIETVARIPPPRNPREVREFLGTAGFCRLWIPGFAELAAPLYALTKPSTPFTWQTEHQLAFEALKKALLSAPALGLPDTSKPFTLFLDERQGIAKGVLTQKLGPWKRPVAYLSKKLDPVAAGWPPCLRIMAATAMLVKDSAKLTLGQPLTVITPHTLEAIVRQPPDRWITNARLTHYQALLLDTDRVQFGPPVTLNPATLLPVPENQPSPHDCRQVLAETHGTREDLKDQELPDADHTWYTDGSSYLDSGTRRAGAAVVDGHNTIWAQSLPPGTSAQKAELIALTKALELSKGKKANIYTDSRYAFATAHTHGSIYERRGWLTSEGKEIKNKAEIIALLKALFLPQEVAIIHCPGHQKGQDPVAVGNRQADRVARQAAMAEVLTLATEPDNTSHITAGKRTADGSEFEKRTADGSEFESPKKKAKVE

SEQ ID NO: 1593 - protein, 2102 aa, synthetic construct
MPAAKRVKLDGGDKKYSIGLDIGTNSVGWAVITDEYKVPSKKFKVLGNTDRHSIKKNLIGALLFDSGETAEATRLKRTARRRYTRRKNRICYLQEIFSNEMAKVDDSFFHRLEESFLVEEDKKHERHPIFGNIVDEVAYHEKYPTIYHLRKKLVDSTDKADLRLIYLALAHMIKFRGHFLIEGDLNPDNSDVDKLFIQLVQTYNQLFEENPINASGVDAKAILSARLSKSRRLENLIAQLPGEKKNGLFGNLIALSLGLTPNFKSNFDLAEDAKLQLSKDTYDDDLDNLLAQIGDQYADLFLAAKNLSDAILLSDILRVNTEITKAPLSASMIKRYDEHHQDLTLLKALVRQQLPEKYKEIFFDQSKNGYAGYIDGGASQEEFYKFIKPILEKMDGTEELLVKLNREDLLRKQRTFDNGSIPHQIHLGELHAILRRQEDFYPFLKDNREKIEKILTFRIPYYVGPLARGNSRFAWMTRKSEETITPWNFEEVVDKGASAQSFIERMTNFDKNLPNEKVLPKHSLLYEYFTVYNELTKVKYVTEGMRKPAFLSGEQKKAIVDLLFKTNRKVTVKQLKEDYFKKIECFDSVEISGVEDRFNASLGTYHDLLKIIKDKDFLDNEENEDILEDIVLTLTLFEDREMIEERLKTYAHLFDDKVMKQLKRRRYTGWGRLSRKLINGIRDKQSGKTILDFLKSDGFANRNFMQLIHDDSLTFKEDIQKAQVSGQGDSLHEHIANLAGSPAIKKGILQTVKVVDELVKVMGRHKPENIVIEMARENQTTQKGQKNSRERMKRIEEGIKELGSQILKEHPVENTQLQNEKLYLYYLQNGRDMYVDQELDINRLSDYDVDHIVPQSFLKDDSIDNKVLTRSDKARGKSDNVPSEEVVKKMKNYWRQLLNAKLITQRKFDNLTKAERGGLSELDKAGFIKRQLVETRQITKHVAQILDSRMNTKYDENDKLIREVKVITLKSKLVSDFRKDFQFYKVREINNYHHAHDAYLNAVVGTALIKKYPKLESEFVYGDYKVYDVRKMIAKSEQEIGKATAKYFFYSNIMNFFKTEITLANGEIRKRPLIETNGETGEIVWDKGRDFATVRKVLSMPQVNIVKKTEVQTGGFSKESILPKRNSDKLIARKKDWDPKKYGGFDSPTVAYSVLVVAKVEKGKSKKLKSVKELLGITIMERSSFEKNPIDFLEAKGYKEVKKDLIIKLPKYSLFELENGRKRMLASAGELQKGNELALPSKYVNFLYLASHYEKLKGSPEDNEQKQLFVEQHKHYLDEIIEQISEFSKRVILADANLDKVLSAYNKHRDKPIREQAENIIHLFTLTNLGAPAAFKYFDTTIDRKRYTSTKEVLDATLIHQSITGLYETRIDLSQLGGDGGEAAAKGGGGSSGGTVSLQDEHRLFDIPVTTSLPDVWLQDFPQAWAETGGLGRAKCQAPIIIDLKPTAVPVSIKQYPMSLEAHMGIRQHIIKFLELGVLRPCRSPWNTPLLPVKKPGTQDYRPVQDLREINKRTVDIHPTVPNPYNLLSTLKPDYSWYTVLDLKDAFFCLPLAPQSQELFAFEWKDPERGISGQLTWTRLPQGFKNSPTLFNEALHRDLTDFRTQHPEVTLLQYVDDLLLAAPTKKACTQGTRHLLQELGEKGYRASAKKAQICQTKVTYLGYILSEGKRWLTPGRIETVARIPPPRNPREVREFLGTAGFCRLWIPGFAELAAPLYALTKPSTPFTWQTEHQLAFEALKKALLSAPALGLPDTSKPFTLFLDERQGIAKGVLTQKLGPWKRPVAYLSKKLDPVAAGWPPCLRIMAATAMLVKDSAKLTLGQPLTVITPHTLEAIVRQPPDRWITNARLTHYQALLLDTDRVQFGPPVTLNPATLLPVPENQPSPHDCRQVLAETHGTREDLKDQELPDADHTWYTDGSSYLDSGTRRAGAAVVDGHNTIWAQSLPPGTSAQKAELIALTKALELSKGKKANIYTDSRYAFATAHTHGSIYERRGWLTSEGKEIKNKAEIIALLKALFLPQEVAIIHCPGHQKGQDPVAVGNRQADRVARQAAMAEVLTLATEPDNTSHITAGKRTADGSEFEKRTADGSEFESPKKKAKVE

SEQ ID NO: 1594 - protein, 2103 aa, synthetic construct
MPAAKRVKLDGGDKKYSIGLDIGTNSVGWAVITDEYKVPSKKFKVLGNTDRHSIKKNLIGALLFDSGETAEATRLKRTARRRYTRRKNRICYLQEIFSNEMAKVDDSFFHRLEESFLVEEDKKHERHPIFGNIVDEVAYHEKYPTIYHLRKKLVDSTDKADLRLIYLALAHMIKFRGHFLIEGDLNPDNSDVDKLFIQLVQTYNQLFEENPINASGVDAKAILSARLSKSRRLENLIAQLPGEKKNGLFGNLIALSLGLTPNFKSNFDLAEDAKLQLSKDTYDDDLDNLLAQIGDQYADLFLAAKNLSDAILLSDILRVNTEITKAPLSASMIKRYDEHHQDLTLLKALVRQQLPEKYKEIFFDQSKNGYAGYIDGGASQEEFYKFIKPILEKMDGTEELLVKLNREDLLRKQRTFDNGSIPHQIHLGELHAILRRQEDFYPFLKDNREKIEKILTFRIPYYVGPLARGNSRFAWMTRKSEETITPWNFEEVVDKGASAQSFIERMTNFDKNLPNEKVLPKHSLLYEYFTVYNELTKVKYVTEGMRKPAFLSGEQKKAIVDLLFKTNRKVTVKQLKEDYFKKIECFDSVEISGVEDRFNASLGTYHDLLKIIKDKDFLDNEENEDILEDIVLTLTLFEDREMIEERLKTYAHLFDDKVMKQLKRRRYTGWGRLSRKLINGIRDKQSGKTILDFLKSDGFANRNFMQLIHDDSLTFKEDIQKAQVSGQGDSLHEHIANLAGSPAIKKGILQTVKVVDELVKVMGRHKPENIVIEMARENQTTQKGQKNSRERMKRIEEGIKELGSQILKEHPVENTQLQNEKLYLYYLQNGRDMYVDQELDINRLSDYDVDHIVPQSFLKDDSIDNKVLTRSDKARGKSDNVPSEEVVKKMKNYWRQLLNAKLITQRKFDNLTKAERGGLSELDKAGFIKRQLVETRQITKHVAQILDSRMNTKYDENDKLIREVKVITLKSKLVSDFRKDFQFYKVREINNYHHAHDAYLNAVVGTALIKKYPKLESEFVYGDYKVYDVRKMIAKSEQEIGKATAKYFFYSNIMNFFKTEITLANGEIRKRPLIETNGETGEIVWDKGRDFATVRKVLSMPQVNIVKKTEVQTGGFSKESILPKRNSDKLIARKKDWDPKKYGGFDSPTVAYSVLVVAKVEKGKSKKLKSVKELLGITIMERSSFEKNPIDFLEAKGYKEVKKDLIIKLPKYSLFELENGRKRMLASAGELQKGNELALPSKYVNFLYLASHYEKLKGSPEDNEQKQLFVEQHKHYLDEIIEQISEFSKRVILADANLDKVLSAYNKHRDKPIREQAENIIHLFTLTNLGAPAAFKYFDTTIDRKRYTSTKEVLDATLIHQSITGLYETRIDLSQLGGDGGGSAGSAAGSGEFGGTVSLQDEHRLFDIPVTTSLPDVWLQDFPQAWAETGGLGRAKCQAPIIIDLKPTAVPVSIKQYPMSLEAHMGIRQHIIKFLELGVLRPCRSPWNTPLLPVKKPGTQDYRPVQDLREINKRTVDIHPTVPNPYNLLSTLKPDYSWYTVLDLKDAFFCLPLAPQSQELFAFEWKDPERGISGQLTWTRLPQGFKNSPTLFNEALHRDLTDFRTQHPEVTLLQYVDDLLLAAPTKKACTQGTRHLLQELGEKGYRASAKKAQICQTKVTYLGYILSEGKRWLTPGRIETVARIPPPRNPREVREFLGTAGFCRLWIPGFAELAAPLYALTKPSTPFTWQTEHQLAFEALKKALLSAPALGLPDTSKPFTLFLDERQGIAKGVLTQKLGPWKRPVAYLSKKLDPVAAGWPPCLRIMAATAMLVKDSAKLTLGQPLTVITPHTLEAIVRQPPDRWITNARLTHYQALLLDTDRVQFGPPVTLNPATLLPVPENQPSPHDCRQVLAETHGTREDLKDQELPDADHTWYTDGSSYLDSGTRRAGAAVVDGHNTIWAQSLPPGTSAQKAELIALTKALELSKGKKANIYTDSRYAFATAHTHGSIYERRGWLTSEGKEIKNKAEIIALLKALFLPQEVAIIHCPGHQKGQDPVAVGNRQADRVARQAAMAEVLTLATEPDNTSHITAGKRTADGSEFEKRTADGSEFESPKKKAKVE

SEQ ID NO: 1595 - protein, 2100 aa, synthetic construct
MPAAKRVKLDGGDKKYSIGLDIGTNSVGWAVITDEYKVPSKKFKVLGNTDRHSIKKNLIGALLFDSGETAEATRLKRTARRRYTRRKNRICYLQEIFSNEMAKVDDSFFHRLEESFLVEEDKKHERHPIFGNIVDEVAYHEKYPTIYHLRKKLVDSTDKADLRLIYLALAHMIKFRGHFLIEGDLNPDNSDVDKLFIQLVQTYNQLFEENPINASGVDAKAILSARLSKSRRLENLIAQLPGEKKNGLFGNLIALSLGLTPNFKSNFDLAEDAKLQLSKDTYDDDLDNLLAQIGDQYADLFLAAKNLSDAILLSDILRVNTEITKAPLSASMIKRYDEHHQDLTLLKALVRQQLPEKYKEIFFDQSKNGYAGYIDGGASQEEFYKFIKPILEKMDGTEELLVKLNREDLLRKQRTFDNGSIPHQIHLGELHAILRRQEDFYPFLKDNREKIEKILTFRIPYYVGPLARGNSRFAWMTRKSEETITPWNFEEVVDKGASAQSFIERMTNFDKNLPNEKVLPKHSLLYEYFTVYNELTKVKYVTEGMRKPAFLSGEQKKAIVDLLFKTNRKVTVKQLKEDYFKKIECFDSVEISGVEDRFNASLGTYHDLLKIIKDKDFLDNEENEDILEDIVLTLTLFEDREMIEERLKTYAHLFDDKVMKQLKRRRYTGWGRLSRKLINGIRDKQSGKTILDFLKSDGFANRNFMQLIHDDSLTFKEDIQKAQVSGQGDSLHEHIANLAGSPAIKKGILQTVKVVDELVKVMGRHKPENIVIEMARENQTTQKGQKNSRERMKRIEEGIKELGSQILKEHPVENTQLQNEKLYLYYLQNGRDMYVDQELDINRLSDYDVDHIVPQSFLKDDSIDNKVLTRSDKARGKSDNVPSEEVVKKMKNYWRQLLNAKLITQRKFDNLTKAERGGLSELDKAGFIKRQLVETRQITKHVAQILDSRMNTKYDENDKLIREVKVITLKSKLVSDFRKDFQFYKVREINNYHHAHDAYLNAVVGTALIKKYPKLESEFVYGDYKVYDVRKMIAKSEQEIGKATAKYFFYSNIMNFFKTEITLANGEIRKRPLIETNGETGEIVWDKGRDFATVRKVLSMPQVNIVKKTEVQTGGFSKESILPKRNSDKLIARKKDWDPKKYGGFDSPTVAYSVLVVAKVEKGKSKKLKSVKELLGITIMERSSFEKNPIDFLEAKGYKEVKKDLIIKLPKYSLFELENGRKRMLASAGELQKGNELALPSKYVNFLYLASHYEKLKGSPEDNEQKQLFVEQHKHYLDEIIEQISEFSKRVILADANLDKVLSAYNKHRDKPIREQAENIIHLFTLTNLGAPAAFKYFDTTIDRKRYTSTKEVLDATLIHQSITGLYETRIDLSQLGGDGGGGGPAPGGSGGTVSLQDEHRLFDIPVTTSLPDVWLQDFPQAWAETGGLGRAKCQAPIIIDLKPTAVPVSIKQYPMSLEAHMGIRQHIIKFLELGVLRPCRSPWNTPLLPVKKPGTQDYRPVQDLREINKRTVDIHPTVPNPYNLLSTLKPDYSWYTVLDLKDAFFCLPLAPQSQELFAFEWKDPERGISGQLTWTRLPQGFKNSPTLFNEALHRDLTDFRTQHPEVTLLQYVDDLLLAAPTKKACTQGTRHLLQELGEKGYRASAKKAQICQTKVTYLGYILSEGKRWLTPGRIETVARIPPPRNPREVREFLGTAGFCRLWIPGFAELAAPLYALTKPSTPFTWQTEHQLAFEALKKALLSAPALGLPDTSKPFTLFLDERQGIAKGVLTQKLGPWKRPVAYLSKKLDPVAAGWPPCLRIMAATAMLVKDSAKLTLGQPLTVITPHTLEAIVRQPPDRWITNARLTHYQALLLDTDRVQFGPPVTLNPATLLPVPENQPSPHDCRQVLAETHGTREDLKDQELPDADHTWYTDGSSYLDSGTRRAGAAVVDGHNTIWAQSLPPGTSAQKAELIALTKALELSKGKKANIYTDSRYAFATAHTHGSIYERRGWLTSEGKEIKNKAEIIALLKALFLPQEVAIIHCPGHQKGQDPVAVGNRQADRVARQAAMAEVLTLATEPDNTSHITAGKRTADGSEFEKRTADGSEFESPKKKAKVE

SEQ ID NO: 1596 - protein, 2102 aa, synthetic construct
MPAAKRVKLDGGDKKYSIGLDIGTNSVGWAVITDEYKVPSKKFKVLGNTDRHSIKKNLIGALLFDSGETAEATRLKRTARRRYTRRKNRICYLQEIFSNEMAKVDDSFFHRLEESFLVEEDKKHERHPIFGNIVDEVAYHEKYPTIYHLRKKLVDSTDKADLRLIYLALAHMIKFRGHFLIEGDLNPDNSDVDKLFIQLVQTYNQLFEENPINASGVDAKAILSARLSKSRRLENLIAQLPGEKKNGLFGNLIALSLGLTPNFKSNFDLAEDAKLQLSKDTYDDDLDNLLAQIGDQYADLFLAAKNLSDAILLSDILRVNTEITKAPLSASMIKRYDEHHQDLTLLKALVRQQLPEKYKEIFFDQSKNGYAGYIDGGASQEEFYKFIKPILEKMDGTEELLVKLNREDLLRKQRTFDNGSIPHQIHLGELHAILRRQEDFYPFLKDNREKIEKILTFRIPYYVGPLARGNSRFAWMTRKSEETITPWNFEEVVDKGASAQSFIERMTNFDKNLPNEKVLPKHSLLYEYFTVYNELTKVKYVTEGMRKPAFLSGEQKKAIVDLLFKTNRKVTVKQLKEDYFKKIECFDSVEISGVEDRFNASLGTYHDLLKIIKDKDFLDNEENEDILEDIVLTLTLFEDREMIEERLKTYAHLFDDKVMKQLKRRRYTGWGRLSRKLINGIRDKQSGKTILDFLKSDGFANRNFMQLIHDDSLTFKEDIQKAQVSGQGDSLHEHIANLAGSPAIKKGILQTVKVVDELVKVMGRHKPENIVIEMARENQTTQKGQKNSRERMKRIEEGIKELGSQILKEHPVENTQLQNEKLYLYYLQNGRDMYVDQELDINRLSDYDVDHIVPQSFLKDDSIDNKVLTRSDKARGKSDNVPSEEVVKKMKNYWRQLLNAKLITQRKFDNLTKAERGGLSELDKAGFIKRQLVETRQITKHVAQILDSRMNTKYDENDKLIREVKVITLKSKLVSDFRKDFQFYKVREINNYHHAHDAYLNAVVGTALIKKYPKLESEFVYGDYKVYDVRKMIAKSEQEIGKATAKYFFYSNIMNFFKTEITLANGEIRKRPLIETNGETGEIVWDKGRDFATVRKVLSMPQVNIVKKTEVQTGGFSKESILPKRNSDKLIARKKDWDPKKYGGFDSPTVAYSVLVVAKVEKGKSKKLKSVKELLGITIMERSSFEKNPIDFLEAKGYKEVKKDLIIKLPKYSLFELENGRKRMLASAGELQKGNELALPSKYVNFLYLASHYEKLKGSPEDNEQKQLFVEQHKHYLDEIIEQISEFSKRVILADANLDKVLSAYNKHRDKPIREQAENIIHLFTLTNLGAPAAFKYFDTTIDRKRYTSTKEVLDATLIHQSITGLYETRIDLSQLGGDGGGSSPAPEAAAKGGTVSLQDEHRLFDIPVTTSLPDVWLQDFPQAWAETGGLGRAKCQAPIIIDLKPTAVPVSIKQYPMSLEAHMGIRQHIIKFLELGVLRPCRSPWNTPLLPVKKPGTQDYRPVQDLREINKRTVDIHPTVPNPYNLLSTLKPDYSWYTVLDLKDAFFCLPLAPQSQELFAFEWKDPERGISGQLTWTRLPQGFKNSPTLFNEALHRDLTDFRTQHPEVTLLQYVDDLLLAAPTKKACTQGTRHLLQELGEKGYRASAKKAQICQTKVTYLGYILSEGKRWLTPGRIETVARIPPPRNPREVREFLGTAGFCRLWIPGFAELAAPLYALTKPSTPFTWQTEHQLAFEALKKALLSAPALGLPDTSKPFTLFLDERQGIAKGVLTQKLGPWKRPVAYLSKKLDPVAAGWPPCLRIMAATAMLVKDSAKLTLGQPLTVITPHTLEAIVRQPPDRWITNARLTHYQALLLDTDRVQFGPPVTLNPATLLPVPENQPSPHDCRQVLAETHGTREDLKDQELPDADHTWYTDGSSYLDSGTRRAGAAVVDGHNTIWAQSLPPGTSAQKAELIALTKALELSKGKKANIYTDSRYAFATAHTHGSIYERRGWLTSEGKEIKNKAEIIALLKALFLPQEVAIIHCPGHQKGQDPVAVGNRQADRVARQAAMAEVLTLATEPDNTSHITAGKRTADGSEFEKRTADGSEFESPKKKAKVE

SEQ ID NO: 1597 - protein, 2101 aa, synthetic construct
MPAAKRVKLDGGDKKYSIGLDIGTNSVGWAVITDEYKVPSKKFKVLGNTDRHSIKKNLIGALLFDSGETAEATRLKRTARRRYTRRKNRICYLQEIFSNEMAKVDDSFFHRLEESFLVEEDKKHERHPIFGNIVDEVAYHEKYPTIYHLRKKLVDSTDKADLRLIYLALAHMIKFRGHFLIEGDLNPDNSDVDKLFIQLVQTYNQLFEENPINASGVDAKAILSARLSKSRRLENLIAQLPGEKKNGLFGNLIALSLGLTPNFKSNFDLAEDAKLQLSKDTYDDDLDNLLAQIGDQYADLFLAAKNLSDAILLSDILRVNTEITKAPLSASMIKRYDEHHQDLTLLKALVRQQLPEKYKEIFFDQSKNGYAGYIDGGASQEEFYKFIKPILEKMDGTEELLVKLNREDLLRKQRTFDNGSIPHQIHLGELHAILRRQEDFYPFLKDNREKIEKILTFRIPYYVGPLARGNSRFAWMTRKSEETITPWNFEEVVDKGASAQSFIERMTNFDKNLPNEKVLPKHSLLYEYFTVYNELTKVKYVTEGMRKPAFLSGEQKKAIVDLLFKTNRKVTVKQLKEDYFKKIECFDSVEISGVEDRFNASLGTYHDLLKIIKDKDFLDNEENEDILEDIVLTLTLFEDREMIEERLKTYAHLFDDKVMKQLKRRRYTGWGRLSRKLINGIRDKQSGKTILDFLKSDGFANRNFMQLIHDDSLTFKEDIQKAQVSGQGDSLHEHIANLAGSPAIKKGILQTVKVVDELVKVMGRHKPENIVIEMARENQTTQKGQKNSRERMKRIEEGIKELGSQILKEHPVENTQLQNEKLYLYYLQNGRDMYVDQELDINRLSDYDVDHIVPQSFLKDDSIDNKVLTRSDKARGKSDNVPSEEVVKKMKNYWRQLLNAKLITQRKFDNLTKAERGGLSELDKAGFIKRQLVETRQITKHVAQILDSRMNTKYDENDKLIREVKVITLKSKLVSDFRKDFQFYKVREINNYHHAHDAYLNAVVGTALIKKYPKLESEFVYGDYKVYDVRKMIAKSEQEIGKATAKYFFYSNIMNFFKTEITLANGEIRKRPLIETNGETGEIVWDKGRDFATVRKVLSMPQVNIVKKTEVQTGGFSKESILPKRNSDKLIARKKDWDPKKYGGFDSPTVAYSVLVVAKVEKGKSKKLKSVKELLGITIMERSSFEKNPIDFLEAKGYKEVKKDLIIKLPKYSLFELENGRKRMLASAGELQKGNELALPSKYVNFLYLASHYEKLKGSPEDNEQKQLFVEQHKHYLDEIIEQISEFSKRVILADANLDKVLSAYNKHRDKPIREQAENIIHLFTLTNLGAPAAFKYFDTTIDRKRYTSTKEVLDATLIHQSITGLYETRIDLSQLGGDGGGGGGSGGGGSGGTVSLQDEHRLFDIPVTTSLPDVWLQDFPQAWAETGGLGRAKCQAPIIIDLKPTAVPVSIKQYPMSLEAHMGIRQHIIKFLELGVLRPCRSPWNTPLLPVKKPGTQDYRPVQDLREINKRTVDIHPTVPNPYNLLSTLKPDYSWYTVLDLKDAFFCLPLAPQSQELFAFEWKDPERGISGQLTWTRLPQGFKNSPTLFNEALHRDLTDFRTQHPEVTLLQYVDDLLLAAPTKKACTQGTRHLLQELGEKGYRASAKKAQICQTKVTYLGYILSEGKRWLTPGRIETVARIPPPRNPREVREFLGTAGFCRLWIPGFAELAAPLYALTKPSTPFTWQTEHQLAFEALKKALLSAPALGLPDTSKPFTLFLDERQGIAKGVLTQKLGPWKRPVAYLSKKLDPVAAGWPPCLRIMAATAMLVKDSAKLTLGQPLTVITPHTLEAIVRQPPDRWITNARLTHYQALLLDTDRVQFGPPVTLNPATLLPVPENQPSPHDCRQVLAETHGTREDLKDQELPDADHTWYTDGSSYLDSGTRRAGAAVVDGHNTIWAQSLPPGTSAQKAELIALTKALELSKGKKANIYTDSRYAFATAHTHGSIYERRGWLTSEGKEIKNKAEIIALLKALFLPQEVAIIHCPGHQKGQDPVAVGNRQADRVARQAAMAEVLTLATEPDNTSHITAGKRTADGSEFEKRTADGSEFESPKKKAKVE

SEQ ID NO: 1598 - protein, 2102 aa, synthetic construct
MPAAKRVKLDGGDKKYSIGLDIGTNSVGWAVITDEYKVPSKKFKVLGNTDRHSIKKNLIGALLFDSGETAEATRLKRTARRRYTRRKNRICYLQEIFSNEMAKVDDSFFHRLEESFLVEEDKKHERHPIFGNIVDEVAYHEKYPTIYHLRKKLVDSTDKADLRLIYLALAHMIKFRGHFLIEGDLNPDNSDVDKLFIQLVQTYNQLFEENPINASGVDAKAILSARLSKSRRLENLIAQLPGEKKNGLFGNLIALSLGLTPNFKSNFDLAEDAKLQLSKDTYDDDLDNLLAQIGDQYADLFLAAKNLSDAILLSDILRVNTEITKAPLSASMIKRYDEHHQDLTLLKALVRQQLPEKYKEIFFDQSKNGYAGYIDGGASQEEFYKFIKPILEKMDGTEELLVKLNREDLLRKQRTFDNGSIPHQIHLGELHAILRRQEDFYPFLKDNREKIEKILTFRIPYYVGPLARGNSRFAWMTRKSEETITPWNFEEVVDKGASAQSFIERMTNFDKNLPNEKVLPKHSLLYEYFTVYNELTKVKYVTEGMRKPAFLSGEQKKAIVDLLFKTNRKVTVKQLKEDYFKKIECFDSVEISGVEDRFNASLGTYHDLLKIIKDKDFLDNEENEDILEDIVLTLTLFEDREMIEERLKTYAHLFDDKVMKQLKRRRYTGWGRLSRKLINGIRDKQSGKTILDFLKSDGFANRNFMQLIHDDSLTFKEDIQKAQVSGQGDSLHEHIANLAGSPAIKKGILQTVKVVDELVKVMGRHKPENIVIEMARENQTTQKGQKNSRERMKRIEEGIKELGSQILKEHPVENTQLQNEKLYLYYLQNGRDMYVDQELDINRLSDYDVDHIVPQSFLKDDSIDNKVLTRSDKARGKSDNVPSEEVVKKMKNYWRQLLNAKLITQRKFDNLTKAERGGLSELDKAGFIKRQLVETRQITKHVAQILDSRMNTKYDENDKLIREVKVITLKSKLVSDFRKDFQFYKVREINNYHHAHDAYLNAVVGTALIKKYPKLESEFVYGDYKVYDVRKMIAKSEQEIGKATAKYFFYSNIMNFFKTEITLANGEIRKRPLIETNGETGEIVWDKGRDFATVRKVLSMPQVNIVKKTEVQTGGFSKESILPKRNSDKLIARKKDWDPKKYGGFDSPTVAYSVLVVAKVEKGKSKKLKSVKELLGITIMERSSFEKNPIDFLEAKGYKEVKKDLIIKLPKYSLFELENGRKRMLASAGELQKGNELALPSKYVNFLYLASHYEKLKGSPEDNEQKQLFVEQHKHYLDEIIEQISEFSKRVILADANLDKVLSAYNKHRDKPIREQAENIIHLFTLTNLGAPAAFKYFDTTIDRKRYTSTKEVLDATLIHQSITGLYETRIDLSQLGGDGGGGSPAPEAAAKGGTVSLQDEHRLFDIPVTTSLPDVWLQDFPQAWAETGGLGRAKCQAPIIIDLKPTAVPVSIKQYPMSLEAHMGIRQHIIKFLELGVLRPCRSPWNTPLLPVKKPGTQDYRPVQDLREINKRTVDIHPTVPNPYNLLSTLKPDYSWYTVLDLKDAFFCLPLAPQSQELFAFEWKDPERGISGQLTWTRLPQGFKNSPTLFNEALHRDLTDFRTQHPEVTLLQYVDDLLLAAPTKKACTQGTRHLLQELGEKGYRASAKKAQICQTKVTYLGYILSEGKRWLTPGRIETVARIPPPRNPREVREFLGTAGFCRLWIPGFAELAAPLYALTKPSTPFTWQTEHQLAFEALKKALLSAPALGLPDTSKPFTLFLDERQGIAKGVLTQKLGPWKRPVAYLSKKLDPVAAGWPPCLRIMAATAMLVKDSAKLTLGQPLTVITPHTLEAIVRQPPDRWITNARLTHYQALLLDTDRVQFGPPVTLNPATLLPVPENQPSPHDCRQVLAETHGTREDLKDQELPDADHTWYTDGSSYLDSGTRRAGAAVVDGHNTIWAQSLPPGTSAQKAELIALTKALELSKGKKANIYTDSRYAFATAHTHGSIYERRGWLTSEGKEIKNKAEIIALLKALFLPQEVAIIHCPGHQKGQDPVAVGNRQADRVARQAAMAEVLTLATEPDNTSHITAGKRTADGSEFEKRTADGSEFESPKKKAKVE

SEQ ID NO: 1599 - protein, 2100 aa, synthetic construct
MPAAKRVKLDGGDKKYSIGLDIGTNSVGWAVITDEYKVPSKKFKVLGNTDRHSIKKNLIGALLFDSGETAEATRLKRTARRRYTRRKNRICYLQEIFSNEMAKVDDSFFHRLEESFLVEEDKKHERHPIFGNIVDEVAYHEKYPTIYHLRKKLVDSTDKADLRLIYLALAHMIKFRGHFLIEGDLNPDNSDVDKLFIQLVQTYNQLFEENPINASGVDAKAILSARLSKSRRLENLIAQLPGEKKNGLFGNLIALSLGLTPNFKSNFDLAEDAKLQLSKDTYDDDLDNLLAQIGDQYADLFLAAKNLSDAILLSDILRVNTEITKAPLSASMIKRYDEHHQDLTLLKALVRQQLPEKYKEIFFDQSKNGYAGYIDGGASQEEFYKFIKPILEKMDGTEELLVKLNREDLLRKQRTFDNGSIPHQIHLGELHAILRRQEDFYPFLKDNREKIEKILTFRIPYYVGPLARGNSRFAWMTRKSEETITPWNFEEVVDKGASAQSFIERMTNFDKNLPNEKVLPKHSLLYEYFTVYNELTKVKYVTEGMRKPAFLSGEQKKAIVDLLFKTNRKVTVKQLKEDYFKKIECFDSVEISGVEDRFNASLGTYHDLLKIIKDKDFLDNEENEDILEDIVLTLTLFEDREMIEERLKTYAHLFDDKVMKQLKRRRYTGWGRLSRKLINGIRDKQSGKTILDFLKSDGFANRNFMQLIHDDSLTFKEDIQKAQVSGQGDSLHEHIANLAGSPAIKKGILQTVKVVDELVKVMGRHKPENIVIEMARENQTTQKGQKNSRERMKRIEEGIKELGSQILKEHPVENTQLQNEKLYLYYLQNGRDMYVDQELDINRLSDYDVDHIVPQSFLKDDSIDNKVLTRSDKARGKSDNVPSEEVVKKMKNYWRQLLNAKLITQRKFDNLTKAERGGLSELDKAGFIKRQLVETRQITKHVAQILDSRMNTKYDENDKLIREVKVITLKSKLVSDFRKDFQFYKVREINNYHHAHDAYLNAVVGTALIKKYPKLESEFVYGDYKVYDVRKMIAKSEQEIGKATAKYFFYSNIMNFFKTEITLANGEIRKRPLIETNGETGEIVWDKGRDFATVRKVLSMPQVNIVKKTEVQTGGFSKESILPKRNSDKLIARKKDWDPKKYGGFDSPTVAYSVLVVAKVEKGKSKKLKSVKELLGITIMERSSFEKNPIDFLEAKGYKEVKKDLIIKLPKYSLFELENGRKRMLASAGELQKGNELALPSKYVNFLYLASHYEKLKGSPEDNEQKQLFVEQHKHYLDEIIEQISEFSKRVILADANLDKVLSAYNKHRDKPIREQAENIIHLFTLTNLGAPAAFKYFDTTIDRKRYTSTKEVLDATLIHQSITGLYETRIDLSQLGGDGGPAPGGSGSSGGTVSLQDEHRLFDIPVTTSLPDVWLQDFPQAWAETGGLGRAKCQAPIIIDLKPTAVPVSIKQYPMSLEAHMGIRQHIIKFLELGVLRPCRSPWNTPLLPVKKPGTQDYRPVQDLREINKRTVDIHPTVPNPYNLLSTLKPDYSWYTVLDLKDAFFCLPLAPQSQELFAFEWKDPERGISGQLTWTRLPQGFKNSPTLFNEALHRDLTDFRTQHPEVTLLQYVDDLLLAAPTKKACTQGTRHLLQELGEKGYRASAKKAQICQTKVTYLGYILSEGKRWLTPGRIETVARIPPPRNPREVREFLGTAGFCRLWIPGFAELAAPLYALTKPSTPFTWQTEHQLAFEALKKALLSAPALGLPDTSKPFTLFLDERQGIAKGVLTQKLGPWKRPVAYLSKKLDPVAAGWPPCLRIMAATAMLVKDSAKLTLGQPLTVITPHTLEAIVRQPPDRWITNARLTHYQALLLDTDRVQFGPPVTLNPATLLPVPENQPSPHDCRQVLAETHGTREDLKDQELPDADHTWYTDGSSYLDSGTRRAGAAVVDGHNTIWAQSLPPGTSAQKAELIALTKALELSKGKKANIYTDSRYAFATAHTHGSIYERRGWLTSEGKEIKNKAEIIALLKALFLPQEVAIIHCPGHQKGQDPVAVGNRQADRVARQAAMAEVLTLATEPDNTSHITAGKRTADGSEFEKRTADGSEFESPKKKAKVE

SEQ ID NO: 1600 - protein, 2006 aa, synthetic construct
MPAAKRVKLDGGDKKYSIGLDIGTNSVGWAVITDEYKVPSKKFKVLGNTDRHSIKKNLIGALLFDSGETAEATRLKRTARRRYTRRKNRICYLQEIFSNEMAKVDDSFFHRLEESFLVEEDKKHERHPIFGNIVDEVAYHEKYPTIYHLRKKLVDSTDKADLRLIYLALAHMIKFRGHFLIEGDLNPDNSDVDKLFIQLVQTYNQLFEENPINASGVDAKAILSARLSKSRRLENLIAQLPGEKKNGLFGNLIALSLGLTPNFKSNFDLAEDAKLQLSKDTYDDDLDNLLAQIGDQYADLFLAAKNLSDAILLSDILRVNTEITKAPLSASMIKRYDEHHQDLTLLKALVRQQLPEKYKEIFFDQSKNGYAGYIDGGASQEEFYKFIKPILEKMDGTEELLVKLNREDLLRKQRTFDNGSIPHQIHLGELHAILRRQEDFYPFLKDNREKIEKILTFRIPYYVGPLARGNSRFAWMTRKSEETITPWNFEEVVDKGASAQSFIERMTNFDKNLPNEKVLPKHSLLYEYFTVYNELTKVKYVTEGMRKPAFLSGEQKKAIVDLLFKTNRKVTVKQLKEDYFKKIECFDSVEISGVEDRFNASLGTYHDLLKIIKDKDFLDNEENEDILEDIVLTLTLFEDREMIEERLKTYAHLFDDKVMKQLKRRRYTGWGRLSRKLINGIRDKQSGKTILDFLKSDGFANRNFMQLIHDDSLTFKEDIQKAQVSGQGDSLHEHIANLAGSPAIKKGILQTVKVVDELVKVMGRHKPENIVIEMARENQTTQKGQKNSRERMKRIEEGIKELGSQILKEHPVENTQLQNEKLYLYYLQNGRDMYVDQELDINRLSDYDVDHIVPQSFLKDDSIDNKVLTRSDKARGKSDNVPSEEVVKKMKNYWRQLLNAKLITQRKFDNLTKAERGGLSELDKAGFIKRQLVETRQITKHVAQILDSRMNTKYDENDKLIREVKVITLKSKLVSDFRKDFQFYKVREINNYHHAHDAYLNAVVGTALIKKYPKLESEFVYGDYKVYDVRKMIAKSEQEIGKATAKYFFYSNIMNFFKTEITLANGEIRKRPLIETNGETGEIVWDKGRDFATVRKVLSMPQVNIVKKTEVQTGGFSKESILPKRNSDKLIARKKDWDPKKYGGFDSPTVAYSVLVVAKVEKGKSKKLKSVKELLGITIMERSSFEKNPIDFLEAKGYKEVKKDLIIKLPKYSLFELENGRKRMLASAGELQKGNELALPSKYVNFLYLASHYEKLKGSPEDNEQKQLFVEQHKHYLDEIIEQISEFSKRVILADANLDKVLSAYNKHRDKPIREQAENIIHLFTLTNLGAPAAFKYFDTTIDRKRYTSTKEVLDATLIHQSITGLYETRIDLSQLGGDGGEAAAKGGGPAPGGPLGTSDSPVTHADPIDWKSEEPVWVDQWPLTQEKLSAAQQLVQEQLRLGHIEPSTSAWNSPIFVIKKKSGKWRLLQDLRKVNETMMHMGALQPGLPTPSPIPDKSYIIVIDLKDCFYTIPLAPQDCKRFAFSLPSVNFKEPMQRYQWRVLPQGMTNSPTLCQKFVATAIAPVRQRFPQLYLVHYMDDILLAHTDEHLLYQAFSILKQHLSLNGLVIADEKIQTHFPYNYLGFSLYPRVYNTQLVKLQTDHLKTLNDFQKLLGDINWIRPYLKLPTYTLQPLFDILKGDSDPASPRTLSLEGRTALQSIEEAIRQQQITYCDYQRSWGLYILPTPRAPTGVLYQDKPLRWIYLSATPTKHLLPYYELVAKIIAKGRHEAIQYFGMEPPFICVPYALEQQDWLFQFSDNWSIAFANYPGQITHHYPSDKLLQFASSHAFIFPKIVRRQPIPEATLIFTDGSSNGTAALIINHQTYYAQTSFSSAQVVELFAVHQALLTVPTSFNLFTDSSYVVGALQMIETVPIIGTTSPEVLNLFTLIQQVLHCRQHPCFFGHIRAHSTLPGALVQGNHTADVLTKQVFFQSAGKRTADGSEFEKRTADGSEFESPKKKAKVE

SEQ ID NO: 1601 - protein, 2006 aa, synthetic construct
MPAAKRVKLDGGDKKYSIGLDIGTNSVGWAVITDEYKVPSKKFKVLGNTDRHSIKKNLIGALLFDSGETAEATRLKRTARRRYTRRKNRICYLQEIFSNEMAKVDDSFFHRLEESFLVEEDKKHERHPIFGNIVDEVAYHEKYPTIYHLRKKLVDSTDKADLRLIYLALAHMIKFRGHFLIEGDLNPDNSDVDKLFIQLVQTYNQLFEENPINASGVDAKAILSARLSKSRRLENLIAQLPGEKKNGLFGNLIALSLGLTPNFKSNFDLAEDAKLQLSKDTYDDDLDNLLAQIGDQYADLFLAAKNLSDAILLSDILRVNTEITKAPLSASMIKRYDEHHQDLTLLKALVRQQLPEKYKEIFFDQSKNGYAGYIDGGASQEEFYKFIKPILEKMDGTEELLVKLNREDLLRKQRTFDNGSIPHQIHLGELHAILRRQEDFYPFLKDNREKIEKILTFRIPYYVGPLARGNSRFAWMTRKSEETITPWNFEEVVDKGASAQSFIERMTNFDKNLPNEKVLPKHSLLYEYFTVYNELTKVKYVTEGMRKPAFLSGEQKKAIVDLLFKTNRKVTVKQLKEDYFKKIECFDSVEISGVEDRFNASLGTYHDLLKIIKDKDFLDNEENEDILEDIVLTLTLFEDREMIEERLKTYAHLFDDKVMKQLKRRRYTGWGRLSRKLINGIRDKQSGKTILDFLKSDGFANRNFMQLIHDDSLTFKEDIQKAQVSGQGDSLHEHIANLAGSPAIKKGILQTVKVVDELVKVMGRHKPENIVIEMARENQTTQKGQKNSRERMKRIEEGIKELGSQILKEHPVENTQLQNEKLYLYYLQNGRDMYVDQELDINRLSDYDVDHIVPQSFLKDDSIDNKVLTRSDKARGKSDNVPSEEVVKKMKNYWRQLLNAKLITQRKFDNLTKAERGGLSELDKAGFIKRQLVETRQITKHVAQILDSRMNTKYDENDKLIREVKVITLKSKLVSDFRKDFQFYKVREINNYHHAHDAYLNAVVGTALIKKYPKLESEFVYGDYKVYDVRKMIAKSEQEIGKATAKYFFYSNIMNFFKTEITLANGEIRKRPLIETNGETGEIVWDKGRDFATVRKVLSMPQVNIVKKTEVQTGGFSKESILPKRNSDKLIARKKDWDPKKYGGFDSPTVAYSVLVVAKVEKGKSKKLKSVKELLGITIMERSSFEKNPIDFLEAKGYKEVKKDLIIKLPKYSLFELENGRKRMLASAGELQKGNELALPSKYVNFLYLASHYEKLKGSPEDNEQKQLFVEQHKHYLDEIIEQISEFSKRVILADANLDKVLSAYNKHRDKPIREQAENIIHLFTLTNLGAPAAFKYFDTTIDRKRYTSTKEVLDATLIHQSITGLYETRIDLSQLGGDGGGGSEAAAKGSSGGPLGTSDSPVTHADPIDWKSEEPVWVDQWPLTQEKLSAAQQLVQEQLRLGHIEPSTSAWNSPIFVIKKKSGKWRLLQDLRKVNETMMHMGALQPGLPTPSPIPDKSYIIVIDLKDCFYTIPLAPQDCKRFAFSLPSVNFKEPMQRYQWRVLPQGMTNSPTLCQKFVATAIAPVRQRFPQLYLVHYMDDILLAHTDEHLLYQAFSILKQHLSLNGLVIADEKIQTHFPYNYLGFSLYPRVYNTQLVKLQTDHLKTLNDFQKLLGDINWIRPYLKLPTYTLQPLFDILKGDSDPASPRTLSLEGRTALQSIEEAIRQQQITYCDYQRSWGLYILPTPRAPTGVLYQDKPLRWIYLSATPTKHLLPYYELVAKIIAKGRHEAIQYFGMEPPFICVPYALEQQDWLFQFSDNWSIAFANYPGQITHHYPSDKLLQFASSHAFIFPKIVRRQPIPEATLIFTDGSSNGTAALIINHQTYYAQTSFSSAQVVELFAVHQALLTVPTSFNLFTDSSYVVGALQMIETVPIIGTTSPEVLNLFTLIQQVLHCRQHPCFFGHIRAHSTLPGALVQGNHTADVLTKQVFFQSAGKRTADGSEFEKRTADGSEFESPKKKAKVE

SEQ ID NO: 1602 - protein, 2013 aa, synthetic construct
MPAAKRVKLDGGDKKYSIGLDIGTNSVGWAVITDEYKVPSKKFKVLGNTDRHSIKKNLIGALLFDSGETAEATRLKRTARRRYTRRKNRICYLQEIFSNEMAKVDDSFFHRLEESFLVEEDKKHERHPIFGNIVDEVAYHEKYPTIYHLRKKLVDSTDKADLRLIYLALAHMIKFRGHFLIEGDLNPDNSDVDKLFIQLVQTYNQLFEENPINASGVDAKAILSARLSKSRRLENLIAQLPGEKKNGLFGNLIALSLGLTPNFKSNFDLAEDAKLQLSKDTYDDDLDNLLAQIGDQYADLFLAAKNLSDAILLSDILRVNTEITKAPLSASMIKRYDEHHQDLTLLKALVRQQLPEKYKEIFFDQSKNGYAGYIDGGASQEEFYKFIKPILEKMDGTEELLVKLNREDLLRKQRTFDNGSIPHQIHLGELHAILRRQEDFYPFLKDNREKIEKILTFRIPYYVGPLARGNSRFAWMTRKSEETITPWNFEEVVDKGASAQSFIERMTNFDKNLPNEKVLPKHSLLYEYFTVYNELTKVKYVTEGMRKPAFLSGEQKKAIVDLLFKTNRKVTVKQLKEDYFKKIECFDSVEISGVEDRFNASLGTYHDLLKIIKDKDFLDNEENEDILEDIVLTLTLFEDREMIEERLKTYAHLFDDKVMKQLKRRRYTGWGRLSRKLINGIRDKQSGKTILDFLKSDGFANRNFMQLIHDDSLTFKEDIQKAQVSGQGDSLHEHIANLAGSPAIKKGILQTVKVVDELVKVMGRHKPENIVIEMARENQTTQKGQKNSRERMKRIEEGIKELGSQILKEHPVENTQLQNEKLYLYYLQNGRDMYVDQELDINRLSDYDVDHIVPQSFLKDDSIDNKVLTRSDKARGKSDNVPSEEVVKKMKNYWRQLLNAKLITQRKFDNLTKAERGGLSELDKAGFIKRQLVETRQITKHVAQILDSRMNTKYDENDKLIREVKVITLKSKLVSDFRKDFQFYKVREINNYHHAHDAYLNAVVGTALIKKYPKLESEFVYGDYKVYDVRKMIAKSEQEIGKATAKYFFYSNIMNFFKTEITLANGEIRKRPLIETNGETGEIVWDKGRDFATVRKVLSMPQVNIVKKTEVQTGGFSKESILPKRNSDKLIARKKDWDPKKYGGFDSPTVAYSVLVVAKVEKGKSKKLKSVKELLGITIMERSSFEKNPIDFLEAKGYKEVKKDLIIKLPKYSLFELENGRKRMLASAGELQKGNELALPSKYVNFLYLASHYEKLKGSPEDNEQKQLFVEQHKHYLDEIIEQISEFSKRVILADANLDKVLSAYNKHRDKPIREQAENIIHLFTLTNLGAPAAFKYFDTTIDRKRYTSTKEVLDATLIHQSITGLYETRIDLSQLGGDGGGSSGSSGSSGSSGSSGSSGGPLGTSDSPVTHADPIDWKSEEPVWVDQWPLTQEKLSAAQQLVQEQLRLGHIEPSTSAWNSPIFVIKKKSGKWRLLQDLRKVNETMMHMGALQPGLPTPSPIPDKSYIIVIDLKDCFYTIPLAPQDCKRFAFSLPSVNFKEPMQRYQWRVLPQGMTNSPTLCQKFVATAIAPVRQRFPQLYLVHYMDDILLAHTDEHLLYQAFSILKQHLSLNGLVIADEKIQTHFPYNYLGFSLYPRVYNTQLVKLQTDHLKTLNDFQKLLGDINWIRPYLKLPTYTLQPLFDILKGDSDPASPRTLSLEGRTALQSIEEAIRQQQITYCDYQRSWGLYILPTPRAPTGVLYQDKPLRWIYLSATPTKHLLPYYELVAKIIAKGRHEAIQYFGMEPPFICVPYALEQQDWLFQFSDNWSIAFANYPGQITHHYPSDKLLQFASSHAFIFPKIVRRQPIPEATLIFTDGSSNGTAALIINHQTYYAQTSFSSAQVVELFAVHQALLTVPTSFNLFTDSSYVVGALQMIETVPIIGTTSPEVLNLFTLIQQVLHCRQHPCFFGHIRAHSTLPGALVQGNHTADVLTKQVFFQSAGKRTADGSEFEKRTADGSEFESPKKKAKVE

SEQ ID NO: 1603 - protein, 2001 aa, synthetic construct
MPAAKRVKLDGGDKKYSIGLDIGTNSVGWAVITDEYKVPSKKFKVLGNTDRHSIKKNLIGALLFDSGETAEATRLKRTARRRYTRRKNRICYLQEIFSNEMAKVDDSFFHRLEESFLVEEDKKHERHPIFGNIVDEVAYHEKYPTIYHLRKKLVDSTDKADLRLIYLALAHMIKFRGHFLIEGDLNPDNSDVDKLFIQLVQTYNQLFEENPINASGVDAKAILSARLSKSRRLENLIAQLPGEKKNGLFGNLIALSLGLTPNFKSNFDLAEDAKLQLSKDTYDDDLDNLLAQIGDQYADLFLAAKNLSDAILLSDILRVNTEITKAPLSASMIKRYDEHHQDLTLLKALVRQQLPEKYKEIFFDQSKNGYAGYIDGGASQEEFYKFIKPILEKMDGTEELLVKLNREDLLRKQRTFDNGSIPHQIHLGELHAILRRQEDFYPFLKDNREKIEKILTFRIPYYVGPLARGNSRFAWMTRKSEETITPWNFEEVVDKGASAQSFIERMTNFDKNLPNEKVLPKHSLLYEYFTVYNELTKVKYVTEGMRKPAFLSGEQKKAIVDLLFKTNRKVTVKQLKEDYFKKIECFDSVEISGVEDRFNASLGTYHDLLKIIKDKDFLDNEENEDILEDIVLTLTLFEDREMIEERLKTYAHLFDDKVMKQLKRRRYTGWGRLSRKLINGIRDKQSGKTILDFLKSDGFANRNFMQLIHDDSLTFKEDIQKAQVSGQGDSLHEHIANLAGSPAIKKGILQTVKVVDELVKVMGRHKPENIVIEMARENQTTQKGQKNSRERMKRIEEGIKELGSQILKEHPVENTQLQNEKLYLYYLQNGRDMYVDQELDINRLSDYDVDHIVPQSFLKDDSIDNKVLTRSDKARGKSDNVPSEEVVKKMKNYWRQLLNAKLITQRKFDNLTKAERGGLSELDKAGFIKRQLVETRQITKHVAQILDSRMNTKYDENDKLIREVKVITLKSKLVSDFRKDFQFYKVREINNYHHAHDAYLNAVVGTALIKKYPKLESEFVYGDYKVYDVRKMIAKSEQEIGKATAKYFFYSNIMNFFKTEITLANGEIRKRPLIETNGETGEIVWDKGRDFATVRKVLSMPQVNIVKKTEVQTGGFSKESILPKRNSDKLIARKKDWDPKKYGGFDSPTVAYSVLVVAKVEKGKSKKLKSVKELLGITIMERSSFEKNPIDFLEAKGYKEVKKDLIIKLPKYSLFELENGRKRMLASAGELQKGNELALPSKYVNFLYLASHYEKLKGSPEDNEQKQLFVEQHKHYLDEIIEQISEFSKRVILADANLDKVLSAYNKHRDKPIREQAENIIHLFTLTNLGAPAAFKYFDTTIDRKRYTSTKEVLDATLIHQSITGLYETRIDLSQLGGDGGGSSGSSGGPLGTSDSPVTHADPIDWKSEEPVWVDQWPLTQEKLSAAQQLVQEQLRLGHIEPSTSAWNSPIFVIKKKSGKWRLLQDLRKVNETMMHMGALQPGLPTPSPIPDKSYIIVIDLKDCFYTIPLAPQDCKRFAFSLPSVNFKEPMQRYQWRVLPQGMTNSPTLCQKFVATAIAPVRQRFPQLYLVHYMDDILLAHTDEHLLYQAFSILKQHLSLNGLVIADEKIQTHFPYNYLGFSLYPRVYNTQLVKLQTDHLKTLNDFQKLLGDINWIRPYLKLPTYTLQPLFDILKGDSDPASPRTLSLEGRTALQSIEEAIRQQQITYCDYQRSWGLYILPTPRAPTGVLYQDKPLRWIYLSATPTKHLLPYYELVAKIIAKGRHEAIQYFGMEPPFICVPYALEQQDWLFQFSDNWSIAFANYPGQITHHYPSDKLLQFASSHAFIFPKIVRRQPIPEATLIFTDGSSNGTAALIINHQTYYAQTSFSSAQVVELFAVHQALLTVPTSFNLFTDSSYVVGALQMIETVPIIGTTSPEVLNLFTLIQQVLHCRQHPCFFGHIRAHSTLPGALVQGNHTADVLTKQVFFQSAGKRTADGSEFEKRTADGSEFESPKKKAKVE

SEQ ID NO: 1604 - protein, 2216 aa, synthetic construct
MPAAKRVKLDGGDKKYSIGLDIGTNSVGWAVITDEYKVPSKKFKVLGNTDRHSIKKNLIGALLFDSGETAEATRLKRTARRRYTRRKNRICYLQEIFSNEMAKVDDSFFHRLEESFLVEEDKKHERHPIFGNIVDEVAYHEKYPTIYHLRKKLVDSTDKADLRLIYLALAHMIKFRGHFLIEGDLNPDNSDVDKLFIQLVQTYNQLFEENPINASGVDAKAILSARLSKSRRLENLIAQLPGEKKNGLFGNLIALSLGLTPNFKSNFDLAEDAKLQLSKDTYDDDLDNLLAQIGDQYADLFLAAKNLSDAILLSDILRVNTEITKAPLSASMIKRYDEHHQDLTLLKALVRQQLPEKYKEIFFDQSKNGYAGYIDGGASQEEFYKFIKPILEKMDGTEELLVKLNREDLLRKQRTFDNGSIPHQIHLGELHAILRRQEDFYPFLKDNREKIEKILTFRIPYYVGPLARGNSRFAWMTRKSEETITPWNFEEVVDKGASAQSFIERMTNFDKNLPNEKVLPKHSLLYEYFTVYNELTKVKYVTEGMRKPAFLSGEQKKAIVDLLFKTNRKVTVKQLKEDYFKKIECFDSVEISGVEDRFNASLGTYHDLLKIIKDKDFLDNEENEDILEDIVLTLTLFEDREMIEERLKTYAHLFDDKVMKQLKRRRYTGWGRLSRKLINGIRDKQSGKTILDFLKSDGFANRNFMQLIHDDSLTFKEDIQKAQVSGQGDSLHEHIANLAGSPAIKKGILQTVKVVDELVKVMGRHKPENIVIEMARENQTTQKGQKNSRERMKRIEEGIKELGSQILKEHPVENTQLQNEKLYLYYLQNGRDMYVDQELDINRLSDYDVDHIVPQSFLKDDSIDNKVLTRSDKARGKSDNVPSEEVVKKMKNYWRQLLNAKLITQRKFDNLTKAERGGLSELDKAGFIKRQLVETRQITKHVAQILDSRMNTKYDENDKLIREVKVITLKSKLVSDFRKDFQFYKVREINNYHHAHDAYLNAVVGTALIKKYPKLESEFVYGDYKVYDVRKMIAKSEQEIGKATAKYFFYSNIMNFFKTEITLANGEIRKRPLIETNGETGEIVWDKGRDFATVRKVLSMPQVNIVKKTEVQTGGFSKESILPKRNSDKLIARKKDWDPKKYGGFDSPTVAYSVLVVAKVEKGKSKKLKSVKELLGITIMERSSFEKNPIDFLEAKGYKEVKKDLIIKLPKYSLFELENGRKRMLASAGELQKGNELALPSKYVNFLYLASHYEKLKGSPEDNEQKQLFVEQHKHYLDEIIEQISEFSKRVILADANLDKVLSAYNKHRDKPIREQAENIIHLFTLTNLGAPAAFKYFDTTIDRKRYTSTKEVLDATLIHQSITGLYETRIDLSQLGGDGGPAPGSSGGGGGTLGDQGSRGSDPLPEPRVTLTVEGIPTEFLVNTGAEHSVLTKPMGKMGSKRTVVAGATGSKVYPWTTKRLLKIGQKQVTHSFLVIPECPAPLLGRDLLTKLKAQIQFSTEGPQVTWEDRPAMCLVLNLEEEYRLHEKPVPPSIDPSWLQLFPMVWAEKAGMGLANQVPPVVVELKSDASPVAVRQYPMSKEAREGIRPHIQRFLDLGILVPCQSPWNTPLLPVKKPGTNDYRPVQDLREVNKRVQDIHPTVPNPYNLLSSLPPSHTWYSVLDLKDAFFCLKLHPNSQPLFAFEWRDPEKGNTGQLTWTRLPQGFKNSPTLFDEALHRDLASFRALNPQVVMLQYVDDLLVAAPTYRDCKEGTRRLLQELSKLGYRVSAKKAQLCREEVTYLGYLLKGGKRWLTPARKATVMKIPTPTTPRQVREFLGTAGFCRLWIPGFASLAAPLYPLTREKVPFTWTEAHQEAFGRIKEALLSAPALALPDLTKPFALYVDEKEGVARGVLTQTLGPWRRPVAYLSKKLDPVASGWPTCLKAIAAVALLLKDADKLTLGQNVLVIAPHNLESIVRQPPDRWMTNARMTHYQSLLLNERVSFAPPAILNPATLLPVESDDTPIHICSEILAEETGTRPDLRDQPLPGVPAWYTDGSSFIMDGRRQAGAAIVDNKRTVWASNLPEGTSAQKAELIALTQALRLAEGKSINIYTDSRYAFATAHVHGAIYKQRGLLTSAGKDIKNKEEILALLEAIHLPKRVAIIHCPGHQRGTDPVATGNRKADEAAKQAAQSTRILTETTKNAGKRTADGSEFEKRTADGSEFESPKKKAKVE

SEQ ID NO: 1605 - protein, 2218 aa, synthetic construct
MPAAKRVKLDGGDKKYSIGLDIGTNSVGWAVITDEYKVPSKKFKVLGNTDRHSIKKNLIGALLFDSGETAEATRLKRTARRRYTRRKNRICYLQEIFSNEMAKVDDSFFHRLEESFLVEEDKKHERHPIFGNIVDEVAYHEKYPTIYHLRKKLVDSTDKADLRLIYLALAHMIKFRGHFLIEGDLNPDNSDVDKLFIQLVQTYNQLFEENPINASGVDAKAILSARLSKSRRLENLIAQLPGEKKNGLFGNLIALSLGLTPNFKSNFDLAEDAKLQLSKDTYDDDLDNLLAQIGDQYADLFLAAKNLSDAILLSDILRVNTEITKAPLSASMIKRYDEHHQDLTLLKALVRQQLPEKYKEIFFDQSKNGYAGYIDGGASQEEFYKFIKPILEKMDGTEELLVKLNREDLLRKQRTFDNGSIPHQIHLGELHAILRRQEDFYPFLKDNREKIEKILTFRIPYYVGPLARGNSRFAWMTRKSEETITPWNFEEVVDKGASAQSFIERMTNFDKNLPNEKVLPKHSLLYEYFTVYNELTKVKYVTEGMRKPAFLSGEQKKAIVDLLFKTNRKVTVKQLKEDYFKKIECFDSVEISGVEDRFNASLGTYHDLLKIIKDKDFLDNEENEDILEDIVLTLTLFEDREMIEERLKTYAHLFDDKVMKQLKRRRYTGWGRLSRKLINGIRDKQSGKTILDFLKSDGFANRNFMQLIHDDSLTFKEDIQKAQVSGQGDSLHEHIANLAGSPAIKKGILQTVKVVDELVKVMGRHKPENIVIEMARENQTTQKGQKNSRERMKRIEEGIKELGSQILKEHPVENTQLQNEKLYLYYLQNGRDMYVDQELDINRLSDYDVDHIVPQSFLKDDSIDNKVLTRSDKARGKSDNVPSEEVVKKMKNYWRQLLNAKLITQRKFDNLTKAERGGLSELDKAGFIKRQLVETRQITKHVAQILDSRMNTKYDENDKLIREVKVITLKSKLVSDFRKDFQFYKVREINNYHHAHDAYLNAVVGTALIKKYPKLESEFVYGDYKVYDVRKMIAKSEQEIGKATAKYFFYSNIMNFFKTEITLANGEIRKRPLIETNGETGEIVWDKGRDFATVRKVLSMPQVNIVKKTEVQTGGFSKESILPKRNSDKLIARKKDWDPKKYGGFDSPTVAYSVLVVAKVEKGKSKKLKSVKELLGITIMERSSFEKNPIDFLEAKGYKEVKKDLIIKLPKYSLFELENGRKRMLASAGELQKGNELALPSKYVNFLYLASHYEKLKGSPEDNEQKQLFVEQHKHYLDEIIEQISEFSKRVILADANLDKVLSAYNKHRDKPIREQAENIIHLFTLTNLGAPAAFKYFDTTIDRKRYTSTKEVLDATLIHQSITGLYETRIDLSQLGGDGGPAPGGGEAAAKGGTLGDQGSRGSDPLPEPRVTLTVEGIPTEFLVNTGAEHSVLTKPMGKMGSKRTVVAGATGSKVYPWTTKRLLKIGQKQVTHSFLVIPECPAPLLGRDLLTKLKAQIQFSTEGPQVTWEDRPAMCLVLNLEEEYRLHEKPVPPSIDPSWLQLFPMVWAEKAGMGLANQVPPVVVELKSDASPVAVRQYPMSKEAREGIRPHIQRFLDLGILVPCQSPWNTPLLPVKKPGTNDYRPVQDLREVNKRVQDIHPTVPNPYNLLSSLPPSHTWYSVLDLKDAFFCLKLHPNSQPLFAFEWRDPEKGNTGQLTWTRLPQGFKNSPTLFDEALHRDLASFRALNPQVVMLQYVDDLLVAAPTYRDCKEGTRRLLQELSKLGYRVSAKKAQLCREEVTYLGYLLKGGKRWLTPARKATVMKIPTPTTPRQVREFLGTAGFCRLWIPGFASLAAPLYPLTREKVPFTWTEAHQEAFGRIKEALLSAPALALPDLTKPFALYVDEKEGVARGVLTQTLGPWRRPVAYLSKKLDPVASGWPTCLKAIAAVALLLKDADKLTLGQNVLVIAPHNLESIVRQPPDRWMTNARMTHYQSLLLNERVSFAPPAILNPATLLPVESDDTPIHICSEILAEETGTRPDLRDQPLPGVPAWYTDGSSFIMDGRRQAGAAIVDNKRTVWASNLPEGTSAQKAELIALTQALRLAEGKSINIYTDSRYAFATAHVHGAIYKQRGLLTSAGKDIKNKEEILALLEAIHLPKRVAIIHCPGHQRGTDPVATGNRKADEAAKQAAQSTRILTETTKNAGKRTADGSEFEKRTADGSEFESPKKKAKVE

SEQ ID NO: 1606 - protein, 2218 aa, synthetic construct
MPAAKRVKLDGGDKKYSIGLDIGTNSVGWAVITDEYKVPSKKFKVLGNTDRHSIKKNLIGALLFDSGETAEATRLKRTARRRYTRRKNRICYLQEIFSNEMAKVDDSFFHRLEESFLVEEDKKHERHPIFGNIVDEVAYHEKYPTIYHLRKKLVDSTDKADLRLIYLALAHMIKFRGHFLIEGDLNPDNSDVDKLFIQLVQTYNQLFEENPINASGVDAKAILSARLSKSRRLENLIAQLPGEKKNGLFGNLIALSLGLTPNFKSNFDLAEDAKLQLSKDTYDDDLDNLLAQIGDQYADLFLAAKNLSDAILLSDILRVNTEITKAPLSASMIKRYDEHHQDLTLLKALVRQQLPEKYKEIFFDQSKNGYAGYIDGGASQEEFYKFIKPILEKMDGTEELLVKLNREDLLRKQRTFDNGSIPHQIHLGELHAILRRQEDFYPFLKDNREKIEKILTFRIPYYVGPLARGNSRFAWMTRKSEETITPWNFEEVVDKGASAQSFIERMTNFDKNLPNEKVLPKHSLLYEYFTVYNELTKVKYVTEGMRKPAFLSGEQKKAIVDLLFKTNRKVTVKQLKEDYFKKIECFDSVEISGVEDRFNASLGTYHDLLKIIKDKDFLDNEENEDILEDIVLTLTLFEDREMIEERLKTYAHLFDDKVMKQLKRRRYTGWGRLSRKLINGIRDKQSGKTILDFLKSDGFANRNFMQLIHDDSLTFKEDIQKAQVSGQGDSLHEHIANLAGSPAIKKGILQTVKVVDELVKVMGRHKPENIVIEMARENQTTQKGQKNSRERMKRIEEGIKELGSQILKEHPVENTQLQNEKLYLYYLQNGRDMYVDQELDINRLSDYDVDHIVPQSFLKDDSIDNKVLTRSDKARGKSDNVPSEEVVKKMKNYWRQLLNAKLITQRKFDNLTKAERGGLSELDKAGFIKRQLVETRQITKHVAQILDSRMNTKYDENDKLIREVKVITLKSKLVSDFRKDFQFYKVREINNYHHAHDAYLNAVVGTALIKKYPKLESEFVYGDYKVYDVRKMIAKSEQEIGKATAKYFFYSNIMNFFKTEITLANGEIRKRPLIETNGETGEIVWDKGRDFATVRKVLSMPQVNIVKKTEVQTGGFSKESILPKRNSDKLIARKKDWDPKKYGGFDSPTVAYSVLVVAKVEKGKSKKLKSVKELLGITIMERSSFEKNPIDFLEAKGYKEVKKDLIIKLPKYSLFELENGRKRMLASAGELQKGNELALPSKYVNFLYLASHYEKLKGSPEDNEQKQLFVEQHKHYLDEIIEQISEFSKRVILADANLDKVLSAYNKHRDKPIREQAENIIHLFTLTNLGAPAAFKYFDTTIDRKRYTSTKEVLDATLIHQSITGLYETRIDLSQLGGDGGGGGGSSEAAAKGGTLGDQGSRGSDPLPEPRVTLTVEGIPTEFLVNTGAEHSVLTKPMGKMGSKRTVVAGATGSKVYPWTTKRLLKIGQKQVTHSFLVIPECPAPLLGRDLLTKLKAQIQFSTEGPQVTWEDRPAMCLVLNLEEEYRLHEKPVPPSIDPSWLQLFPMVWAEKAGMGLANQVPPVVVELKSDASPVAVRQYPMSKEAREGIRPHIQRFLDLGILVPCQSPWNTPLLPVKKPGTNDYRPVQDLREVNKRVQDIHPTVPNPYNLLSSLPPSHTWYSVLDLKDAFFCLKLHPNSQPLFAFEWRDPEKGNTGQLTWTRLPQGFKNSPTLFDEALHRDLASFRALNPQVVMLQYVDDLLVAAPTYRDCKEGTRRLLQELSKLGYRVSAKKAQLCREEVTYLGYLLKGGKRWLTPARKATVMKIPTPTTPRQVREFLGTAGFCRLWIPGFASLAAPLYPLTREKVPFTWTEAHQEAFGRIKEALLSAPALALPDLTKPFALYVDEKEGVARGVLTQTLGPWRRPVAYLSKKLDPVASGWPTCLKAIAAVALLLKDADKLTLGQNVLVIAPHNLESIVRQPPDRWMTNARMTHYQSLLLNERVSFAPPAILNPATLLPVESDDTPIHICSEILAEETGTRPDLRDQPLPGVPAWYTDGSSFIMDGRRQAGAAIVDNKRTVWASNLPEGTSAQKAELIALTQALRLAEGKSINIYTDSRYAFATAHVHGAIYKQRGLLTSAGKDIKNKEEILALLEAIHLPKRVAIIHCPGHQRGTDPVATGNRKADEAAKQAAQSTRILTETTKNAGKRTADGSEFEKRTADGSEFESPKKKAKVE

SEQ ID NO: 1607 - protein, 2213 aa, synthetic construct
MPAAKRVKLDGGDKKYSIGLDIGTNSVGWAVITDEYKVPSKKFKVLGNTDRHSIKKNLIGALLFDSGETAEATRLKRTARRRYTRRKNRICYLQEIFSNEMAKVDDSFFHRLEESFLVEEDKKHERHPIFGNIVDEVAYHEKYPTIYHLRKKLVDSTDKADLRLIYLALAHMIKFRGHFLIEGDLNPDNSDVDKLFIQLVQTYNQLFEENPINASGVDAKAILSARLSKSRRLENLIAQLPGEKKNGLFGNLIALSLGLTPNFKSNFDLAEDAKLQLSKDTYDDDLDNLLAQIGDQYADLFLAAKNLSDAILLSDILRVNTEITKAPLSASMIKRYDEHHQDLTLLKALVRQQLPEKYKEIFFDQSKNGYAGYIDGGASQEEFYKFIKPILEKMDGTEELLVKLNREDLLRKQRTFDNGSIPHQIHLGELHAILRRQEDFYPFLKDNREKIEKILTFRIPYYVGPLARGNSRFAWMTRKSEETITPWNFEEVVDKGASAQSFIERMTNFDKNLPNEKVLPKHSLLYEYFTVYNELTKVKYVTEGMRKPAFLSGEQKKAIVDLLFKTNRKVTVKQLKEDYFKKIECFDSVEISGVEDRFNASLGTYHDLLKIIKDKDFLDNEENEDILEDIVLTLTLFEDREMIEERLKTYAHLFDDKVMKQLKRRRYTGWGRLSRKLINGIRDKQSGKTILDFLKSDGFANRNFMQLIHDDSLTFKEDIQKAQVSGQGDSLHEHIANLAGSPAIKKGILQTVKVVDELVKVMGRHKPENIVIEMARENQTTQKGQKNSRERMKRIEEGIKELGSQILKEHPVENTQLQNEKLYLYYLQNGRDMYVDQELDINRLSDYDVDHIVPQSFLKDDSIDNKVLTRSDKARGKSDNVPSEEVVKKMKNYWRQLLNAKLITQRKFDNLTKAERGGLSELDKAGFIKRQLVETRQITKHVAQILDSRMNTKYDENDKLIREVKVITLKSKLVSDFRKDFQFYKVREINNYHHAHDAYLNAVVGTALIKKYPKLESEFVYGDYKVYDVRKMIAKSEQEIGKATAKYFFYSNIMNFFKTEITLANGEIRKRPLIETNGETGEIVWDKGRDFATVRKVLSMPQVNIVKKTEVQTGGFSKESILPKRNSDKLIARKKDWDPKKYGGFDSPTVAYSVLVVAKVEKGKSKKLKSVKELLGITIMERSSFEKNPIDFLEAKGYKEVKKDLIIKLPKYSLFELENGRKRMLASAGELQKGNELALPSKYVNFLYLASHYEKLKGSPEDNEQKQLFVEQHKHYLDEIIEQISEFSKRVILADANLDKVLSAYNKHRDKPIREQAENIIHLFTLTNLGAPAAFKYFDTTIDRKRYTSTKEVLDATLIHQSITGLYETRIDLSQLGGDGGGGSPAPGGTLGDQGSRGSDPLPEPRVTLTVEGIPTEFLVNTGAEHSVLTKPMGKMGSKRTVVAGATGSKVYPWTTKRLLKIGQKQVTHSFLVIPECPAPLLGRDLLTKLKAQIQFSTEGPQVTWEDRPAMCLVLNLEEEYRLHEKPVPPSIDPSWLQLFPMVWAEKAGMGLANQVPPVVVELKSDASPVAVRQYPMSKEAREGIRPHIQRFLDLGILVPCQSPWNTPLLPVKKPGTNDYRPVQDLREVNKRVQDIHPTVPNPYNLLSSLPPSHTWYSVLDLKDAFFCLKLHPNSQPLFAFEWRDPEKGNTGQLTWTRLPQGFKNSPTLFDEALHRDLASFRALNPQVVMLQYVDDLLVAAPTYRDCKEGTRRLLQELSKLGYRVSAKKAQLCREEVTYLGYLLKGGKRWLTPARKATVMKIPTPTTPRQVREFLGTAGFCRLWIPGFASLAAPLYPLTREKVPFTWTEAHQEAFGRIKEALLSAPALALPDLTKPFALYVDEKEGVARGVLTQTLGPWRRPVAYLSKKLDPVASGWPTCLKAIAAVALLLKDADKLTLGQNVLVIAPHNLESIVRQPPDRWMTNARMTHYQSLLLNERVSFAPPAILNPATLLPVESDDTPIHICSEILAEETGTRPDLRDQPLPGVPAWYTDGSSFIMDGRRQAGAAIVDNKRTVWASNLPEGTSAQKAELIALTQALRLAEGKSINIYTDSRYAFATAHVHGAIYKQRGLLTSAGKDIKNKEEILALLEAIHLPKRVAIIHCPGHQRGTDPVATGNRKADEAAKQAAQSTRILTETTKNAGKRTADGSEFEKRTADGSEFESPKKKAKVE

SEQ ID NO: 1608 - protein, 2216 aa, synthetic construct
MPAAKRVKLDGGDKKYSIGLDIGTNSVGWAVITDEYKVPSKKFKVLGNTDRHSIKKNLIGALLFDSGETAEATRLKRTARRRYTRRKNRICYLQEIFSNEMAKVDDSFFHRLEESFLVEEDKKHERHPIFGNIVDEVAYHEKYPTIYHLRKKLVDSTDKADLRLIYLALAHMIKFRGHFLIEGDLNPDNSDVDKLFIQLVQTYNQLFEENPINASGVDAKAILSARLSKSRRLENLIAQLPGEKKNGLFGNLIALSLGLTPNFKSNFDLAEDAKLQLSKDTYDDDLDNLLAQIGDQYADLFLAAKNLSDAILLSDILRVNTEITKAPLSASMIKRYDEHHQDLTLLKALVRQQLPEKYKEIFFDQSKNGYAGYIDGGASQEEFYKFIKPILEKMDGTEELLVKLNREDLLRKQRTFDNGSIPHQIHLGELHAILRRQEDFYPFLKDNREKIEKILTFRIPYYVGPLARGNSRFAWMTRKSEETITPWNFEEVVDKGASAQSFIERMTNFDKNLPNEKVLPKHSLLYEYFTVYNELTKVKYVTEGMRKPAFLSGEQKKAIVDLLFKTNRKVTVKQLKEDYFKKIECFDSVEISGVEDRFNASLGTYHDLLKIIKDKDFLDNEENEDILEDIVLTLTLFEDREMIEERLKTYAHLFDDKVMKQLKRRRYTGWGRLSRKLINGIRDKQSGKTILDFLKSDGFANRNFMQLIHDDSLTFKEDIQKAQVSGQGDSLHEHIANLAGSPAIKKGILQTVKVVDELVKVMGRHKPENIVIEMARENQTTQKGQKNSRERMKRIEEGIKELGSQILKEHPVENTQLQNEKLYLYYLQNGRDMYVDQELDINRLSDYDVDHIVPQSFLKDDSIDNKVLTRSDKARGKSDNVPSEEVVKKMKNYWRQLLNAKLITQRKFDNLTKAERGGLSELDKAGFIKRQLVETRQITKHVAQILDSRMNTKYDENDKLIREVKVITLKSKLVSDFRKDFQFYKVREINNYHHAHDAYLNAVVGTALIKKYPKLESEFVYGDYKVYDVRKMIAKSEQEIGKATAKYFFYSNIMNFFKTEITLANGEIRKRPLIETNGETGEIVWDKGRDFATVRKVLSMPQVNIVKKTEVQTGGFSKESILPKRNSDKLIARKKDWDPKKYGGFDSPTVAYSVLVVAKVEKGKSKKLKSVKELLGITIMERSSFEKNPIDFLEAKGYKEVKKDLIIKLPKYSLFELENGRKRMLASAGELQKGNELALPSKYVNFLYLASHYEKLKGSPEDNEQKQLFVEQHKHYLDEIIEQISEFSKRVILADANLDKVLSAYNKHRDKPIREQAENIIHLFTLTNLGAPAAFKYFDTTIDRKRYTSTKEVLDATLIHQSITGLYETRIDLSQLGGDGGGGSGGGGSSGGTLGDQGSRGSDPLPEPRVTLTVEGIPTEFLVNTGAEHSVLTKPMGKMGSKRTVVAGATGSKVYPWTTKRLLKIGQKQVTHSFLVIPECPAPLLGRDLLTKLKAQIQFSTEGPQVTWEDRPAMCLVLNLEEEYRLHEKPVPPSIDPSWLQLFPMVWAEKAGMGLANQVPPVVVELKSDASPVAVRQYPMSKEAREGIRPHIQRFLDLGILVPCQSPWNTPLLPVKKPGTNDYRPVQDLREVNKRVQDIHPTVPNPYNLLSSLPPSHTWYSVLDLKDAFFCLKLHPNSQPLFAFEWRDPEKGNTGQLTWTRLPQGFKNSPTLFDEALHRDLASFRALNPQVVMLQYVDDLLVAAPTYRDCKEGTRRLLQELSKLGYRVSAKKAQLCREEVTYLGYLLKGGKRWLTPARKATVMKIPTPTTPRQVREFLGTAGFCRLWIPGFASLAAPLYPLTREKVPFTWTEAHQEAFGRIKEALLSAPALALPDLTKPFALYVDEKEGVARGVLTQTLGPWRRPVAYLSKKLDPVASGWPTCLKAIAAVALLLKDADKLTLGQNVLVIAPHNLESIVRQPPDRWMTNARMTHYQSLLLNERVSFAPPAILNPATLLPVESDDTPIHICSEILAEETGTRPDLRDQPLPGVPAWYTDGSSFIMDGRRQAGAAIVDNKRTVWASNLPEGTSAQKAELIALTQALRLAEGKSINIYTDSRYAFATAHVHGAIYKQRGLLTSAGKDIKNKEEILALLEAIHLPKRVAIIHCPGHQRGTDPVATGNRKADEAAKQAAQSTRILTETTKNAGKRTADGSEFEKRTADGSEFESPKKKAKVE

SEQ ID NO: 1609 - protein, 2220 aa, synthetic construct
MPAAKRVKLDGGDKKYSIGLDIGTNSVGWAVITDEYKVPSKKFKVLGNTDRHSIKKNLIGALLFDSGETAEATRLKRTARRRYTRRKNRICYLQEIFSNEMAKVDDSFFHRLEESFLVEEDKKHERHPIFGNIVDEVAYHEKYPTIYHLRKKLVDSTDKADLRLIYLALAHMIKFRGHFLIEGDLNPDNSDVDKLFIQLVQTYNQLFEENPINASGVDAKAILSARLSKSRRLENLIAQLPGEKKNGLFGNLIALSLGLTPNFKSNFDLAEDAKLQLSKDTYDDDLDNLLAQIGDQYADLFLAAKNLSDAILLSDILRVNTEITKAPLSASMIKRYDEHHQDLTLLKALVRQQLPEKYKEIFFDQSKNGYAGYIDGGASQEEFYKFIKPILEKMDGTEELLVKLNREDLLRKQRTFDNGSIPHQIHLGELHAILRRQEDFYPFLKDNREKIEKILTFRIPYYVGPLARGNSRFAWMTRKSEETITPWNFEEVVDKGASAQSFIERMTNFDKNLPNEKVLPKHSLLYEYFTVYNELTKVKYVTEGMRKPAFLSGEQKKAIVDLLFKTNRKVTVKQLKEDYFKKIECFDSVEISGVEDRFNASLGTYHDLLKIIKDKDFLDNEENEDILEDIVLTLTLFEDREMIEERLKTYAHLFDDKVMKQLKRRRYTGWGRLSRKLINGIRDKQSGKTILDFLKSDGFANRNFMQLIHDDSLTFKEDIQKAQVSGQGDSLHEHIANLAGSPAIKKGILQTVKVVDELVKVMGRHKPENIVIEMARENQTTQKGQKNSRERMKRIEEGIKELGSQILKEHPVENTQLQNEKLYLYYLQNGRDMYVDQELDINRLSDYDVDHIVPQSFLKDDSIDNKVLTRSDKARGKSDNVPSEEVVKKMKNYWRQLLNAKLITQRKFDNLTKAERGGLSELDKAGFIKRQLVETRQITKHVAQILDSRMNTKYDENDKLIREVKVITLKSKLVSDFRKDFQFYKVREINNYHHAHDAYLNAVVGTALIKKYPKLESEFVYGDYKVYDVRKMIAKSEQEIGKATAKYFFYSNIMNFFKTEITLANGEIRKRPLIETNGETGEIVWDKGRDFATVRKVLSMPQVNIVKKTEVQTGGFSKESILPKRNSDKLIARKKDWDPKKYGGFDSPTVAYSVLVVAKVEKGKSKKLKSVKELLGITIMERSSFEKNPIDFLEAKGYKEVKKDLIIKLPKYSLFELENGRKRMLASAGELQKGNELALPSKYVNFLYLASHYEKLKGSPEDNEQKQLFVEQHKHYLDEIIEQISEFSKRVILADANLDKVLSAYNKHRDKPIREQAENIIHLFTLTNLGAPAAFKYFDTTIDRKRYTSTKEVLDATLIHQSITGLYETRIDLSQLGGDGGPAPAPAPAPAPAPGGTLGDQGSRGSDPLPEPRVTLTVEGIPTEFLVNTGAEHSVLTKPMGKMGSKRTVVAGATGSKVYPWTTKRLLKIGQKQVTHSFLVIPECPAPLLGRDLLTKLKAQIQFSTEGPQVTWEDRPAMCLVLNLEEEYRLHEKPVPPSIDPSWLQLFPMVWAEKAGMGLANQVPPVVVELKSDASPVAVRQYPMSKEAREGIRPHIQRFLDLGILVPCQSPWNTPLLPVKKPGTNDYRPVQDLREVNKRVQDIHPTVPNPYNLLSSLPPSHTWYSVLDLKDAFFCLKLHPNSQPLFAFEWRDPEKGNTGQLTWTRLPQGFKNSPTLFDEALHRDLASFRALNPQVVMLQYVDDLLVAAPTYRDCKEGTRRLLQELSKLGYRVSAKKAQLCREEVTYLGYLLKGGKRWLTPARKATVMKIPTPTTPRQVREFLGTAGFCRLWIPGFASLAAPLYPLTREKVPFTWTEAHQEAFGRIKEALLSAPALALPDLTKPFALYVDEKEGVARGVLTQTLGPWRRPVAYLSKKLDPVASGWPTCLKAIAAVALLLKDADKLTLGQNVLVIAPHNLESIVRQPPDRWMTNARMTHYQSLLLNERVSFAPPAILNPATLLPVESDDTPIHICSEILAEETGTRPDLRDQPLPGVPAWYTDGSSFIMDGRRQAGAAIVDNKRTVWASNLPEGTSAQKAELIALTQALRLAEGKSINIYTDSRYAFATAHVHGAIYKQRGLLTSAGKDIKNKEEILALLEAIHLPKRVAIIHCPGHQRGTDPVATGNRKADEAAKQAAQSTRILTETTKNAGKRTADGSEFEKRTADGSEFESPKKKAKVE

SEQ ID NO: 1610 - protein, 2127 aa, synthetic construct
MPAAKRVKLDGGDKKYSIGLDIGTNSVGWAVITDEYKVPSKKFKVLGNTDRHSIKKNLIGALLFDSGETAEATRLKRTARRRYTRRKNRICYLQEIFSNEMAKVDDSFFHRLEESFLVEEDKKHERHPIFGNIVDEVAYHEKYPTIYHLRKKLVDSTDKADLRLIYLALAHMIKFRGHFLIEGDLNPDNSDVDKLFIQLVQTYNQLFEENPINASGVDAKAILSARLSKSRRLENLIAQLPGEKKNGLFGNLIALSLGLTPNFKSNFDLAEDAKLQLSKDTYDDDLDNLLAQIGDQYADLFLAAKNLSDAILLSDILRVNTEITKAPLSASMIKRYDEHHQDLTLLKALVRQQLPEKYKEIFFDQSKNGYAGYIDGGASQEEFYKFIKPILEKMDGTEELLVKLNREDLLRKQRTFDNGSIPHQIHLGELHAILRRQEDFYPFLKDNREKIEKILTFRIPYYVGPLARGNSRFAWMTRKSEETITPWNFEEVVDKGASAQSFIERMTNFDKNLPNEKVLPKHSLLYEYFTVYNELTKVKYVTEGMRKPAFLSGEQKKAIVDLLFKTNRKVTVKQLKEDYFKKIECFDSVEISGVEDRFNASLGTYHDLLKIIKDKDFLDNEENEDILEDIVLTLTLFEDREMIEERLKTYAHLFDDKVMKQLKRRRYTGWGRLSRKLINGIRDKQSGKTILDFLKSDGFANRNFMQLIHDDSLTFKEDIQKAQVSGQGDSLHEHIANLAGSPAIKKGILQTVKVVDELVKVMGRHKPENIVIEMARENQTTQKGQKNSRERMKRIEEGIKELGSQILKEHPVENTQLQNEKLYLYYLQNGRDMYVDQELDINRLSDYDVDHIVPQSFLKDDSIDNKVLTRSDKARGKSDNVPSEEVVKKMKNYWRQLLNAKLITQRKFDNLTKAERGGLSELDKAGFIKRQLVETRQITKHVAQILDSRMNTKYDENDKLIREVKVITLKSKLVSDFRKDFQFYKVREINNYHHAHDAYLNAVVGTALIKKYPKLESEFVYGDYKVYDVRKMIAKSEQEIGKATAKYFFYSNIMNFFKTEITLANGEIRKRPLIETNGETGEIVWDKGRDFATVRKVLSMPQVNIVKKTEVQTGGFSKESILPKRNSDKLIARKKDWDPKKYGGFDSPTVAYSVLVVAKVEKGKSKKLKSVKELLGITIMERSSFEKNPIDFLEAKGYKEVKKDLIIKLPKYSLFELENGRKRMLASAGELQKGNELALPSKYVNFLYLASHYEKLKGSPEDNEQKQLFVEQHKHYLDEIIEQISEFSKRVILADANLDKVLSAYNKHRDKPIREQAENIIHLFTLTNLGAPAAFKYFDTTIDRKRYTSTKEVLDATLIHQSITGLYETRIDLSQLGGDGGEAAAKGGSPAPGGLLGRDLLTKLKAQIQFSTEGPQVTWEDRPAMCLVLNLEEEYRLHEKPVPPSIDPSWLQLFPMVWAEKAGMGLANQVPPVVVELKSDASPVAVRQYPMSKEAREGIRPHIQRFLDLGILVPCQSPWNTPLLPVKKPGTNDYRPVQDLREVNKRVQDIHPTVPNPYNLLSSLPPSHTWYSVLDLKDAFFCLKLHPNSQPLFAFEWRDPEKGNTGQLTWTRLPQGFKNSPTLFDEALHRDLASFRALNPQVVMLQYVDDLLVAAPTYRDCKEGTRRLLQELSKLGYRVSAKKAQLCREEVTYLGYLLKGGKRWLTPARKATVMKIPTPTTPRQVREFLGTAGFCRLWIPGFASLAAPLYPLTREKVPFTWTEAHQEAFGRIKEALLSAPALALPDLTKPFALYVDEKEGVARGVLTQTLGPWRRPVAYLSKKLDPVASGWPTCLKAIAAVALLLKDADKLTLGQNVLVIAPHNLESIVRQPPDRWMTNARMTHYQSLLLNERVSFAPPAILNPATLLPVESDDTPIHICSEILAEETGTRPDLRDQPLPGVPAWYTDGSSFIMDGRRQAGAAIVDNKRTVWASNLPEGTSAQKAELIALTQALRLAEGKSINIYTDSRYAFATAHVHGAIYKQRGLLTSAGKDIKNKEEILALLEAIHLPKRVAIIHCPGHQRGTDPVATGNRKADEAAKQAAQSTRILTETTKNAGKRTADGSEFEKRTADGSEFESPKKKAKVE

SEQ ID NO: 1611 - protein, 2125 aa, synthetic construct
MPAAKRVKLDGGDKKYSIGLDIGTNSVGWAVITDEYKVPSKKFKVLGNTDRHSIKKNLIGALLFDSGETAEATRLKRTARRRYTRRKNRICYLQEIFSNEMAKVDDSFFHRLEESFLVEEDKKHERHPIFGNIVDEVAYHEKYPTIYHLRKKLVDSTDKADLRLIYLALAHMIKFRGHFLIEGDLNPDNSDVDKLFIQLVQTYNQLFEENPINASGVDAKAILSARLSKSRRLENLIAQLPGEKKNGLFGNLIALSLGLTPNFKSNFDLAEDAKLQLSKDTYDDDLDNLLAQIGDQYADLFLAAKNLSDAILLSDILRVNTEITKAPLSASMIKRYDEHHQDLTLLKALVRQQLPEKYKEIFFDQSKNGYAGYIDGGASQEEFYKFIKPILEKMDGTEELLVKLNREDLLRKQRTFDNGSIPHQIHLGELHAILRRQEDFYPFLKDNREKIEKILTFRIPYYVGPLARGNSRFAWMTRKSEETITPWNFEEVVDKGASAQSFIERMTNFDKNLPNEKVLPKHSLLYEYFTVYNELTKVKYVTEGMRKPAFLSGEQKKAIVDLLFKTNRKVTVKQLKEDYFKKIECFDSVEISGVEDRFNASLGTYHDLLKIIKDKDFLDNEENEDILEDIVLTLTLFEDREMIEERLKTYAHLFDDKVMKQLKRRRYTGWGRLSRKLINGIRDKQSGKTILDFLKSDGFANRNFMQLIHDDSLTFKEDIQKAQVSGQGDSLHEHIANLAGSPAIKKGILQTVKVVDELVKVMGRHKPENIVIEMARENQTTQKGQKNSRERMKRIEEGIKELGSQILKEHPVENTQLQNEKLYLYYLQNGRDMYVDQELDINRLSDYDVDHIVPQSFLKDDSIDNKVLTRSDKARGKSDNVPSEEVVKKMKNYWRQLLNAKLITQRKFDNLTKAERGGLSELDKAGFIKRQLVETRQITKHVAQILDSRMNTKYDENDKLIREVKVITLKSKLVSDFRKDFQFYKVREINNYHHAHDAYLNAVVGTALIKKYPKLESEFVYGDYKVYDVRKMIAKSEQEIGKATAKYFFYSNIMNFFKTEITLANGEIRKRPLIETNGETGEIVWDKGRDFATVRKVLSMPQVNIVKKTEVQTGGFSKESILPKRNSDKLIARKKDWDPKKYGGFDSPTVAYSVLVVAKVEKGKSKKLKSVKELLGITIMERSSFEKNPIDFLEAKGYKEVKKDLIIKLPKYSLFELENGRKRMLASAGELQKGNELALPSKYVNFLYLASHYEKLKGSPEDNEQKQLFVEQHKHYLDEIIEQISEFSKRVILADANLDKVLSAYNKHRDKPIREQAENIIHLFTLTNLGAPAAFKYFDTTIDRKRYTSTKEVLDATLIHQSITGLYETRIDLSQLGGDGGGGGGGSGSSGGLLGRDLLTKLKAQIQFSTEGPQVTWEDRPAMCLVLNLEEEYRLHEKPVPPSIDPSWLQLFPMVWAEKAGMGLANQVPPVVVELKSDASPVAVRQYPMSKEAREGIRPHIQRFLDLGILVPCQSPWNTPLLPVKKPGTNDYRPVQDLREVNKRVQDIHPTVPNPYNLLSSLPPSHTWYSVLDLKDAFFCLKLHPNSQPLFAFEWRDPEKGNTGQLTWTRLPQGFKNSPTLFDEALHRDLASFRALNPQVVMLQYVDDLLVAAPTYRDCKEGTRRLLQELSKLGYRVSAKKAQLCREEVTYLGYLLKGGKRWLTPARKATVMKIPTPTTPRQVREFLGTAGFCRLWIPGFASLAAPLYPLTREKVPFTWTEAHQEAFGRIKEALLSAPALALPDLTKPFALYVDEKEGVARGVLTQTLGPWRRPVAYLSKKLDPVASGWPTCLKAIAAVALLLKDADKLTLGQNVLVIAPHNLESIVRQPPDRWMTNARMTHYQSLLLNERVSFAPPAILNPATLLPVESDDTPIHICSEILAEETGTRPDLRDQPLPGVPAWYTDGSSFIMDGRRQAGAAIVDNKRTVWASNLPEGTSAQKAELIALTQALRLAEGKSINIYTDSRYAFATAHVHGAIYKQRGLLTSAGKDIKNKEEILALLEAIHLPKRVAIIHCPGHQRGTDPVATGNRKADEAAKQAAQSTRILTETTKNAGKRTADGSEFEKRTADGSEFESPKKKAKVE

SEQ ID NO: 1612 - protein, 2127 aa, synthetic construct
MPAAKRVKLDGGDKKYSIGLDIGTNSVGWAVITDEYKVPSKKFKVLGNTDRHSIKKNLIGALLFDSGETAEATRLKRTARRRYTRRKNRICYLQEIFSNEMAKVDDSFFHRLEESFLVEEDKKHERHPIFGNIVDEVAYHEKYPTIYHLRKKLVDSTDKADLRLIYLALAHMIKFRGHFLIEGDLNPDNSDVDKLFIQLVQTYNQLFEENPINASGVDAKAILSARLSKSRRLENLIAQLPGEKKNGLFGNLIALSLGLTPNFKSNFDLAEDAKLQLSKDTYDDDLDNLLAQIGDQYADLFLAAKNLSDAILLSDILRVNTEITKAPLSASMIKRYDEHHQDLTLLKALVRQQLPEKYKEIFFDQSKNGYAGYIDGGASQEEFYKFIKPILEKMDGTEELLVKLNREDLLRKQRTFDNGSIPHQIHLGELHAILRRQEDFYPFLKDNREKIEKILTFRIPYYVGPLARGNSRFAWMTRKSEETITPWNFEEVVDKGASAQSFIERMTNFDKNLPNEKVLPKHSLLYEYFTVYNELTKVKYVTEGMRKPAFLSGEQKKAIVDLLFKTNRKVTVKQLKEDYFKKIECFDSVEISGVEDRFNASLGTYHDLLKIIKDKDFLDNEENEDILEDIVLTLTLFEDREMIEERLKTYAHLFDDKVMKQLKRRRYTGWGRLSRKLINGIRDKQSGKTILDFLKSDGFANRNFMQLIHDDSLTFKEDIQKAQVSGQGDSLHEHIANLAGSPAIKKGILQTVKVVDELVKVMGRHKPENIVIEMARENQTTQKGQKNSRERMKRIEEGIKELGSQILKEHPVENTQLQNEKLYLYYLQNGRDMYVDQELDINRLSDYDVDHIVPQSFLKDDSIDNKVLTRSDKARGKSDNVPSEEVVKKMKNYWRQLLNAKLITQRKFDNLTKAERGGLSELDKAGFIKRQLVETRQITKHVAQILDSRMNTKYDENDKLIREVKVITLKSKLVSDFRKDFQFYKVREINNYHHAHDAYLNAVVGTALIKKYPKLESEFVYGDYKVYDVRKMIAKSEQEIGKATAKYFFYSNIMNFFKTEITLANGEIRKRPLIETNGETGEIVWDKGRDFATVRKVLSMPQVNIVKKTEVQTGGFSKESILPKRNSDKLIARKKDWDPKKYGGFDSPTVAYSVLVVAKVEKGKSKKLKSVKELLGITIMERSSFEKNPIDFLEAKGYKEVKKDLIIKLPKYSLFELENGRKRMLASAGELQKGNELALPSKYVNFLYLASHYEKLKGSPEDNEQKQLFVEQHKHYLDEIIEQISEFSKRVILADANLDKVLSAYNKHRDKPIREQAENIIHLFTLTNLGAPAAFKYFDTTIDRKRYTSTKEVLDATLIHQSITGLYETRIDLSQLGGDGGEAAAKGGGPAPGGLLGRDLLTKLKAQIQFSTEGPQVTWEDRPAMCLVLNLEEEYRLHEKPVPPSIDPSWLQLFPMVWAEKAGMGLANQVPPVVVELKSDASPVAVRQYPMSKEAREGIRPHIQRFLDLGILVPCQSPWNTPLLPVKKPGTNDYRPVQDLREVNKRVQDIHPTVPNPYNLLSSLPPSHTWYSVLDLKDAFFCLKLHPNSQPLFAFEWRDPEKGNTGQLTWTRLPQGFKNSPTLFDEALHRDLASFRALNPQVVMLQYVDDLLVAAPTYRDCKEGTRRLLQELSKLGYRVSAKKAQLCREEVTYLGYLLKGGKRWLTPARKATVMKIPTPTTPRQVREFLGTAGFCRLWIPGFASLAAPLYPLTREKVPFTWTEAHQEAFGRIKEALLSAPALALPDLTKPFALYVDEKEGVARGVLTQTLGPWRRPVAYLSKKLDPVASGWPTCLKAIAAVALLLKDADKLTLGQNVLVIAPHNLESIVRQPPDRWMTNARMTHYQSLLLNERVSFAPPAILNPATLLPVESDDTPIHICSEILAEETGTRPDLRDQPLPGVPAWYTDGSSFIMDGRRQAGAAIVDNKRTVWASNLPEGTSAQKAELIALTQALRLAEGKSINIYTDSRYAFATAHVHGAIYKQRGLLTSAGKDIKNKEEILALLEAIHLPKRVAIIHCPGHQRGTDPVATGNRKADEAAKQAAQSTRILTETTKNAGKRTADGSEFEKRTADGSEFESPKKKAKVE

SEQ ID NO: 1613 - protein, 2127 aa, synthetic construct
MPAAKRVKLDGGDKKYSIGLDIGTNSVGWAVITDEYKVPSKKFKVLGNTDRHSIKKNLIGALLFDSGETAEATRLKRTARRRYTRRKNRICYLQEIFSNEMAKVDDSFFHRLEESFLVEEDKKHERHPIFGNIVDEVAYHEKYPTIYHLRKKLVDSTDKADLRLIYLALAHMIKFRGHFLIEGDLNPDNSDVDKLFIQLVQTYNQLFEENPINASGVDAKAILSARLSKSRRLENLIAQLPGEKKNGLFGNLIALSLGLTPNFKSNFDLAEDAKLQLSKDTYDDDLDNLLAQIGDQYADLFLAAKNLSDAILLSDILRVNTEITKAPLSASMIKRYDEHHQDLTLLKALVRQQLPEKYKEIFFDQSKNGYAGYIDGGASQEEFYKFIKPILEKMDGTEELLVKLNREDLLRKQRTFDNGSIPHQIHLGELHAILRRQEDFYPFLKDNREKIEKILTFRIPYYVGPLARGNSRFAWMTRKSEETITPWNFEEVVDKGASAQSFIERMTNFDKNLPNEKVLPKHSLLYEYFTVYNELTKVKYVTEGMRKPAFLSGEQKKAIVDLLFKTNRKVTVKQLKEDYFKKIECFDSVEISGVEDRFNASLGTYHDLLKIIKDKDFLDNEENEDILEDIVLTLTLFEDREMIEERLKTYAHLFDDKVMKQLKRRRYTGWGRLSRKLINGIRDKQSGKTILDFLKSDGFANRNFMQLIHDDSLTFKEDIQKAQVSGQGDSLHEHIANLAGSPAIKKGILQTVKVVDELVKVMGRHKPENIVIEMARENQTTQKGQKNSRERMKRIEEGIKELGSQILKEHPVENTQLQNEKLYLYYLQNGRDMYVDQELDINRLSDYDVDHIVPQSFLKDDSIDNKVLTRSDKARGKSDNVPSEEVVKKMKNYWRQLLNAKLITQRKFDNLTKAERGGLSELDKAGFIKRQLVETRQITKHVAQILDSRMNTKYDENDKLIREVKVITLKSKLVSDFRKDFQFYKVREINNYHHAHDAYLNAVVGTALIKKYPKLESEFVYGDYKVYDVRKMIAKSEQEIGKATAKYFFYSNIMNFFKTEITLANGEIRKRPLIETNGETGEIVWDKGRDFATVRKVLSMPQVNIVKKTEVQTGGFSKESILPKRNSDKLIARKKDWDPKKYGGFDSPTVAYSVLVVAKVEKGKSKKLKSVKELLGITIMERSSFEKNPIDFLEAKGYKEVKKDLIIKLPKYSLFELENGRKRMLASAGELQKGNELALPSKYVNFLYLASHYEKLKGSPEDNEQKQLFVEQHKHYLDEIIEQISEFSKRVILADANLDKVLSAYNKHRDKPIREQAENIIHLFTLTNLGAPAAFKYFDTTIDRKRYTSTKEVLDATLIHQSITGLYETRIDLSQLGGDGGEAAAKPAPGSSGGLLGRDLLTKLKAQIQFSTEGPQVTWEDRPAMCLVLNLEEEYRLHEKPVPPSIDPSWLQLFPMVWAEKAGMGLANQVPPVVVELKSDASPVAVRQYPMSKEAREGIRPHIQRFLDLGILVPCQSPWNTPLLPVKKPGTNDYRPVQDLREVNKRVQDIHPTVPNPYNLLSSLPPSHTWYSVLDLKDAFFCLKLHPNSQPLFAFEWRDPEKGNTGQLTWTRLPQGFKNSPTLFDEALHRDLASFRALNPQVVMLQYVDDLLVAAPTYRDCKEGTRRLLQELSKLGYRVSAKKAQLCREEVTYLGYLLKGGKRWLTPARKATVMKIPTPTTPRQVREFLGTAGFCRLWIPGFASLAAPLYPLTREKVPFTWTEAHQEAFGRIKEALLSAPALALPDLTKPFALYVDEKEGVARGVLTQTLGPWRRPVAYLSKKLDPVASGWPTCLKAIAAVALLLKDADKLTLGQNVLVIAPHNLESIVRQPPDRWMTNARMTHYQSLLLNERVSFAPPAILNPATLLPVESDDTPIHICSEILAEETGTRPDLRDQPLPGVPAWYTDGSSFIMDGRRQAGAAIVDNKRTVWASNLPEGTSAQKAELIALTQALRLAEGKSINIYTDSRYAFATAHVHGAIYKQRGLLTSAGKDIKNKEEILALLEAIHLPKRVAIIHCPGHQRGTDPVATGNRKADEAAKQAAQSTRILTETTKNAGKRTADGSEFEKRTADGSEFESPKKKAKVE

SEQ ID NO: 1614 - protein, 2127 aa, synthetic construct
MPAAKRVKLDGGDKKYSIGLDIGTNSVGWAVITDEYKVPSKKFKVLGNTDRHSIKKNLIGALLFDSGETAEATRLKRTARRRYTRRKNRICYLQEIFSNEMAKVDDSFFHRLEESFLVEEDKKHERHPIFGNIVDEVAYHEKYPTIYHLRKKLVDSTDKADLRLIYLALAHMIKFRGHFLIEGDLNPDNSDVDKLFIQLVQTYNQLFEENPINASGVDAKAILSARLSKSRRLENLIAQLPGEKKNGLFGNLIALSLGLTPNFKSNFDLAEDAKLQLSKDTYDDDLDNLLAQIGDQYADLFLAAKNLSDAILLSDILRVNTEITKAPLSASMIKRYDEHHQDLTLLKALVRQQLPEKYKEIFFDQSKNGYAGYIDGGASQEEFYKFIKPILEKMDGTEELLVKLNREDLLRKQRTFDNGSIPHQIHLGELHAILRRQEDFYPFLKDNREKIEKILTFRIPYYVGPLARGNSRFAWMTRKSEETITPWNFEEVVDKGASAQSFIERMTNFDKNLPNEKVLPKHSLLYEYFTVYNELTKVKYVTEGMRKPAFLSGEQKKAIVDLLFKTNRKVTVKQLKEDYFKKIECFDSVEISGVEDRFNASLGTYHDLLKIIKDKDFLDNEENEDILEDIVLTLTLFEDREMIEERLKTYAHLFDDKVMKQLKRRRYTGWGRLSRKLINGIRDKQSGKTILDFLKSDGFANRNFMQLIHDDSLTFKEDIQKAQVSGQGDSLHEHIANLAGSPAIKKGILQTVKVVDELVKVMGRHKPENIVIEMARENQTTQKGQKNSRERMKRIEEGIKELGSQILKEHPVENTQLQNEKLYLYYLQNGRDMYVDQELDINRLSDYDVDHIVPQSFLKDDSIDNKVLTRSDKARGKSDNVPSEEVVKKMKNYWRQLLNAKLITQRKFDNLTKAERGGLSELDKAGFIKRQLVETRQITKHVAQILDSRMNTKYDENDKLIREVKVITLKSKLVSDFRKDFQFYKVREINNYHHAHDAYLNAVVGTALIKKYPKLESEFVYGDYKVYDVRKMIAKSEQEIGKATAKYFFYSNIMNFFKTEITLANGEIRKRPLIETNGETGEIVWDKGRDFATVRKVLSMPQVNIVKKTEVQTGGFSKESILPKRNSDKLIARKKDWDPKKYGGFDSPTVAYSVLVVAKVEKGKSKKLKSVKELLGITIMERSSFEKNPIDFLEAKGYKEVKKDLIIKLPKYSLFELENGRKRMLASAGELQKGNELALPSKYVNFLYLASHYEKLKGSPEDNEQKQLFVEQHKHYLDEIIEQISEFSKRVILADANLDKVLSAYNKHRDKPIREQAENIIHLFTLTNLGAPAAFKYFDTTIDRKRYTSTKEVLDATLIHQSITGLYETRIDLSQLGGDGGPAPGGSEAAAKGGLLGRDLLTKLKAQIQFSTEGPQVTWEDRPAMCLVLNLEEEYRLHEKPVPPSIDPSWLQLFPMVWAEKAGMGLANQVPPVVVELKSDASPVAVRQYPMSKEAREGIRPHIQRFLDLGILVPCQSPWNTPLLPVKKPGTNDYRPVQDLREVNKRVQDIHPTVPNPYNLLSSLPPSHTWYSVLDLKDAFFCLKLHPNSQPLFAFEWRDPEKGNTGQLTWTRLPQGFKNSPTLFDEALHRDLASFRALNPQVVMLQYVDDLLVAAPTYRDCKEGTRRLLQELSKLGYRVSAKKAQLCREEVTYLGYLLKGGKRWLTPARKATVMKIPTPTTPRQVREFLGTAGFCRLWIPGFASLAAPLYPLTREKVPFTWTEAHQEAFGRIKEALLSAPALALPDLTKPFALYVDEKEGVARGVLTQTLGPWRRPVAYLSKKLDPVASGWPTCLKAIAAVALLLKDADKLTLGQNVLVIAPHNLESIVRQPPDRWMTNARMTHYQSLLLNERVSFAPPAILNPATLLPVESDDTPIHICSEILAEETGTRPDLRDQPLPGVPAWYTDGSSFIMDGRRQAGAAIVDNKRTVWASNLPEGTSAQKAELIALTQALRLAEGKSINIYTDSRYAFATAHVHGAIYKQRGLLTSAGKDIKNKEEILALLEAIHLPKRVAIIHCPGHQRGTDPVATGNRKADEAAKQAAQSTRILTETTKNAGKRTADGSEFEKRTADGSEFESPKKKAKVE

SEQ ID NO: 1615 - protein, 2134 aa, synthetic construct
MPAAKRVKLDGGDKKYSIGLDIGTNSVGWAVITDEYKVPSKKFKVLGNTDRHSIKKNLIGALLFDSGETAEATRLKRTARRRYTRRKNRICYLQEIFSNEMAKVDDSFFHRLEESFLVEEDKKHERHPIFGNIVDEVAYHEKYPTIYHLRKKLVDSTDKADLRLIYLALAHMIKFRGHFLIEGDLNPDNSDVDKLFIQLVQTYNQLFEENPINASGVDAKAILSARLSKSRRLENLIAQLPGEKKNGLFGNLIALSLGLTPNFKSNFDLAEDAKLQLSKDTYDDDLDNLLAQIGDQYADLFLAAKNLSDAILLSDILRVNTEITKAPLSASMIKRYDEHHQDLTLLKALVRQQLPEKYKEIFFDQSKNGYAGYIDGGASQEEFYKFIKPILEKMDGTEELLVKLNREDLLRKQRTFDNGSIPHQIHLGELHAILRRQEDFYPFLKDNREKIEKILTFRIPYYVGPLARGNSRFAWMTRKSEETITPWNFEEVVDKGASAQSFIERMTNFDKNLPNEKVLPKHSLLYEYFTVYNELTKVKYVTEGMRKPAFLSGEQKKAIVDLLFKTNRKVTVKQLKEDYFKKIECFDSVEISGVEDRFNASLGTYHDLLKIIKDKDFLDNEENEDILEDIVLTLTLFEDREMIEERLKTYAHLFDDKVMKQLKRRRYTGWGRLSRKLINGIRDKQSGKTILDFLKSDGFANRNFMQLIHDDSLTFKEDIQKAQVSGQGDSLHEHIANLAGSPAIKKGILQTVKVVDELVKVMGRHKPENIVIEMARENQTTQKGQKNSRERMKRIEEGIKELGSQILKEHPVENTQLQNEKLYLYYLQNGRDMYVDQELDINRLSDYDVDHIVPQSFLKDDSIDNKVLTRSDKARGKSDNVPSEEVVKKMKNYWRQLLNAKLITQRKFDNLTKAERGGLSELDKAGFIKRQLVETRQITKHVAQILDSRMNTKYDENDKLIREVKVITLKSKLVSDFRKDFQFYKVREINNYHHAHDAYLNAVVGTALIKKYPKLESEFVYGDYKVYDVRKMIAKSEQEIGKATAKYFFYSNIMNFFKTEITLANGEIRKRPLIETNGETGEIVWDKGRDFATVRKVLSMPQVNIVKKTEVQTGGFSKESILPKRNSDKLIARKKDWDPKKYGGFDSPTVAYSVLVVAKVEKGKSKKLKSVKELLGITIMERSSFEKNPIDFLEAKGYKEVKKDLIIKLPKYSLFELENGRKRMLASAGELQKGNELALPSKYVNFLYLASHYEKLKGSPEDNEQKQLFVEQHKHYLDEIIEQISEFSKRVILADANLDKVLSAYNKHRDKPIREQAENIIHLFTLTNLGAPAAFKYFDTTIDRKRYTSTKEVLDATLIHQSITGLYETRIDLSQLGGDGGGSSGSSGSSGSSGSSGSSGGLLGRDLLTKLKAQIQFSTEGPQVTWEDRPAMCLVLNLEEEYRLHEKPVPPSIDPSWLQLFPMVWAEKAGMGLANQVPPVVVELKSDASPVAVRQYPMSKEAREGIRPHIQRFLDLGILVPCQSPWNTPLLPVKKPGTNDYRPVQDLREVNKRVQDIHPTVPNPYNLLSSLPPSHTWYSVLDLKDAFFCLKLHPNSQPLFAFEWRDPEKGNTGQLTWTRLPQGFKNSPTLFDEALHRDLASFRALNPQVVMLQYVDDLLVAAPTYRDCKEGTRRLLQELSKLGYRVSAKKAQLCREEVTYLGYLLKGGKRWLTPARKATVMKIPTPTTPRQVREFLGTAGFCRLWIPGFASLAAPLYPLTREKVPFTWTEAHQEAFGRIKEALLSAPALALPDLTKPFALYVDEKEGVARGVLTQTLGPWRRPVAYLSKKLDPVASGWPTCLKAIAAVALLLKDADKLTLGQNVLVIAPHNLESIVRQPPDRWMTNARMTHYQSLLLNERVSFAPPAILNPATLLPVESDDTPIHICSEILAEETGTRPDLRDQPLPGVPAWYTDGSSFIMDGRRQAGAAIVDNKRTVWASNLPEGTSAQKAELIALTQALRLAEGKSINIYTDSRYAFATAHVHGAIYKQRGLLTSAGKDIKNKEEILALLEAIHLPKRVAIIHCPGHQRGTDPVATGNRKADEAAKQAAQSTRILTETTKNAGKRTADGSEFEKRTADGSEFESPKKKAKVE

SEQ ID NO: 1616 - protein, 2123 aa, synthetic construct
MPAAKRVKLDGGDKKYSIGLDIGTNSVGWAVITDEYKVPSKKFKVLGNTDRHSIKKNLIGALLFDSGETAEATRLKRTARRRYTRRKNRICYLQEIFSNEMAKVDDSFFHRLEESFLVEEDKKHERHPIFGNIVDEVAYHEKYPTIYHLRKKLVDSTDKADLRLIYLALAHMIKFRGHFLIEGDLNPDNSDVDKLFIQLVQTYNQLFEENPINASGVDAKAILSARLSKSRRLENLIAQLPGEKKNGLFGNLIALSLGLTPNFKSNFDLAEDAKLQLSKDTYDDDLDNLLAQIGDQYADLFLAAKNLSDAILLSDILRVNTEITKAPLSASMIKRYDEHHQDLTLLKALVRQQLPEKYKEIFFDQSKNGYAGYIDGGASQEEFYKFIKPILEKMDGTEELLVKLNREDLLRKQRTFDNGSIPHQIHLGELHAILRRQEDFYPFLKDNREKIEKILTFRIPYYVGPLARGNSRFAWMTRKSEETITPWNFEEVVDKGASAQSFIERMTNFDKNLPNEKVLPKHSLLYEYFTVYNELTKVKYVTEGMRKPAFLSGEQKKAIVDLLFKTNRKVTVKQLKEDYFKKIECFDSVEISGVEDRFNASLGTYHDLLKIIKDKDFLDNEENEDILEDIVLTLTLFEDREMIEERLKTYAHLFDDKVMKQLKRRRYTGWGRLSRKLINGIRDKQSGKTILDFLKSDGFANRNFMQLIHDDSLTFKEDIQKAQVSGQGDSLHEHIANLAGSPAIKKGILQTVKVVDELVKVMGRHKPENIVIEMARENQTTQKGQKNSRERMKRIEEGIKELGSQILKEHPVENTQLQNEKLYLYYLQNGRDMYVDQELDINRLSDYDVDHIVPQSFLKDDSIDNKVLTRSDKARGKSDNVPSEEVVKKMKNYWRQLLNAKLITQRKFDNLTKAERGGLSELDKAGFIKRQLVETRQITKHVAQILDSRMNTKYDENDKLIREVKVITLKSKLVSDFRKDFQFYKVREINNYHHAHDAYLNAVVGTALIKKYPKLESEFVYGDYKVYDVRKMIAKSEQEIGKATAKYFFYSNIMNFFKTEITLANGEIRKRPLIETNGETGEIVWDKGRDFATVRKVLSMPQVNIVKKTEVQTGGFSKESILPKRNSDKLIARKKDWDPKKYGGFDSPTVAYSVLVVAKVEKGKSKKLKSVKELLGITIMERSSFEKNPIDFLEAKGYKEVKKDLIIKLPKYSLFELENGRKRMLASAGELQKGNELALPSKYVNFLYLASHYEKLKGSPEDNEQKQLFVEQHKHYLDEIIEQISEFSKRVILADANLDKVLSAYNKHRDKPIREQAENIIHLFTLTNLGAPAAFKYFDTTIDRKRYTSTKEVLDATLIHQSITGLYETRIDLSQLGGDGGPAPAPAPGGLLGRDLLTKLKAQIQFSTEGPQVTWEDRPAMCLVLNLEEEYRLHEKPVPPSIDPSWLQLFPMVWAEKAGMGLANQVPPVVVELKSDASPVAVRQYPMSKEAREGIRPHIQRFLDLGILVPCQSPWNTPLLPVKKPGTNDYRPVQDLREVNKRVQDIHPTVPNPYNLLSSLPPSHTWYSVLDLKDAFFCLKLHPNSQPLFAFEWRDPEKGNTGQLTWTRLPQGFKNSPTLFNEALHRDLASFRALNPQVVMLQYVDDLLVAAPTYRDCKEGTRRLLQELSKLGYRVSAKKAQLCREEVTYLGYLLKGGKRWLTPARKATVMKIPTPTTPRQVREFLGTAGFCRLWIPGFASLAAPLYPLTRPKVPFTWTEAHQEAFGRIKEALLSAPALALPDLTKPFALYVDEKEGVARGVLTQTLGPWRRPVAYLSKKLDPVASGWPTCLKAIAAVALLLKDADKLTLGQNVLVIAPHNLESIVRQPPDRWMTNARMTHYQSLLLNERVSFAPPAILNPATLLPVESDDTPIHICSEILAEETGTRPDLRDQPLPGVPAWYTDGSSFIMDGRRQAGAAIVDNKRTVWASNLPEGTSAQKAELIALTQALRLAEGKSINIYTDSRYAFATAHVHGAIYKQRGWLTSAGKDIKNKEEILALLEAIHLPKRVAIIHCPGHQRGTDPVATGNRKADEAAKQAAQSTRILTETTKNAGKRTADGSEFEKRTADGSEFESPKKKAKVE

SEQ ID NO: 1617 - protein, 2131 aa, synthetic construct
MPAAKRVKLDGGDKKYSIGLDIGTNSVGWAVITDEYKVPSKKFKVLGNTDRHSIKKNLIGALLFDSGETAEATRLKRTARRRYTRRKNRICYLQEIFSNEMAKVDDSFFHRLEESFLVEEDKKHERHPIFGNIVDEVAYHEKYPTIYHLRKKLVDSTDKADLRLIYLALAHMIKFRGHFLIEGDLNPDNSDVDKLFIQLVQTYNQLFEENPINASGVDAKAILSARLSKSRRLENLIAQLPGEKKNGLFGNLIALSLGLTPNFKSNFDLAEDAKLQLSKDTYDDDLDNLLAQIGDQYADLFLAAKNLSDAILLSDILRVNTEITKAPLSASMIKRYDEHHQDLTLLKALVRQQLPEKYKEIFFDQSKNGYAGYIDGGASQEEFYKFIKPILEKMDGTEELLVKLNREDLLRKQRTFDNGSIPHQIHLGELHAILRRQEDFYPFLKDNREKIEKILTFRIPYYVGPLARGNSRFAWMTRKSEETITPWNFEEVVDKGASAQSFIERMTNFDKNLPNEKVLPKHSLLYEYFTVYNELTKVKYVTEGMRKPAFLSGEQKKAIVDLLFKTNRKVTVKQLKEDYFKKIECFDSVEISGVEDRFNASLGTYHDLLKIIKDKDFLDNEENEDILEDIVLTLTLFEDREMIEERLKTYAHLFDDKVMKQLKRRRYTGWGRLSRKLINGIRDKQSGKTILDFLKSDGFANRNFMQLIHDDSLTFKEDIQKAQVSGQGDSLHEHIANLAGSPAIKKGILQTVKVVDELVKVMGRHKPENIVIEMARENQTTQKGQKNSRERMKRIEEGIKELGSQILKEHPVENTQLQNEKLYLYYLQNGRDMYVDQELDINRLSDYDVDHIVPQSFLKDDSIDNKVLTRSDKARGKSDNVPSEEVVKKMKNYWRQLLNAKLITQRKFDNLTKAERGGLSELDKAGFIKRQLVETRQITKHVAQILDSRMNTKYDENDKLIREVKVITLKSKLVSDFRKDFQFYKVREINNYHHAHDAYLNAVVGTALIKKYPKLESEFVYGDYKVYDVRKMIAKSEQEIGKATAKYFFYSNIMNFFKTEITLANGEIRKRPLIETNGETGEIVWDKGRDFATVRKVLSMPQVNIVKKTEVQTGGFSKESILPKRNSDKLIARKKDWDPKKYGGFDSPTVAYSVLVVAKVEKGKSKKLKSVKELLGITIMERSSFEKNPIDFLEAKGYKEVKKDLIIKLPKYSLFELENGRKRMLASAGELQKGNELALPSKYVNFLYLASHYEKLKGSPEDNEQKQLFVEQHKHYLDEIIEQISEFSKRVILADANLDKVLSAYNKHRDKPIREQAENIIHLFTLTNLGAPAAFKYFDTTIDRKRYTSTKEVLDATLIHQSITGLYETRIDLSQLGGDGGGSSGSSGSSGSSGSSGGLLGRDLLTKLKAQIQFSTEGPQVTWEDRPAMCLVLNLEEEYRLHEKPVPPSIDPSWLQLFPMVWAEKAGMGLANQVPPVVVELKSDASPVAVRQYPMSKEAREGIRPHIQRFLDLGILVPCQSPWNTPLLPVKKPGTNDYRPVQDLREVNKRVQDIHPTVPNPYNLLSSLPPSHTWYSVLDLKDAFFCLKLHPNSQPLFAFEWRDPEKGNTGQLTWTRLPQGFKNSPTLFNEALHRDLASFRALNPQVVMLQYVDDLLVAAPTYRDCKEGTRRLLQELSKLGYRVSAKKAQLCREEVTYLGYLLKGGKRWLTPARKATVMKIPTPTTPRQVREFLGTAGFCRLWIPGFASLAAPLYPLTRPKVPFTWTEAHQEAFGRIKEALLSAPALALPDLTKPFALYVDEKEGVARGVLTQTLGPWRRPVAYLSKKLDPVASGWPTCLKAIAAVALLLKDADKLTLGQNVLVIAPHNLESIVRQPPDRWMTNARMTHYQSLLLNERVSFAPPAILNPATLLPVESDDTPIHICSEILAEETGTRPDLRDQPLPGVPAWYTDGSSFIMDGRRQAGAAIVDNKRTVWASNLPEGTSAQKAELIALTQALRLAEGKSINIYTDSRYAFATAHVHGAIYKQRGWLTSAGKDIKNKEEILALLEAIHLPKRVAIIHCPGHQRGTDPVATGNRKADEAAKQAAQSTRILTETTKNAGKRTADGSEFEKRTADGSEFESPKKKAKVE

SEQ ID NO: 1618 - protein, 2127 aa, synthetic construct
MPAAKRVKLDGGDKKYSIGLDIGTNSVGWAVITDEYKVPSKKFKVLGNTDRHSIKKNLIGALLFDSGETAEATRLKRTARRRYTRRKNRICYLQEIFSNEMAKVDDSFFHRLEESFLVEEDKKHERHPIFGNIVDEVAYHEKYPTIYHLRKKLVDSTDKADLRLIYLALAHMIKFRGHFLIEGDLNPDNSDVDKLFIQLVQTYNQLFEENPINASGVDAKAILSARLSKSRRLENLIAQLPGEKKNGLFGNLIALSLGLTPNFKSNFDLAEDAKLQLSKDTYDDDLDNLLAQIGDQYADLFLAAKNLSDAILLSDILRVNTEITKAPLSASMIKRYDEHHQDLTLLKALVRQQLPEKYKEIFFDQSKNGYAGYIDGGASQEEFYKFIKPILEKMDGTEELLVKLNREDLLRKQRTFDNGSIPHQIHLGELHAILRRQEDFYPFLKDNREKIEKILTFRIPYYVGPLARGNSRFAWMTRKSEETITPWNFEEVVDKGASAQSFIERMTNFDKNLPNEKVLPKHSLLYEYFTVYNELTKVKYVTEGMRKPAFLSGEQKKAIVDLLFKTNRKVTVKQLKEDYFKKIECFDSVEISGVEDRFNASLGTYHDLLKIIKDKDFLDNEENEDILEDIVLTLTLFEDREMIEERLKTYAHLFDDKVMKQLKRRRYTGWGRLSRKLINGIRDKQSGKTILDFLKSDGFANRNFMQLIHDDSLTFKEDIQKAQVSGQGDSLHEHIANLAGSPAIKKGILQTVKVVDELVKVMGRHKPENIVIEMARENQTTQKGQKNSRERMKRIEEGIKELGSQILKEHPVENTQLQNEKLYLYYLQNGRDMYVDQELDINRLSDYDVDHIVPQSFLKDDSIDNKVLTRSDKARGKSDNVPSEEVVKKMKNYWRQLLNAKLITQRKFDNLTKAERGGLSELDKAGFIKRQLVETRQITKHVAQILDSRMNTKYDENDKLIREVKVITLKSKLVSDFRKDFQFYKVREINNYHHAHDAYLNAVVGTALIKKYPKLESEFVYGDYKVYDVRKMIAKSEQEIGKATAKYFFYSNIMNFFKTEITLANGEIRKRPLIETNGETGEIVWDKGRDFATVRKVLSMPQVNIVKKTEVQTGGFSKESILPKRNSDKLIARKKDWDPKKYGGFDSPTVAYSVLVVAKVEKGKSKKLKSVKELLGITIMERSSFEKNPIDFLEAKGYKEVKKDLIIKLPKYSLFELENGRKRMLASAGELQKGNELALPSKYVNFLYLASHYEKLKGSPEDNEQKQLFVEQHKHYLDEIIEQISEFSKRVILADANLDKVLSAYNKHRDKPIREQAENIIHLFTLTNLGAPAAFKYFDTTIDRKRYTSTKEVLDATLIHQSITGLYETRIDLSQLGGDGGEAAAKPAPGSSGGLLGRDLLTKLKAQIQFSTEGPQVTWEDRPAMCLVLNLEEEYRLHEKPVPPSIDPSWLQLFPMVWAEKAGMGLANQVPPVVVELKSDASPVAVRQYPMSKEAREGIRPHIQRFLDLGILVPCQSPWNTPLLPVKKPGTNDYRPVQDLREVNKRVQDIHPTVPNPYNLLSSLPPSHTWYSVLDLKDAFFCLKLHPNSQPLFAFEWRDPEKGNTGQLTWTRLPQGFKNSPTLFNEALHRDLASFRALNPQVVMLQYVDDLLVAAPTYRDCKEGTRRLLQELSKLGYRVSAKKAQLCREEVTYLGYLLKGGKRWLTPARKATVMKIPTPTTPRQVREFLGTAGFCRLWIPGFASLAAPLYPLTRPKVPFTWTEAHQEAFGRIKEALLSAPALALPDLTKPFALYVDEKEGVARGVLTQTLGPWRRPVAYLSKKLDPVASGWPTCLKAIAAVALLLKDADKLTLGQNVLVIAPHNLESIVRQPPDRWMTNARMTHYQSLLLNERVSFAPPAILNPATLLPVESDDTPIHICSEILAEETGTRPDLRDQPLPGVPAWYTDGSSFIMDGRRQAGAAIVDNKRTVWASNLPEGTSAQKAELIALTQALRLAEGKSINIYTDSRYAFATAHVHGAIYKQRGWLTSAGKDIKNKEEILALLEAIHLPKRVAIIHCPGHQRGTDPVATGNRKADEAAKQAAQSTRILTETTKNAGKRTADGSEFEKRTADGSEFESPKKKAKVE

SEQ ID NO: 1619 - protein, 2127 aa, synthetic construct
MPAAKRVKLDGGDKKYSIGLDIGTNSVGWAVITDEYKVPSKKFKVLGNTDRHSIKKNLIGALLFDSGETAEATRLKRTARRRYTRRKNRICYLQEIFSNEMAKVDDSFFHRLEESFLVEEDKKHERHPIFGNIVDEVAYHEKYPTIYHLRKKLVDSTDKADLRLIYLALAHMIKFRGHFLIEGDLNPDNSDVDKLFIQLVQTYNQLFEENPINASGVDAKAILSARLSKSRRLENLIAQLPGEKKNGLFGNLIALSLGLTPNFKSNFDLAEDAKLQLSKDTYDDDLDNLLAQIGDQYADLFLAAKNLSDAILLSDILRVNTEITKAPLSASMIKRYDEHHQDLTLLKALVRQQLPEKYKEIFFDQSKNGYAGYIDGGASQEEFYKFIKPILEKMDGTEELLVKLNREDLLRKQRTFDNGSIPHQIHLGELHAILRRQEDFYPFLKDNREKIEKILTFRIPYYVGPLARGNSRFAWMTRKSEETITPWNFEEVVDKGASAQSFIERMTNFDKNLPNEKVLPKHSLLYEYFTVYNELTKVKYVTEGMRKPAFLSGEQKKAIVDLLFKTNRKVTVKQLKEDYFKKIECFDSVEISGVEDRFNASLGTYHDLLKIIKDKDFLDNEENEDILEDIVLTLTLFEDREMIEERLKTYAHLFDDKVMKQLKRRRYTGWGRLSRKLINGIRDKQSGKTILDFLKSDGFANRNFMQLIHDDSLTFKEDIQKAQVSGQGDSLHEHIANLAGSPAIKKGILQTVKVVDELVKVMGRHKPENIVIEMARENQTTQKGQKNSRERMKRIEEGIKELGSQILKEHPVENTQLQNEKLYLYYLQNGRDMYVDQELDINRLSDYDVDHIVPQSFLKDDSIDNKVLTRSDKARGKSDNVPSEEVVKKMKNYWRQLLNAKLITQRKFDNLTKAERGGLSELDKAGFIKRQLVETRQITKHVAQILDSRMNTKYDENDKLIREVKVITLKSKLVSDFRKDFQFYKVREINNYHHAHDAYLNAVVGTALIKKYPKLESEFVYGDYKVYDVRKMIAKSEQEIGKATAKYFFYSNIMNFFKTEITLANGEIRKRPLIETNGETGEIVWDKGRDFATVRKVLSMPQVNIVKKTEVQTGGFSKESILPKRNSDKLIARKKDWDPKKYGGFDSPTVAYSVLVVAKVEKGKSKKLKSVKELLGITIMERSSFEKNPIDFLEAKGYKEVKKDLIIKLPKYSLFELENGRKRMLASAGELQKGNELALPSKYVNFLYLASHYEKLKGSPEDNEQKQLFVEQHKHYLDEIIEQISEFSKRVILADANLDKVLSAYNKHRDKPIREQAENIIHLFTLTNLGAPAAFKYFDTTIDRKRYTSTKEVLDATLIHQSITGLYETRIDLSQLGGDGGPAPAPAPAPAPGGLLGRDLLTKLKAQIQFSTEGPQVTWEDRPAMCLVLNLEEEYRLHEKPVPPSIDPSWLQLFPMVWAEKAGMGLANQVPPVVVELKSDASPVAVRQYPMSKEAREGIRPHIQRFLDLGILVPCQSPWNTPLLPVKKPGTNDYRPVQDLREVNKRVQDIHPTVPNPYNLLSSLPPSHTWYSVLDLKDAFFCLKLHPNSQPLFAFEWRDPEKGNTGQLTWTRLPQGFKNSPTLFNEALHRDLASFRALNPQVVMLQYVDDLLVAAPTYRDCKEGTRRLLQELSKLGYRVSAKKAQLCREEVTYLGYLLKGGKRWLTPARKATVMKIPTPTTPRQVREFLGTAGFCRLWIPGFASLAAPLYPLTRPKVPFTWTEAHQEAFGRIKEALLSAPALALPDLTKPFALYVDEKEGVARGVLTQTLGPWRRPVAYLSKKLDPVASGWPTCLKAIAAVALLLKDADKLTLGQNVLVIAPHNLESIVRQPPDRWMTNARMTHYQSLLLNERVSFAPPAILNPATLLPVESDDTPIHICSEILAEETGTRPDLRDQPLPGVPAWYTDGSSFIMDGRRQAGAAIVDNKRTVWASNLPEGTSAQKAELIALTQALRLAEGKSINIYTDSRYAFATAHVHGAIYKQRGWLTSAGKDIKNKEEILALLEAIHLPKRVAIIHCPGHQRGTDPVATGNRKADEAAKQAAQSTRILTETTKNAGKRTADGSEFEKRTADGSEFESPKKKAKVE

SEQ ID NO: 1620 - protein, 2127 aa, synthetic construct
MPAAKRVKLDGGDKKYSIGLDIGTNSVGWAVITDEYKVPSKKFKVLGNTDRHSIKKNLIGALLFDSGETAEATRLKRTARRRYTRRKNRICYLQEIFSNEMAKVDDSFFHRLEESFLVEEDKKHERHPIFGNIVDEVAYHEKYPTIYHLRKKLVDSTDKADLRLIYLALAHMIKFRGHFLIEGDLNPDNSDVDKLFIQLVQTYNQLFEENPINASGVDAKAILSARLSKSRRLENLIAQLPGEKKNGLFGNLIALSLGLTPNFKSNFDLAEDAKLQLSKDTYDDDLDNLLAQIGDQYADLFLAAKNLSDAILLSDILRVNTEITKAPLSASMIKRYDEHHQDLTLLKALVRQQLPEKYKEIFFDQSKNGYAGYIDGGASQEEFYKFIKPILEKMDGTEELLVKLNREDLLRKQRTFDNGSIPHQIHLGELHAILRRQEDFYPFLKDNREKIEKILTFRIPYYVGPLARGNSRFAWMTRKSEETITPWNFEEVVDKGASAQSFIERMTNFDKNLPNEKVLPKHSLLYEYFTVYNELTKVKYVTEGMRKPAFLSGEQKKAIVDLLFKTNRKVTVKQLKEDYFKKIECFDSVEISGVEDRFNASLGTYHDLLKIIKDKDFLDNEENEDILEDIVLTLTLFEDREMIEERLKTYAHLFDDKVMKQLKRRRYTGWGRLSRKLINGIRDKQSGKTILDFLKSDGFANRNFMQLIHDDSLTFKEDIQKAQVSGQGDSLHEHIANLAGSPAIKKGILQTVKVVDELVKVMGRHKPENIVIEMARENQTTQKGQKNSRERMKRIEEGIKELGSQILKEHPVENTQLQNEKLYLYYLQNGRDMYVDQELDINRLSDYDVDHIVPQSFLKDDSIDNKVLTRSDKARGKSDNVPSEEVVKKMKNYWRQLLNAKLITQRKFDNLTKAERGGLSELDKAGFIKRQLVETRQITKHVAQILDSRMNTKYDENDKLIREVKVITLKSKLVSDFRKDFQFYKVREINNYHHAHDAYLNAVVGTALIKKYPKLESEFVYGDYKVYDVRKMIAKSEQEIGKATAKYFFYSNIMNFFKTEITLANGEIRKRPLIETNGETGEIVWDKGRDFATVRKVLSMPQVNIVKKTEVQTGGFSKESILPKRNSDKLIARKKDWDPKKYGGFDSPTVAYSVLVVAKVEKGKSKKLKSVKELLGITIMERSSFEKNPIDFLEAKGYKEVKKDLIIKLPKYSLFELENGRKRMLASAGELQKGNELALPSKYVNFLYLASHYEKLKGSPEDNEQKQLFVEQHKHYLDEIIEQISEFSKRVILADANLDKVLSAYNKHRDKPIREQAENIIHLFTLTNLGAPAAFKYFDTTIDRKRYTSTKEVLDATLIHQSITGLYETRIDLSQLGGDGGGGSPAPEAAAKGGLLGRDLLTKLKAQIQFSTEGPQVTWEDRPAMCLVLNLEEEYRLHEKPVPPSIDPSWLQLFPMVWAEKAGMGLANQVPPVVVELKSDASPVAVRQYPMSKEAREGIRPHIQRFLDLGILVPCQSPWNTPLLPVKKPGTNDYRPVQDLREVNKRVQDIHPTVPNPYNLLSSLPPSHTWYSVLDLKDAFFCLKLHPNSQPLFAFEWRDPEKGNTGQLTWTRLPQGFKNSPTLFNEALHRDLASFRALNPQVVMLQYVDDLLVAAPTYRDCKEGTRRLLQELSKLGYRVSAKKAQLCREEVTYLGYLLKGGKRWLTPARKATVMKIPTPTTPRQVREFLGTAGFCRLWIPGFASLAAPLYPLTRPKVPFTWTEAHQEAFGRIKEALLSAPALALPDLTKPFALYVDEKEGVARGVLTQTLGPWRRPVAYLSKKLDPVASGWPTCLKAIAAVALLLKDADKLTLGQNVLVIAPHNLESIVRQPPDRWMTNARMTHYQSLLLNERVSFAPPAILNPATLLPVESDDTPIHICSEILAEETGTRPDLRDQPLPGVPAWYTDGSSFIMDGRRQAGAAIVDNKRTVWASNLPEGTSAQKAELIALTQALRLAEGKSINIYTDSRYAFATAHVHGAIYKQRGWLTSAGKDIKNKEEILALLEAIHLPKRVAIIHCPGHQRGTDPVATGNRKADEAAKQAAQSTRILTETTKNAGKRTADGSEFEKRTADGSEFESPKKKAKVE

SEQ ID NO: 1621 - protein, 2146 aa, synthetic construct
MPAAKRVKLDGGDKKYSIGLDIGTNSVGWAVITDEYKVPSKKFKVLGNTDRHSIKKNLIGALLFDSGETAEATRLKRTARRRYTRRKNRICYLQEIFSNEMAKVDDSFFHRLEESFLVEEDKKHERHPIFGNIVDEVAYHEKYPTIYHLRKKLVDSTDKADLRLIYLALAHMIKFRGHFLIEGDLNPDNSDVDKLFIQLVQTYNQLFEENPINASGVDAKAILSARLSKSRRLENLIAQLPGEKKNGLFGNLIALSLGLTPNFKSNFDLAEDAKLQLSKDTYDDDLDNLLAQIGDQYADLFLAAKNLSDAILLSDILRVNTEITKAPLSASMIKRYDEHHQDLTLLKALVRQQLPEKYKEIFFDQSKNGYAGYIDGGASQEEFYKFIKPILEKMDGTEELLVKLNREDLLRKQRTFDNGSIPHQIHLGELHAILRRQEDFYPFLKDNREKIEKILTFRIPYYVGPLARGNSRFAWMTRKSEETITPWNFEEVVDKGASAQSFIERMTNFDKNLPNEKVLPKHSLLYEYFTVYNELTKVKYVTEGMRKPAFLSGEQKKAIVDLLFKTNRKVTVKQLKEDYFKKIECFDSVEISGVEDRFNASLGTYHDLLKIIKDKDFLDNEENEDILEDIVLTLTLFEDREMIEERLKTYAHLFDDKVMKQLKRRRYTGWGRLSRKLINGIRDKQSGKTILDFLKSDGFANRNFMQLIHDDSLTFKEDIQKAQVSGQGDSLHEHIANLAGSPAIKKGILQTVKVVDELVKVMGRHKPENIVIEMARENQTTQKGQKNSRERMKRIEEGIKELGSQILKEHPVENTQLQNEKLYLYYLQNGRDMYVDQELDINRLSDYDVDHIVPQSFLKDDSIDNKVLTRSDKARGKSDNVPSEEVVKKMKNYWRQLLNAKLITQRKFDNLTKAERGGLSELDKAGFIKRQLVETRQITKHVAQILDSRMNTKYDENDKLIREVKVITLKSKLVSDFRKDFQFYKVREINNYHHAHDAYLNAVVGTALIKKYPKLESEFVYGDYKVYDVRKMIAKSEQEIGKATAKYFFYSNIMNFFKTEITLANGEIRKRPLIETNGETGEIVWDKGRDFATVRKVLSMPQVNIVKKTEVQTGGFSKESILPKRNSDKLIARKKDWDPKKYGGFDSPTVAYSVLVVAKVEKGKSKKLKSVKELLGITIMERSSFEKNPIDFLEAKGYKEVKKDLIIKLPKYSLFELENGRKRMLASAGELQKGNELALPSKYVNFLYLASHYEKLKGSPEDNEQKQLFVEQHKHYLDEIIEQISEFSKRVILADANLDKVLSAYNKHRDKPIREQAENIIHLFTLTNLGAPAAFKYFDTTIDRKRYTSTKEVLDATLIHQSITGLYETRIDLSQLGGDGGEAAAKEAAAKEAAAKEAAAKEAAAKEAAAKGGLLGRDLLTKLKAQIQFSTEGPQVTWEDRPAMCLVLNLEEEYRLHEKPVPPSIDPSWLQLFPMVWAEKAGMGLANQVPPVVVELKSDASPVAVRQYPMSKEAREGIRPHIQRFLDLGILVPCQSPWNTPLLPVKKPGTNDYRPVQDLREVNKRVQDIHPTVPNPYNLLSSLPPSHTWYSVLDLKDAFFCLKLHPNSQPLFAFEWRDPEKGNTGQLTWTRLPQGFKNSPTLFNEALHRDLASFRALNPQVVMLQYVDDLLVAAPTYRDCKEGTRRLLQELSKLGYRVSAKKAQLCREEVTYLGYLLKGGKRWLTPARKATVMKIPTPTTPRQVREFLGTAGFCRLWIPGFASLAAPLYPLTRPKVPFTWTEAHQEAFGRIKEALLSAPALALPDLTKPFALYVDEKEGVARGVLTQTLGPWRRPVAYLSKKLDPVASGWPTCLKAIAAVALLLKDADKLTLGQNVLVIAPHNLESIVRQPPDRWMTNARMTHYQSLLLNERVSFAPPAILNPATLLPVESDDTPIHICSEILAEETGTRPDLRDQPLPGVPAWYTDGSSFIMDGRRQAGAAIVDNKRTVWASNLPEGTSAQKAELIALTQALRLAEGKSINIYTDSRYAFATAHVHGAIYKQRGWLTSAGKDIKNKEEILALLEAIHLPKRVAIIHCPGHQRGTDPVATGNRKADEAAKQAAQSTRILTETTKNAGKRTADGSEFEKRTADGSEFESPKKKAKVE

SEQ ID NO: 1622 - protein, 2162 aa, synthetic construct
MPAAKRVKLDGGDKKYSIGLDIGTNSVGWAVITDEYKVPSKKFKVLGNTDRHSIKKNLIGALLFDSGETAEATRLKRTARRRYTRRKNRICYLQEIFSNEMAKVDDSFFHRLEESFLVEEDKKHERHPIFGNIVDEVAYHEKYPTIYHLRKKLVDSTDKADLRLIYLALAHMIKFRGHFLIEGDLNPDNSDVDKLFIQLVQTYNQLFEENPINASGVDAKAILSARLSKSRRLENLIAQLPGEKKNGLFGNLIALSLGLTPNFKSNFDLAEDAKLQLSKDTYDDDLDNLLAQIGDQYADLFLAAKNLSDAILLSDILRVNTEITKAPLSASMIKRYDEHHQDLTLLKALVRQQLPEKYKEIFFDQSKNGYAGYIDGGASQEEFYKFIKPILEKMDGTEELLVKLNREDLLRKQRTFDNGSIPHQIHLGELHAILRRQEDFYPFLKDNREKIEKILTFRIPYYVGPLARGNSRFAWMTRKSEETITPWNFEEVVDKGASAQSFIERMTNFDKNLPNEKVLPKHSLLYEYFTVYNELTKVKYVTEGMRKPAFLSGEQKKAIVDLLFKTNRKVTVKQLKEDYFKKIECFDSVEISGVEDRFNASLGTYHDLLKIIKDKDFLDNEENEDILEDIVLTLTLFEDREMIEERLKTYAHLFDDKVMKQLKRRRYTGWGRLSRKLINGIRDKQSGKTILDFLKSDGFANRNFMQLIHDDSLTFKEDIQKAQVSGQGDSLHEHIANLAGSPAIKKGILQTVKVVDELVKVMGRHKPENIVIEMARENQTTQKGQKNSRERMKRIEEGIKELGSQILKEHPVENTQLQNEKLYLYYLQNGRDMYVDQELDINRLSDYDVDHIVPQSFLKDDSIDNKVLTRSDKARGKSDNVPSEEVVKKMKNYWRQLLNAKLITQRKFDNLTKAERGGLSELDKAGFIKRQLVETRQITKHVAQILDSRMNTKYDENDKLIREVKVITLKSKLVSDFRKDFQFYKVREINNYHHAHDAYLNAVVGTALIKKYPKLESEFVYGDYKVYDVRKMIAKSEQEIGKATAKYFFYSNIMNFFKTEITLANGEIRKRPLIETNGETGEIVWDKGRDFATVRKVLSMPQVNIVKKTEVQTGGFSKESILPKRNSDKLIARKKDWDPKKYGGFDSPTVAYSVLVVAKVEKGKSKKLKSVKELLGITIMERSSFEKNPIDFLEAKGYKEVKKDLIIKLPKYSLFELENGRKRMLASAGELQKGNELALPSKYVNFLYLASHYEKLKGSPEDNEQKQLFVEQHKHYLDEIIEQISEFSKRVILADANLDKVLSAYNKHRDKPIREQAENIIHLFTLTNLGAPAAFKYFDTTIDRKRYTSTKEVLDATLIHQSITGLYETRIDLSQLGGDGGAEAAAKEAAAKEAAAKEAAAKALEAEAAAKEAAAKEAAAKEAAAKAGGLLGRDLLTKLKAQIQFSTEGPQVTWEDRPAMCLVLNLEEEYRLHEKPVPPSIDPSWLQLFPMVWAEKAGMGLANQVPPVVVELKSDASPVAVRQYPMSKEAREGIRPHIQRFLDLGILVPCQSPWNTPLLPVKKPGTNDYRPVQDLREVNKRVQDIHPTVPNPYNLLSSLPPSHTWYSVLDLKDAFFCLKLHPNSQPLFAFEWRDPEKGNTGQLTWTRLPQGFKNSPTLFNEALHRDLASFRALNPQVVMLQYVDDLLVAAPTYRDCKEGTRRLLQELSKLGYRVSAKKAQLCREEVTYLGYLLKGGKRWLTPARKATVMKIPTPTTPRQVREFLGTAGFCRLWIPGFASLAAPLYPLTRPKVPFTWTEAHQEAFGRIKEALLSAPALALPDLTKPFALYVDEKEGVARGVLTQTLGPWRRPVAYLSKKLDPVASGWPTCLKAIAAVALLLKDADKLTLGQNVLVIAPHNLESIVRQPPDRWMTNARMTHYQSLLLNERVSFAPPAILNPATLLPVESDDTPIHICSEILAEETGTRPDLRDQPLPGVPAWYTDGSSFIMDGRRQAGAAIVDNKRTVWASNLPEGTSAQKAELIALTQALRLAEGKSINIYTDSRYAFATAHVHGAIYKQRGWLTSAGKDIKNKEEILALLEAIHLPKRVAIIHCPGHQRGTDPVATGNRKADEAAKQAAQSTRILTETTKNAGKRTADGSEFEKRTADGSEFESPKKKAKVE

SEQ ID NO: 1623 - protein, 2127 aa, synthetic construct
MPAAKRVKLDGGDKKYSIGLDIGTNSVGWAVITDEYKVPSKKFKVLGNTDRHSIKKNLIGALLFDSGETAEATRLKRTARRRYTRRKNRICYLQEIFSNEMAKVDDSFFHRLEESFLVEEDKKHERHPIFGNIVDEVAYHEKYPTIYHLRKKLVDSTDKADLRLIYLALAHMIKFRGHFLIEGDLNPDNSDVDKLFIQLVQTYNQLFEENPINASGVDAKAILSARLSKSRRLENLIAQLPGEKKNGLFGNLIALSLGLTPNFKSNFDLAEDAKLQLSKDTYDDDLDNLLAQIGDQYADLFLAAKNLSDAILLSDILRVNTEITKAPLSASMIKRYDEHHQDLTLLKALVRQQLPEKYKEIFFDQSKNGYAGYIDGGASQEEFYKFIKPILEKMDGTEELLVKLNREDLLRKQRTFDNGSIPHQIHLGELHAILRRQEDFYPFLKDNREKIEKILTFRIPYYVGPLARGNSRFAWMTRKSEETITPWNFEEVVDKGASAQSFIERMTNFDKNLPNEKVLPKHSLLYEYFTVYNELTKVKYVTEGMRKPAFLSGEQKKAIVDLLFKTNRKVTVKQLKEDYFKKIECFDSVEISGVEDRFNASLGTYHDLLKIIKDKDFLDNEENEDILEDIVLTLTLFEDREMIEERLKTYAHLFDDKVMKQLKRRRYTGWGRLSRKLINGIRDKQSGKTILDFLKSDGFANRNFMQLIHDDSLTFKEDIQKAQVSGQGDSLHEHIANLAGSPAIKKGILQTVKVVDELVKVMGRHKPENIVIEMARENQTTQKGQKNSRERMKRIEEGIKELGSQILKEHPVENTQLQNEKLYLYYLQNGRDMYVDQELDINRLSDYDVDHIVPQSFLKDDSIDNKVLTRSDKARGKSDNVPSEEVVKKMKNYWRQLLNAKLITQRKFDNLTKAERGGLSELDKAGFIKRQLVETRQITKHVAQILDSRMNTKYDENDKLIREVKVITLKSKLVSDFRKDFQFYKVREINNYHHAHDAYLNAVVGTALIKKYPKLESEFVYGDYKVYDVRKMIAKSEQEIGKATAKYFFYSNIMNFFKTEITLANGEIRKRPLIETNGETGEIVWDKGRDFATVRKVLSMPQVNIVKKTEVQTGGFSKESILPKRNSDKLIARKKDWDPKKYGGFDSPTVAYSVLVVAKVEKGKSKKLKSVKELLGITIMERSSFEKNPIDFLEAKGYKEVKKDLIIKLPKYSLFELENGRKRMLASAGELQKGNELALPSKYVNFLYLASHYEKLKGSPEDNEQKQLFVEQHKHYLDEIIEQISEFSKRVILADANLDKVLSAYNKHRDKPIREQAENIIHLFTLTNLGAPAAFKYFDTTIDRKRYTSTKEVLDATLIHQSITGLYETRIDLSQLGGDGGGSSEAAAKGGSGGLLGRDLLTKLKAQIQFSTEGPQVTWEDRPAMCLVLNLEEEYRLHEKPVPPSIDPSWLQLFPMVWAEKAGMGLANQVPPVVVELKSDASPVAVRQYPMSKEAREGIRPHIQRFLDLGILVPCQSPWNTPLLPVKKPGTNDYRPVQDLREVNKRVQDIHPTVPNPYNLLSSLPPSHTWYSVLDLKDAFFCLKLHPNSQPLFAFEWRDPEKGNTGQLTWTRLPQGFKNSPTLFNEALHRDLASFRALNPQVVMLQYVDDLLVAAPTYRDCKEGTRRLLQELSKLGYRVSAKKAQLCREEVTYLGYLLKGGKRWLTPARKATVMKIPTPTTPRQVREFLGTAGFCRLWIPGFASLAAPLYPLTRPKVPFTWTEAHQEAFGRIKEALLSAPALALPDLTKPFALYVDEKEGVARGVLTQTLGPWRRPVAYLSKKLDPVASGWPTCLKAIAAVALLLKDADKLTLGQNVLVIAPHNLESIVRQPPDRWMTNARMTHYQSLLLNERVSFAPPAILNPATLLPVESDDTPIHICSEILAEETGTRPDLRDQPLPGVPAWYTDGSSFIMDGRRQAGAAIVDNKRTVWASNLPEGTSAQKAELIALTQALRLAEGKSINIYTDSRYAFATAHVHGAIYKQRGWLTSAGKDIKNKEEILALLEAIHLPKRVAIIHCPGHQRGTDPVATGNRKADEAAKQAAQSTRILTETTKNAGKRTADGSEFEKRTADGSEFESPKKKAKVE

SEQ ID NO: 1624 - protein, 2127 aa, synthetic construct
MPAAKRVKLDGGDKKYSIGLDIGTNSVGWAVITDEYKVPSKKFKVLGNTDRHSIKKNLIGALLFDSGETAEATRLKRTARRRYTRRKNRICYLQEIFSNEMAKVDDSFFHRLEESFLVEEDKKHERHPIFGNIVDEVAYHEKYPTIYHLRKKLVDSTDKADLRLIYLALAHMIKFRGHFLIEGDLNPDNSDVDKLFIQLVQTYNQLFEENPINASGVDAKAILSARLSKSRRLENLIAQLPGEKKNGLFGNLIALSLGLTPNFKSNFDLAEDAKLQLSKDTYDDDLDNLLAQIGDQYADLFLAAKNLSDAILLSDILRVNTEITKAPLSASMIKRYDEHHQDLTLLKALVRQQLPEKYKEIFFDQSKNGYAGYIDGGASQEEFYKFIKPILEKMDGTEELLVKLNREDLLRKQRTFDNGSIPHQIHLGELHAILRRQEDFYPFLKDNREKIEKILTFRIPYYVGPLARGNSRFAWMTRKSEETITPWNFEEVVDKGASAQSFIERMTNFDKNLPNEKVLPKHSLLYEYFTVYNELTKVKYVTEGMRKPAFLSGEQKKAIVDLLFKTNRKVTVKQLKEDYFKKIECFDSVEISGVEDRFNASLGTYHDLLKIIKDKDFLDNEENEDILEDIVLTLTLFEDREMIEERLKTYAHLFDDKVMKQLKRRRYTGWGRLSRKLINGIRDKQSGKTILDFLKSDGFANRNFMQLIHDDSLTFKEDIQKAQVSGQGDSLHEHIANLAGSPAIKKGILQTVKVVDELVKVMGRHKPENIVIEMARENQTTQKGQKNSRERMKRIEEGIKELGSQILKEHPVENTQLQNEKLYLYYLQNGRDMYVDQELDINRLSDYDVDHIVPQSFLKDDSIDNKVLTRSDKARGKSDNVPSEEVVKKMKNYWRQLLNAKLITQRKFDNLTKAERGGLSELDKAGFIKRQLVETRQITKHVAQILDSRMNTKYDENDKLIREVKVITLKSKLVSDFRKDFQFYKVREINNYHHAHDAYLNAVVGTALIKKYPKLESEFVYGDYKVYDVRKMIAKSEQEIGKATAKYFFYSNIMNFFKTEITLANGEIRKRPLIETNGETGEIVWDKGRDFATVRKVLSMPQVNIVKKTEVQTGGFSKESILPKRNSDKLIARKKDWDPKKYGGFDSPTVAYSVLVVAKVEKGKSKKLKSVKELLGITIMERSSFEKNPIDFLEAKGYKEVKKDLIIKLPKYSLFELENGRKRMLASAGELQKGNELALPSKYVNFLYLASHYEKLKGSPEDNEQKQLFVEQHKHYLDEIIEQISEFSKRVILADANLDKVLSAYNKHRDKPIREQAENIIHLFTLTNLGAPAAFKYFDTTIDRKRYTSTKEVLDATLIHQSITGLYETRIDLSQLGGDGGEAAAKGSSPAPGGLLGRDLLTKLKAQIQFSTEGPQVTWEDRPAMCLVLNLEEEYRLHEKPVPPSIDPSWLQLFPMVWAEKAGMGLANQVPPVVVELKSDASPVAVRQYPMSKEAREGIRPHIQRFLDLGILVPCQSPWNTPLLPVKKPGTNDYRPVQDLREVNKRVQDIHPTVPNPYNLLSSLPPSHTWYSVLDLKDAFFCLKLHPNSQPLFAFEWRDPEKGNTGQLTWTRLPQGFKNSPTLFNEALHRDLASFRALNPQVVMLQYVDDLLVAAPTYRDCKEGTRRLLQELSKLGYRVSAKKAQLCREEVTYLGYLLKGGKRWLTPARKATVMKIPTPTTPRQVREFLGTAGFCRLWIPGFASLAAPLYPLTRPKVPFTWTEAHQEAFGRIKEALLSAPALALPDLTKPFALYVDEKEGVARGVLTQTLGPWRRPVAYLSKKLDPVASGWPTCLKAIAAVALLLKDADKLTLGQNVLVIAPHNLESIVRQPPDRWMTNARMTHYQSLLLNERVSFAPPAILNPATLLPVESDDTPIHICSEILAEETGTRPDLRDQPLPGVPAWYTDGSSFIMDGRRQAGAAIVDNKRTVWASNLPEGTSAQKAELIALTQALRLAEGKSINIYTDSRYAFATAHVHGAIYKQRGWLTSAGKDIKNKEEILALLEAIHLPKRVAIIHCPGHQRGTDPVATGNRKADEAAKQAAQSTRILTETTKNAGKRTADGSEFEKRTADGSEFESPKKKAKVE

SEQ ID NO: 1625 - protein, 2122 aa, synthetic construct
MPAAKRVKLDGGDKKYSIGLDIGTNSVGWAVITDEYKVPSKKFKVLGNTDRHSIKKNLIGALLFDSGETAEATRLKRTARRRYTRRKNRICYLQEIFSNEMAKVDDSFFHRLEESFLVEEDKKHERHPIFGNIVDEVAYHEKYPTIYHLRKKLVDSTDKADLRLIYLALAHMIKFRGHFLIEGDLNPDNSDVDKLFIQLVQTYNQLFEENPINASGVDAKAILSARLSKSRRLENLIAQLPGEKKNGLFGNLIALSLGLTPNFKSNFDLAEDAKLQLSKDTYDDDLDNLLAQIGDQYADLFLAAKNLSDAILLSDILRVNTEITKAPLSASMIKRYDEHHQDLTLLKALVRQQLPEKYKEIFFDQSKNGYAGYIDGGASQEEFYKFIKPILEKMDGTEELLVKLNREDLLRKQRTFDNGSIPHQIHLGELHAILRRQEDFYPFLKDNREKIEKILTFRIPYYVGPLARGNSRFAWMTRKSEETITPWNFEEVVDKGASAQSFIERMTNFDKNLPNEKVLPKHSLLYEYFTVYNELTKVKYVTEGMRKPAFLSGEQKKAIVDLLFKTNRKVTVKQLKEDYFKKIECFDSVEISGVEDRFNASLGTYHDLLKIIKDKDFLDNEENEDILEDIVLTLTLFEDREMIEERLKTYAHLFDDKVMKQLKRRRYTGWGRLSRKLINGIRDKQSGKTILDFLKSDGFANRNFMQLIHDDSLTFKEDIQKAQVSGQGDSLHEHIANLAGSPAIKKGILQTVKVVDELVKVMGRHKPENIVIEMARENQTTQKGQKNSRERMKRIEEGIKELGSQILKEHPVENTQLQNEKLYLYYLQNGRDMYVDQELDINRLSDYDVDHIVPQSFLKDDSIDNKVLTRSDKARGKSDNVPSEEVVKKMKNYWRQLLNAKLITQRKFDNLTKAERGGLSELDKAGFIKRQLVETRQITKHVAQILDSRMNTKYDENDKLIREVKVITLKSKLVSDFRKDFQFYKVREINNYHHAHDAYLNAVVGTALIKKYPKLESEFVYGDYKVYDVRKMIAKSEQEIGKATAKYFFYSNIMNFFKTEITLANGEIRKRPLIETNGETGEIVWDKGRDFATVRKVLSMPQVNIVKKTEVQTGGFSKESILPKRNSDKLIARKKDWDPKKYGGFDSPTVAYSVLVVAKVEKGKSKKLKSVKELLGITIMERSSFEKNPIDFLEAKGYKEVKKDLIIKLPKYSLFELENGRKRMLASAGELQKGNELALPSKYVNFLYLASHYEKLKGSPEDNEQKQLFVEQHKHYLDEIIEQISEFSKRVILADANLDKVLSAYNKHRDKPIREQAENIIHLFTLTNLGAPAAFKYFDTTIDRKRYTSTKEVLDATLIHQSITGLYETRIDLSQLGGDGGGSSGSSGGLLGRDLLTKLKAQIQFSTEGPQVTWEDRPAMCLVLNLEEEYRLHEKPVPPSIDPSWLQLFPMVWAEKAGMGLANQVPPVVVELKSDASPVAVRQYPMSKEAREGIRPHIQRFLDLGILVPCQSPWNTPLLPVKKPGTNDYRPVQDLREVNKRVQDIHPTVPNPYNLLSSLPPSHTWYSVLDLKDAFFCLKLHPNSQPLFAFEWRDPEKGNTGQLTWTRLPQGFKNSPTLFNEALHRDLASFRALNPQVVMLQYVDDLLVAAPTYRDCKEGTRRLLQELSKLGYRVSAKKAQLCREEVTYLGYLLKGGKRWLTPARKATVMKIPTPTTPRQVREFLGTAGFCRLWIPGFASLAAPLYPLTRPKVPFTWTEAHQEAFGRIKEALLSAPALALPDLTKPFALYVDEKEGVARGVLTQTLGPWRRPVAYLSKKLDPVASGWPTCLKAIAAVALLLKDADKLTLGQNVLVIAPHNLESIVRQPPDRWMTNARMTHYQSLLLNERVSFAPPAILNPATLLPVESDDTPIHICSEILAEETGTRPDLRDQPLPGVPAWYTDGSSFIMDGRRQAGAAIVDNKRTVWASNLPEGTSAQKAELIALTQALRLAEGKSINIYTDSRYAFATAHVHGAIYKQRGWLTSAGKDIKNKEEILALLEAIHLPKRVAIIHCPGHQRGTDPVATGNRKADEAAKQAAQSTRILTETTKNAGKRTADGSEFEKRTADGSEFESPKKKAKVE

SEQ ID NO: 1626 - protein, 2122 aa, synthetic construct
MPAAKRVKLDGGDKKYSIGLDIGTNSVGWAVITDEYKVPSKKFKVLGNTDRHSIKKNLIGALLFDSGETAEATRLKRTARRRYTRRKNRICYLQEIFSNEMAKVDDSFFHRLEESFLVEEDKKHERHPIFGNIVDEVAYHEKYPTIYHLRKKLVDSTDKADLRLIYLALAHMIKFRGHFLIEGDLNPDNSDVDKLFIQLVQTYNQLFEENPINASGVDAKAILSARLSKSRRLENLIAQLPGEKKNGLFGNLIALSLGLTPNFKSNFDLAEDAKLQLSKDTYDDDLDNLLAQIGDQYADLFLAAKNLSDAILLSDILRVNTEITKAPLSASMIKRYDEHHQDLTLLKALVRQQLPEKYKEIFFDQSKNGYAGYIDGGASQEEFYKFIKPILEKMDGTEELLVKLNREDLLRKQRTFDNGSIPHQIHLGELHAILRRQEDFYPFLKDNREKIEKILTFRIPYYVGPLARGNSRFAWMTRKSEETITPWNFEEVVDKGASAQSFIERMTNFDKNLPNEKVLPKHSLLYEYFTVYNELTKVKYVTEGMRKPAFLSGEQKKAIVDLLFKTNRKVTVKQLKEDYFKKIECFDSVEISGVEDRFNASLGTYHDLLKIIKDKDFLDNEENEDILEDIVLTLTLFEDREMIEERLKTYAHLFDDKVMKQLKRRRYTGWGRLSRKLINGIRDKQSGKTILDFLKSDGFANRNFMQLIHDDSLTFKEDIQKAQVSGQGDSLHEHIANLAGSPAIKKGILQTVKVVDELVKVMGRHKPENIVIEMARENQTTQKGQKNSRERMKRIEEGIKELGSQILKEHPVENTQLQNEKLYLYYLQNGRDMYVDQELDINRLSDYDVDHIVPQSFLKDDSIDNKVLTRSDKARGKSDNVPSEEVVKKMKNYWRQLLNAKLITQRKFDNLTKAERGGLSELDKAGFIKRQLVETRQITKHVAQILDSRMNTKYDENDKLIREVKVITLKSKLVSDFRKDFQFYKVREINNYHHAHDAYLNAVVGTALIKKYPKLESEFVYGDYKVYDVRKMIAKSEQEIGKATAKYFFYSNIMNFFKTEITLANGEIRKRPLIETNGETGEIVWDKGRDFATVRKVLSMPQVNIVKKTEVQTGGFSKESILPKRNSDKLIARKKDWDPKKYGGFDSPTVAYSVLVVAKVEKGKSKKLKSVKELLGITIMERSSFEKNPIDFLEAKGYKEVKKDLIIKLPKYSLFELENGRKRMLASAGELQKGNELALPSKYVNFLYLASHYEKLKGSPEDNEQKQLFVEQHKHYLDEIIEQISEFSKRVILADANLDKVLSAYNKHRDKPIREQAENIIHLFTLTNLGAPAAFKYFDTTIDRKRYTSTKEVLDATLIHQSITGLYETRIDLSQLGGDGGGGSGGGGGLLGRDLLTKLKAQIQFSTEGPQVTWEDRPAMCLVLNLEEEYRLHEKPVPPSIDPSWLQLFPMVWAEKAGMGLANQVPPVVVELKSDASPVAVRQYPMSKEAREGIRPHIQRFLDLGILVPCQSPWNTPLLPVKKPGTNDYRPVQDLREVNKRVQDIHPTVPNPYNLLSSLPPSHTWYSVLDLKDAFFCLKLHPNSQPLFAFEWRDPEKGNTGQLTWTRLPQGFKNSPTLFNEALHRDLASFRALNPQVVMLQYVDDLLVAAPTYRDCKEGTRRLLQELSKLGYRVSAKKAQLCREEVTYLGYLLKGGKRWLTPARKATVMKIPTPTTPRQVREFLGTAGFCRLWIPGFASLAAPLYPLTRPKVPFTWTEAHQEAFGRIKEALLSAPALALPDLTKPFALYVDEKEGVARGVLTQTLGPWRRPVAYLSKKLDPVASGWPTCLKAIAAVALLLKDADKLTLGQNVLVIAPHNLESIVRQPPDRWMTNARMTHYQSLLLNERVSFAPPAILNPATLLPVESDDTPIHICSEILAEETGTRPDLRDQPLPGVPAWYTDGSSFIMDGRRQAGAAIVDNKRTVWASNLPEGTSAQKAELIALTQALRLAEGKSINIYTDSRYAFATAHVHGAIYKQRGWLTSAGKDIKNKEEILALLEAIHLPKRVAIIHCPGHQRGTDPVATGNRKADEAAKQAAQSTRILTETTKNAGKRTADGSEFEKRTADGSEFESPKKKAKVE

SEQ ID NO: 1627 - protein, 2122 aa, synthetic construct
MPAAKRVKLDGGDKKYSIGLDIGTNSVGWAVITDEYKVPSKKFKVLGNTDRHSIKKNLIGALLFDSGETAEATRLKRTARRRYTRRKNRICYLQEIFSNEMAKVDDSFFHRLEESFLVEEDKKHERHPIFGNIVDEVAYHEKYPTIYHLRKKLVDSTDKADLRLIYLALAHMIKFRGHFLIEGDLNPDNSDVDKLFIQLVQTYNQLFEENPINASGVDAKAILSARLSKSRRLENLIAQLPGEKKNGLFGNLIALSLGLTPNFKSNFDLAEDAKLQLSKDTYDDDLDNLLAQIGDQYADLFLAAKNLSDAILLSDILRVNTEITKAPLSASMIKRYDEHHQDLTLLKALVRQQLPEKYKEIFFDQSKNGYAGYIDGGASQEEFYKFIKPILEKMDGTEELLVKLNREDLLRKQRTFDNGSIPHQIHLGELHAILRRQEDFYPFLKDNREKIEKILTFRIPYYVGPLARGNSRFAWMTRKSEETITPWNFEEVVDKGASAQSFIERMTNFDKNLPNEKVLPKHSLLYEYFTVYNELTKVKYVTEGMRKPAFLSGEQKKAIVDLLFKTNRKVTVKQLKEDYFKKIECFDSVEISGVEDRFNASLGTYHDLLKIIKDKDFLDNEENEDILEDIVLTLTLFEDREMIEERLKTYAHLFDDKVMKQLKRRRYTGWGRLSRKLINGIRDKQSGKTILDFLKSDGFANRNFMQLIHDDSLTFKEDIQKAQVSGQGDSLHEHIANLAGSPAIKKGILQTVKVVDELVKVMGRHKPENIVIEMARENQTTQKGQKNSRERMKRIEEGIKELGSQILKEHPVENTQLQNEKLYLYYLQNGRDMYVDQELDINRLSDYDVDHIVPQSFLKDDSIDNKVLTRSDKARGKSDNVPSEEVVKKMKNYWRQLLNAKLITQRKFDNLTKAERGGLSELDKAGFIKRQLVETRQITKHVAQILDSRMNTKYDENDKLIREVKVITLKSKLVSDFRKDFQFYKVREINNYHHAHDAYLNAVVGTALIKKYPKLESEFVYGDYKVYDVRKMIAKSEQEIGKATAKYFFYSNIMNFFKTEITLANGEIRKRPLIETNGETGEIVWDKGRDFATVRKVLSMPQVNIVKKTEVQTGGFSKESILPKRNSDKLIARKKDWDPKKYGGFDSPTVAYSVLVVAKVEKGKSKKLKSVKELLGITIMERSSFEKNPIDFLEAKGYKEVKKDLIIKLPKYSLFELENGRKRMLASAGELQKGNELALPSKYVNFLYLASHYEKLKGSPEDNEQKQLFVEQHKHYLDEIIEQISEFSKRVILADANLDKVLSAYNKHRDKPIREQAENIIHLFTLTNLGAPAAFKYFDTTIDRKRYTSTKEVLDATLIHQSITGLYETRIDLSQLGGDGGPAPGSSGGLLGRDLLTKLKAQIQFSTEGPQVTWEDRPAMCLVLNLEEEYRLHEKPVPPSIDPSWLQLFPMVWAEKAGMGLANQVPPVVVELKSDASPVAVRQYPMSKEAREGIRPHIQRFLDLGILVPCQSPWNTPLLPVKKPGTNDYRPVQDLREVNKRVQDIHPTVPNPYNLLSSLPPSHTWYSVLDLKDAFFCLKLHPNSQPLFAFEWRDPEKGNTGQLTWTRLPQGFKNSPTLFNEALHRDLASFRALNPQVVMLQYVDDLLVAAPTYRDCKEGTRRLLQELSKLGYRVSAKKAQLCREEVTYLGYLLKGGKRWLTPARKATVMKIPTPTTPRQVREFLGTAGFCRLWIPGFASLAAPLYPLTRPKVPFTWTEAHQEAFGRIKEALLSAPALALPDLTKPFALYVDEKEGVARGVLTQTLGPWRRPVAYLSKKLDPVASGWPTCLKAIAAVALLLKDADKLTLGQNVLVIAPHNLESIVRQPPDRWMTNARMTHYQSLLLNERVSFAPPAILNPATLLPVESDDTPIHICSEILAEETGTRPDLRDQPLPGVPAWYTDGSSFIMDGRRQAGAAIVDNKRTVWASNLPEGTSAQKAELIALTQALRLAEGKSINIYTDSRYAFATAHVHGAIYKQRGWLTSAGKDIKNKEEILALLEAIHLPKRVAIIHCPGHQRGTDPVATGNRKADEAAKQAAQSTRILTETTKNAGKRTADGSEFEKRTADGSEFESPKKKAKVE

SEQ ID NO: 1628 - protein, 2122 aa, synthetic construct
MPAAKRVKLDGGDKKYSIGLDIGTNSVGWAVITDEYKVPSKKFKVLGNTDRHSIKKNLIGALLFDSGETAEATRLKRTARRRYTRRKNRICYLQEIFSNEMAKVDDSFFHRLEESFLVEEDKKHERHPIFGNIVDEVAYHEKYPTIYHLRKKLVDSTDKADLRLIYLALAHMIKFRGHFLIEGDLNPDNSDVDKLFIQLVQTYNQLFEENPINASGVDAKAILSARLSKSRRLENLIAQLPGEKKNGLFGNLIALSLGLTPNFKSNFDLAEDAKLQLSKDTYDDDLDNLLAQIGDQYADLFLAAKNLSDAILLSDILRVNTEITKAPLSASMIKRYDEHHQDLTLLKALVRQQLPEKYKEIFFDQSKNGYAGYIDGGASQEEFYKFIKPILEKMDGTEELLVKLNREDLLRKQRTFDNGSIPHQIHLGELHAILRRQEDFYPFLKDNREKIEKILTFRIPYYVGPLARGNSRFAWMTRKSEETITPWNFEEVVDKGASAQSFIERMTNFDKNLPNEKVLPKHSLLYEYFTVYNELTKVKYVTEGMRKPAFLSGEQKKAIVDLLFKTNRKVTVKQLKEDYFKKIECFDSVEISGVEDRFNASLGTYHDLLKIIKDKDFLDNEENEDILEDIVLTLTLFEDREMIEERLKTYAHLFDDKVMKQLKRRRYTGWGRLSRKLINGIRDKQSGKTILDFLKSDGFANRNFMQLIHDDSLTFKEDIQKAQVSGQGDSLHEHIANLAGSPAIKKGILQTVKVVDELVKVMGRHKPENIVIEMARENQTTQKGQKNSRERMKRIEEGIKELGSQILKEHPVENTQLQNEKLYLYYLQNGRDMYVDQELDINRLSDYDVDHIVPQSFLKDDSIDNKVLTRSDKARGKSDNVPSEEVVKKMKNYWRQLLNAKLITQRKFDNLTKAERGGLSELDKAGFIKRQLVETRQITKHVAQILDSRMNTKYDENDKLIREVKVITLKSKLVSDFRKDFQFYKVREINNYHHAHDAYLNAVVGTALIKKYPKLESEFVYGDYKVYDVRKMIAKSEQEIGKATAKYFFYSNIMNFFKTEITLANGEIRKRPLIETNGETGEIVWDKGRDFATVRKVLSMPQVNIVKKTEVQTGGFSKESILPKRNSDKLIARKKDWDPKKYGGFDSPTVAYSVLVVAKVEKGKSKKLKSVKELLGITIMERSSFEKNPIDFLEAKGYKEVKKDLIIKLPKYSLFELENGRKRMLASAGELQKGNELALPSKYVNFLYLASHYEKLKGSPEDNEQKQLFVEQHKHYLDEIIEQISEFSKRVILADANLDKVLSAYNKHRDKPIREQAENIIHLFTLTNLGAPAAFKYFDTTIDRKRYTSTKEVLDATLIHQSITGLYETRIDLSQLGGDGGGGGGGGGGLLGRDLLTKLKAQIQFSTEGPQVTWEDRPAMCLVLNLEEEYRLHEKPVPPSIDPSWLQLFPMVWAEKAGMGLANQVPPVVVELKSDASPVAVRQYPMSKEAREGIRPHIQRFLDLGILVPCQSPWNTPLLPVKKPGTNDYRPVQDLREVNKRVQDIHPTVPNPYNLLSSLPPSHTWYSVLDLKDAFFCLKLHPNSQPLFAFEWRDPEKGNTGQLTWTRLPQGFKNSPTLFNEALHRDLASFRALNPQVVMLQYVDDLLVAAPTYRDCKEGTRRLLQELSKLGYRVSAKKAQLCREEVTYLGYLLKGGKRWLTPARKATVMKIPTPTTPRQVREFLGTAGFCRLWIPGFASLAAPLYPLTRPKVPFTWTEAHQEAFGRIKEALLSAPALALPDLTKPFALYVDEKEGVARGVLTQTLGPWRRPVAYLSKKLDPVASGWPTCLKAIAAVALLLKDADKLTLGQNVLVIAPHNLESIVRQPPDRWMTNARMTHYQSLLLNERVSFAPPAILNPATLLPVESDDTPIHICSEILAEETGTRPDLRDQPLPGVPAWYTDGSSFIMDGRRQAGAAIVDNKRTVWASNLPEGTSAQKAELIALTQALRLAEGKSINIYTDSRYAFATAHVHGAIYKQRGWLTSAGKDIKNKEEILALLEAIHLPKRVAIIHCPGHQRGTDPVATGNRKADEAAKQAAQSTRILTETTKNAGKRTADGSEFEKRTADGSEFESPKKKAKVE

SEQ ID NO: 1629 - protein, 2124 aa, synthetic construct
MPAAKRVKLDGGDKKYSIGLDIGTNSVGWAVITDEYKVPSKKFKVLGNTDRHSIKKNLIGALLFDSGETAEATRLKRTARRRYTRRKNRICYLQEIFSNEMAKVDDSFFHRLEESFLVEEDKKHERHPIFGNIVDEVAYHEKYPTIYHLRKKLVDSTDKADLRLIYLALAHMIKFRGHFLIEGDLNPDNSDVDKLFIQLVQTYNQLFEENPINASGVDAKAILSARLSKSRRLENLIAQLPGEKKNGLFGNLIALSLGLTPNFKSNFDLAEDAKLQLSKDTYDDDLDNLLAQIGDQYADLFLAAKNLSDAILLSDILRVNTEITKAPLSASMIKRYDEHHQDLTLLKALVRQQLPEKYKEIFFDQSKNGYAGYIDGGASQEEFYKFIKPILEKMDGTEELLVKLNREDLLRKQRTFDNGSIPHQIHLGELHAILRRQEDFYPFLKDNREKIEKILTFRIPYYVGPLARGNSRFAWMTRKSEETITPWNFEEVVDKGASAQSFIERMTNFDKNLPNEKVLPKHSLLYEYFTVYNELTKVKYVTEGMRKPAFLSGEQKKAIVDLLFKTNRKVTVKQLKEDYFKKIECFDSVEISGVEDRFNASLGTYHDLLKIIKDKDFLDNEENEDILEDIVLTLTLFEDREMIEERLKTYAHLFDDKVMKQLKRRRYTGWGRLSRKLINGIRDKQSGKTILDFLKSDGFANRNFMQLIHDDSLTFKEDIQKAQVSGQGDSLHEHIANLAGSPAIKKGILQTVKVVDELVKVMGRHKPENIVIEMARENQTTQKGQKNSRERMKRIEEGIKELGSQILKEHPVENTQLQNEKLYLYYLQNGRDMYVDQELDINRLSDYDVDHIVPQSFLKDDSIDNKVLTRSDKARGKSDNVPSEEVVKKMKNYWRQLLNAKLITQRKFDNLTKAERGGLSELDKAGFIKRQLVETRQITKHVAQILDSRMNTKYDENDKLIREVKVITLKSKLVSDFRKDFQFYKVREINNYHHAHDAYLNAVVGTALIKKYPKLESEFVYGDYKVYDVRKMIAKSEQEIGKATAKYFFYSNIMNFFKTEITLANGEIRKRPLIETNGETGEIVWDKGRDFATVRKVLSMPQVNIVKKTEVQTGGFSKESILPKRNSDKLIARKKDWDPKKYGGFDSPTVAYSVLVVAKVEKGKSKKLKSVKELLGITIMERSSFEKNPIDFLEAKGYKEVKKDLIIKLPKYSLFELENGRKRMLASAGELQKGNELALPSKYVNFLYLASHYEKLKGSPEDNEQKQLFVEQHKHYLDEIIEQISEFSKRVILADANLDKVLSAYNKHRDKPIREQAENIIHLFTLTNLGAPAAFKYFDTTIDRKRYTSTKEVLDATLIHQSITGLYETRIDLSQLGGDGGGGGEAAAKGGLLGRDLLTKLKAQIQFSTEGPQVTWEDRPAMCLVLNLEEEYRLHEKPVPPSIDPSWLQLFPMVWAEKAGMGLANQVPPVVVELKSDASPVAVRQYPMSKEAREGIRPHIQRFLDLGILVPCQSPWNTPLLPVKKPGTNDYRPVQDLREVNKRVQDIHPTVPNPYNLLSSLPPSHTWYSVLDLKDAFFCLKLHPNSQPLFAFEWRDPEKGNTGQLTWTRLPQGFKNSPTLFNEALHRDLASFRALNPQVVMLQYVDDLLVAAPTYRDCKEGTRRLLQELSKLGYRVSAKKAQLCREEVTYLGYLLKGGKRWLTPARKATVMKIPTPTTPRQVREFLGTAGFCRLWIPGFASLAAPLYPLTRPKVPFTWTEAHQEAFGRIKEALLSAPALALPDLTKPFALYVDEKEGVARGVLTQTLGPWRRPVAYLSKKLDPVASGWPTCLKAIAAVALLLKDADKLTLGQNVLVIAPHNLESIVRQPPDRWMTNARMTHYQSLLLNERVSFAPPAILNPATLLPVESDDTPIHICSEILAEETGTRPDLRDQPLPGVPAWYTDGSSFIMDGRRQAGAAIVDNKRTVWASNLPEGTSAQKAELIALTQALRLAEGKSINIYTDSRYAFATAHVHGAIYKQRGWLTSAGKDIKNKEEILALLEAIHLPKRVAIIHCPGHQRGTDPVATGNRKADEAAKQAAQSTRILTETTKNAGKRTADGSEFEKRTADGSEFESPKKKAKVE

SEQ ID NO: 1630 - protein, 2124 aa, synthetic construct
MPAAKRVKLDGGDKKYSIGLDIGTNSVGWAVITDEYKVPSKKFKVLGNTDRHSIKKNLIGALLFDSGETAEATRLKRTARRRYTRRKNRICYLQEIFSNEMAKVDDSFFHRLEESFLVEEDKKHERHPIFGNIVDEVAYHEKYPTIYHLRKKLVDSTDKADLRLIYLALAHMIKFRGHFLIEGDLNPDNSDVDKLFIQLVQTYNQLFEENPINASGVDAKAILSARLSKSRRLENLIAQLPGEKKNGLFGNLIALSLGLTPNFKSNFDLAEDAKLQLSKDTYDDDLDNLLAQIGDQYADLFLAAKNLSDAILLSDILRVNTEITKAPLSASMIKRYDEHHQDLTLLKALVRQQLPEKYKEIFFDQSKNGYAGYIDGGASQEEFYKFIKPILEKMDGTEELLVKLNREDLLRKQRTFDNGSIPHQIHLGELHAILRRQEDFYPFLKDNREKIEKILTFRIPYYVGPLARGNSRFAWMTRKSEETITPWNFEEVVDKGASAQSFIERMTNFDKNLPNEKVLPKHSLLYEYFTVYNELTKVKYVTEGMRKPAFLSGEQKKAIVDLLFKTNRKVTVKQLKEDYFKKIECFDSVEISGVEDRFNASLGTYHDLLKIIKDKDFLDNEENEDILEDIVLTLTLFEDREMIEERLKTYAHLFDDKVMKQLKRRRYTGWGRLSRKLINGIRDKQSGKTILDFLKSDGFANRNFMQLIHDDSLTFKEDIQKAQVSGQGDSLHEHIANLAGSPAIKKGILQTVKVVDELVKVMGRHKPENIVIEMARENQTTQKGQKNSRERMKRIEEGIKELGSQILKEHPVENTQLQNEKLYLYYLQNGRDMYVDQELDINRLSDYDVDHIVPQSFLKDDSIDNKVLTRSDKARGKSDNVPSEEVVKKMKNYWRQLLNAKLITQRKFDNLTKAERGGLSELDKAGFIKRQLVETRQITKHVAQILDSRMNTKYDENDKLIREVKVITLKSKLVSDFRKDFQFYKVREINNYHHAHDAYLNAVVGTALIKKYPKLESEFVYGDYKVYDVRKMIAKSEQEIGKATAKYFFYSNIMNFFKTEITLANGEIRKRPLIETNGETGEIVWDKGRDFATVRKVLSMPQVNIVKKTEVQTGGFSKESILPKRNSDKLIARKKDWDPKKYGGFDSPTVAYSVLVVAKVEKGKSKKLKSVKELLGITIMERSSFEKNPIDFLEAKGYKEVKKDLIIKLPKYSLFELENGRKRMLASAGELQKGNELALPSKYVNFLYLASHYEKLKGSPEDNEQKQLFVEQHKHYLDEIIEQISEFSKRVILADANLDKVLSAYNKHRDKPIREQAENIIHLFTLTNLGAPAAFKYFDTTIDRKRYTSTKEVLDATLIHQSITGLYETRIDLSQLGGDGGEAAAKGSSGGLLGRDLLTKLKAQIQFSTEGPQVTWEDRPAMCLVLNLEEEYRLHEKPVPPSIDPSWLQLFPMVWAEKAGMGLANQVPPVVVELKSDASPVAVRQYPMSKEAREGIRPHIQRFLDLGILVPCQSPWNTPLLPVKKPGTNDYRPVQDLREVNKRVQDIHPTVPNPYNLLSSLPPSHTWYSVLDLKDAFFCLKLHPNSQPLFAFEWRDPEKGNTGQLTWTRLPQGFKNSPTLFNEALHRDLASFRALNPQVVMLQYVDDLLVAAPTYRDCKEGTRRLLQELSKLGYRVSAKKAQLCREEVTYLGYLLKGGKRWLTPARKATVMKIPTPTTPRQVREFLGTAGFCRLWIPGFASLAAPLYPLTRPKVPFTWTEAHQEAFGRIKEALLSAPALALPDLTKPFALYVDEKEGVARGVLTQTLGPWRRPVAYLSKKLDPVASGWPTCLKAIAAVALLLKDADKLTLGQNVLVIAPHNLESIVRQPPDRWMTNARMTHYQSLLLNERVSFAPPAILNPATLLPVESDDTPIHICSEILAEETGTRPDLRDQPLPGVPAWYTDGSSFIMDGRRQAGAAIVDNKRTVWASNLPEGTSAQKAELIALTQALRLAEGKSINIYTDSRYAFATAHVHGAIYKQRGWLTSAGKDIKNKEEILALLEAIHLPKRVAIIHCPGHQRGTDPVATGNRKADEAAKQAAQSTRILTETTKNAGKRTADGSEFEKRTADGSEFESPKKKAKVE

SEQ ID NO: 1631 - protein, 2119 aa, synthetic construct
MPAAKRVKLDGGDKKYSIGLDIGTNSVGWAVITDEYKVPSKKFKVLGNTDRHSIKKNLIGALLFDSGETAEATRLKRTARRRYTRRKNRICYLQEIFSNEMAKVDDSFFHRLEESFLVEEDKKHERHPIFGNIVDEVAYHEKYPTIYHLRKKLVDSTDKADLRLIYLALAHMIKFRGHFLIEGDLNPDNSDVDKLFIQLVQTYNQLFEENPINASGVDAKAILSARLSKSRRLENLIAQLPGEKKNGLFGNLIALSLGLTPNFKSNFDLAEDAKLQLSKDTYDDDLDNLLAQIGDQYADLFLAAKNLSDAILLSDILRVNTEITKAPLSASMIKRYDEHHQDLTLLKALVRQQLPEKYKEIFFDQSKNGYAGYIDGGASQEEFYKFIKPILEKMDGTEELLVKLNREDLLRKQRTFDNGSIPHQIHLGELHAILRRQEDFYPFLKDNREKIEKILTFRIPYYVGPLARGNSRFAWMTRKSEETITPWNFEEVVDKGASAQSFIERMTNFDKNLPNEKVLPKHSLLYEYFTVYNELTKVKYVTEGMRKPAFLSGEQKKAIVDLLFKTNRKVTVKQLKEDYFKKIECFDSVEISGVEDRFNASLGTYHDLLKIIKDKDFLDNEENEDILEDIVLTLTLFEDREMIEERLKTYAHLFDDKVMKQLKRRRYTGWGRLSRKLINGIRDKQSGKTILDFLKSDGFANRNFMQLIHDDSLTFKEDIQKAQVSGQGDSLHEHIANLAGSPAIKKGILQTVKVVDELVKVMGRHKPENIVIEMARENQTTQKGQKNSRERMKRIEEGIKELGSQILKEHPVENTQLQNEKLYLYYLQNGRDMYVDQELDINRLSDYDVDHIVPQSFLKDDSIDNKVLTRSDKARGKSDNVPSEEVVKKMKNYWRQLLNAKLITQRKFDNLTKAERGGLSELDKAGFIKRQLVETRQITKHVAQILDSRMNTKYDENDKLIREVKVITLKSKLVSDFRKDFQFYKVREINNYHHAHDAYLNAVVGTALIKKYPKLESEFVYGDYKVYDVRKMIAKSEQEIGKATAKYFFYSNIMNFFKTEITLANGEIRKRPLIETNGETGEIVWDKGRDFATVRKVLSMPQVNIVKKTEVQTGGFSKESILPKRNSDKLIARKKDWDPKKYGGFDSPTVAYSVLVVAKVEKGKSKKLKSVKELLGITIMERSSFEKNPIDFLEAKGYKEVKKDLIIKLPKYSLFELENGRKRMLASAGELQKGNELALPSKYVNFLYLASHYEKLKGSPEDNEQKQLFVEQHKHYLDEIIEQISEFSKRVILADANLDKVLSAYNKHRDKPIREQAENIIHLFTLTNLGAPAAFKYFDTTIDRKRYTSTKEVLDATLIHQSITGLYETRIDLSQLGGDGGPAPGGLLGRDLLTKLKAQIQFSTEGPQVTWEDRPAMCLVLNLEEEYRLHEKPVPPSIDPSWLQLFPMVWAEKAGMGLANQVPPVVVELKSDASPVAVRQYPMSKEAREGIRPHIQRFLDLGILVPCQSPWNTPLLPVKKPGTNDYRPVQDLREVNKRVQDIHPTVPNPYNLLSSLPPSHTWYSVLDLKDAFFCLKLHPNSQPLFAFEWRDPEKGNTGQLTWTRLPQGFKNSPTLFNEALHRDLASFRALNPQVVMLQYVDDLLVAAPTYRDCKEGTRRLLQELSKLGYRVSAKKAQLCREEVTYLGYLLKGGKRWLTPARKATVMKIPTPTTPRQVREFLGTAGFCRLWIPGFASLAAPLYPLTRPKVPFTWTEAHQEAFGRIKEALLSAPALALPDLTKPFALYVDEKEGVARGVLTQTLGPWRRPVAYLSKKLDPVASGWPTCLKAIAAVALLLKDADKLTLGQNVLVIAPHNLESIVRQPPDRWMTNARMTHYQSLLLNERVSFAPPAILNPATLLPVESDDTPIHICSEILAEETGTRPDLRDQPLPGVPAWYTDGSSFIMDGRRQAGAAIVDNKRTVWASNLPEGTSAQKAELIALTQALRLAEGKSINIYTDSRYAFATAHVHGAIYKQRGWLTSAGKDIKNKEEILALLEAIHLPKRVAIIHCPGHQRGTDPVATGNRKADEAAKQAAQSTRILTETTKNAGKRTADGSEFEKRTADGSEFESPKKKAKVE

SEQ ID NO: 1632 - protein, 2141 aa, synthetic construct
MPAAKRVKLDGGDKKYSIGLDIGTNSVGWAVITDEYKVPSKKFKVLGNTDRHSIKKNLIGALLFDSGETAEATRLKRTARRRYTRRKNRICYLQEIFSNEMAKVDDSFFHRLEESFLVEEDKKHERHPIFGNIVDEVAYHEKYPTIYHLRKKLVDSTDKADLRLIYLALAHMIKFRGHFLIEGDLNPDNSDVDKLFIQLVQTYNQLFEENPINASGVDAKAILSARLSKSRRLENLIAQLPGEKKNGLFGNLIALSLGLTPNFKSNFDLAEDAKLQLSKDTYDDDLDNLLAQIGDQYADLFLAAKNLSDAILLSDILRVNTEITKAPLSASMIKRYDEHHQDLTLLKALVRQQLPEKYKEIFFDQSKNGYAGYIDGGASQEEFYKFIKPILEKMDGTEELLVKLNREDLLRKQRTFDNGSIPHQIHLGELHAILRRQEDFYPFLKDNREKIEKILTFRIPYYVGPLARGNSRFAWMTRKSEETITPWNFEEVVDKGASAQSFIERMTNFDKNLPNEKVLPKHSLLYEYFTVYNELTKVKYVTEGMRKPAFLSGEQKKAIVDLLFKTNRKVTVKQLKEDYFKKIECFDSVEISGVEDRFNASLGTYHDLLKIIKDKDFLDNEENEDILEDIVLTLTLFEDREMIEERLKTYAHLFDDKVMKQLKRRRYTGWGRLSRKLINGIRDKQSGKTILDFLKSDGFANRNFMQLIHDDSLTFKEDIQKAQVSGQGDSLHEHIANLAGSPAIKKGILQTVKVVDELVKVMGRHKPENIVIEMARENQTTQKGQKNSRERMKRIEEGIKELGSQILKEHPVENTQLQNEKLYLYYLQNGRDMYVDQELDINRLSDYDVDHIVPQSFLKDDSIDNKVLTRSDKARGKSDNVPSEEVVKKMKNYWRQLLNAKLITQRKFDNLTKAERGGLSELDKAGFIKRQLVETRQITKHVAQILDSRMNTKYDENDKLIREVKVITLKSKLVSDFRKDFQFYKVREINNYHHAHDAYLNAVVGTALIKKYPKLESEFVYGDYKVYDVRKMIAKSEQEIGKATAKYFFYSNIMNFFKTEITLANGEIRKRPLIETNGETGEIVWDKGRDFATVRKVLSMPQVNIVKKTEVQTGGFSKESILPKRNSDKLIARKKDWDPKKYGGFDSPTVAYSVLVVAKVEKGKSKKLKSVKELLGITIMERSSFEKNPIDFLEAKGYKEVKKDLIIKLPKYSLFELENGRKRMLASAGELQKGNELALPSKYVNFLYLASHYEKLKGSPEDNEQKQLFVEQHKHYLDEIIEQISEFSKRVILADANLDKVLSAYNKHRDKPIREQAENIIHLFTLTNLGAPAAFKYFDTTIDRKRYTSTKEVLDATLIHQSITGLYETRIDLSQLGGDGGEAAAKEAAAKEAAAKEAAAKEAAAKGGLLGRDLLTKLKAQIQFSTEGPQVTWEDRPAMCLVLNLEEEYRLHEKPVPPSIDPSWLQLFPMVWAEKAGMGLANQVPPVVVELKSDASPVAVRQYPMSKEAREGIRPHIQRFLDLGILVPCQSPWNTPLLPVKKPGTNDYRPVQDLREVNKRVQDIHPTVPNPYNLLSSLPPSHTWYSVLDLKDAFFCLKLHPNSQPLFAFEWRDPEKGNTGQLTWTRLPQGFKNSPTLFNEALHRDLASFRALNPQVVMLQYVDDLLVAAPTYRDCKEGTRRLLQELSKLGYRVSAKKAQLCREEVTYLGYLLKGGKRWLTPARKATVMKIPTPTTPRQVREFLGTAGFCRLWIPGFASLAAPLYPLTRPKVPFTWTEAHQEAFGRIKEALLSAPALALPDLTKPFALYVDEKEGVARGVLTQTLGPWRRPVAYLSKKLDPVASGWPTCLKAIAAVALLLKDADKLTLGQNVLVIAPHNLESIVRQPPDRWMTNARMTHYQSLLLNERVSFAPPAILNPATLLPVESDDTPIHICSEILAEETGTRPDLRDQPLPGVPAWYTDGSSFIMDGRRQAGAAIVDNKRTVWASNLPEGTSAQKAELIALTQALRLAEGKSINIYTDSRYAFATAHVHGAIYKQRGWLTSAGKDIKNKEEILALLEAIHLPKRVAIIHCPGHQRGTDPVATGNRKADEAAKQAAQSTRILTETTKNAGKRTADGSEFEKRTADGSEFESPKKKAKVE

SEQ ID NO: 1633 - protein, 2122 aa, synthetic construct
MPAAKRVKLDGGDKKYSIGLDIGTNSVGWAVITDEYKVPSKKFKVLGNTDRHSIKKNLIGALLFDSGETAEATRLKRTARRRYTRRKNRICYLQEIFSNEMAKVDDSFFHRLEESFLVEEDKKHERHPIFGNIVDEVAYHEKYPTIYHLRKKLVDSTDKADLRLIYLALAHMIKFRGHFLIEGDLNPDNSDVDKLFIQLVQTYNQLFEENPINASGVDAKAILSARLSKSRRLENLIAQLPGEKKNGLFGNLIALSLGLTPNFKSNFDLAEDAKLQLSKDTYDDDLDNLLAQIGDQYADLFLAAKNLSDAILLSDILRVNTEITKAPLSASMIKRYDEHHQDLTLLKALVRQQLPEKYKEIFFDQSKNGYAGYIDGGASQEEFYKFIKPILEKMDGTEELLVKLNREDLLRKQRTFDNGSIPHQIHLGELHAILRRQEDFYPFLKDNREKIEKILTFRIPYYVGPLARGNSRFAWMTRKSEETITPWNFEEVVDKGASAQSFIERMTNFDKNLPNEKVLPKHSLLYEYFTVYNELTKVKYVTEGMRKPAFLSGEQKKAIVDLLFKTNRKVTVKQLKEDYFKKIECFDSVEISGVEDRFNASLGTYHDLLKIIKDKDFLDNEENEDILEDIVLTLTLFEDREMIEERLKTYAHLFDDKVMKQLKRRRYTGWGRLSRKLINGIRDKQSGKTILDFLKSDGFANRNFMQLIHDDSLTFKEDIQKAQVSGQGDSLHEHIANLAGSPAIKKGILQTVKVVDELVKVMGRHKPENIVIEMARENQTTQKGQKNSRERMKRIEEGIKELGSQILKEHPVENTQLQNEKLYLYYLQNGRDMYVDQELDINRLSDYDVDHIVPQSFLKDDSIDNKVLTRSDKARGKSDNVPSEEVVKKMKNYWRQLLNAKLITQRKFDNLTKAERGGLSELDKAGFIKRQLVETRQITKHVAQILDSRMNTKYDENDKLIREVKVITLKSKLVSDFRKDFQFYKVREINNYHHAHDAYLNAVVGTALIKKYPKLESEFVYGDYKVYDVRKMIAKSEQEIGKATAKYFFYSNIMNFFKTEITLANGEIRKRPLIETNGETGEIVWDKGRDFATVRKVLSMPQVNIVKKTEVQTGGFSKESILPKRNSDKLIARKKDWDPKKYGGFDSPTVAYSVLVVAKVEKGKSKKLKSVKELLGITIMERSSFEKNPIDFLEAKGYKEVKKDLIIKLPKYSLFELENGRKRMLASAGELQKGNELALPSKYVNFLYLASHYEKLKGSPEDNEQKQLFVEQHKHYLDEIIEQISEFSKRVILADANLDKVLSAYNKHRDKPIREQAENIIHLFTLTNLGAPAAFKYFDTTIDRKRYTSTKEVLDATLIHQSITGLYETRIDLSQLGGDGGGGGPAPGGLLGRDLLTKLKAQIQFSTEGPQVTWEDRPAMCLVLNLEEEYRLHEKPVPPSIDPSWLQLFPMVWAEKAGMGLANQVPPVVVELKSDASPVAVRQYPMSKEAREGIRPHIQRFLDLGILVPCQSPWNTPLLPVKKPGTNDYRPVQDLREVNKRVQDIHPTVPNPYNLLSSLPPSHTWYSVLDLKDAFFCLKLHPNSQPLFAFEWRDPEKGNTGQLTWTRLPQGFKNSPTLFNEALHRDLASFRALNPQVVMLQYVDDLLVAAPTYRDCKEGTRRLLQELSKLGYRVSAKKAQLCREEVTYLGYLLKGGKRWLTPARKATVMKIPTPTTPRQVREFLGTAGFCRLWIPGFASLAAPLYPLTRPKVPFTWTEAHQEAFGRIKEALLSAPALALPDLTKPFALYVDEKEGVARGVLTQTLGPWRRPVAYLSKKLDPVASGWPTCLKAIAAVALLLKDADKLTLGQNVLVIAPHNLESIVRQPPDRWMTNARMTHYQSLLLNERVSFAPPAILNPATLLPVESDDTPIHICSEILAEETGTRPDLRDQPLPGVPAWYTDGSSFIMDGRRQAGAAIVDNKRTVWASNLPEGTSAQKAELIALTQALRLAEGKSINIYTDSRYAFATAHVHGAIYKQRGWLTSAGKDIKNKEEILALLEAIHLPKRVAIIHCPGHQRGTDPVATGNRKADEAAKQAAQSTRILTETTKNAGKRTADGSEFEKRTADGSEFESPKKKAKVE

SEQ ID NO: 1634 - protein, 2127 aa, synthetic construct
MPAAKRVKLDGGDKKYSIGLDIGTNSVGWAVITDEYKVPSKKFKVLGNTDRHSIKKNLIGALLFDSGETAEATRLKRTARRRYTRRKNRICYLQEIFSNEMAKVDDSFFHRLEESFLVEEDKKHERHPIFGNIVDEVAYHEKYPTIYHLRKKLVDSTDKADLRLIYLALAHMIKFRGHFLIEGDLNPDNSDVDKLFIQLVQTYNQLFEENPINASGVDAKAILSARLSKSRRLENLIAQLPGEKKNGLFGNLIALSLGLTPNFKSNFDLAEDAKLQLSKDTYDDDLDNLLAQIGDQYADLFLAAKNLSDAILLSDILRVNTEITKAPLSASMIKRYDEHHQDLTLLKALVRQQLPEKYKEIFFDQSKNGYAGYIDGGASQEEFYKFIKPILEKMDGTEELLVKLNREDLLRKQRTFDNGSIPHQIHLGELHAILRRQEDFYPFLKDNREKIEKILTFRIPYYVGPLARGNSRFAWMTRKSEETITPWNFEEVVDKGASAQSFIERMTNFDKNLPNEKVLPKHSLLYEYFTVYNELTKVKYVTEGMRKPAFLSGEQKKAIVDLLFKTNRKVTVKQLKEDYFKKIECFDSVEISGVEDRFNASLGTYHDLLKIIKDKDFLDNEENEDILEDIVLTLTLFEDREMIEERLKTYAHLFDDKVMKQLKRRRYTGWGRLSRKLINGIRDKQSGKTILDFLKSDGFANRNFMQLIHDDSLTFKEDIQKAQVSGQGDSLHEHIANLAGSPAIKKGILQTVKVVDELVKVMGRHKPENIVIEMARENQTTQKGQKNSRERMKRIEEGIKELGSQILKEHPVENTQLQNEKLYLYYLQNGRDMYVDQELDINRLSDYDVDHIVPQSFLKDDSIDNKVLTRSDKARGKSDNVPSEEVVKKMKNYWRQLLNAKLITQRKFDNLTKAERGGLSELDKAGFIKRQLVETRQITKHVAQILDSRMNTKYDENDKLIREVKVITLKSKLVSDFRKDFQFYKVREINNYHHAHDAYLNAVVGTALIKKYPKLESEFVYGDYKVYDVRKMIAKSEQEIGKATAKYFFYSNIMNFFKTEITLANGEIRKRPLIETNGETGEIVWDKGRDFATVRKVLSMPQVNIVKKTEVQTGGFSKESILPKRNSDKLIARKKDWDPKKYGGFDSPTVAYSVLVVAKVEKGKSKKLKSVKELLGITIMERSSFEKNPIDFLEAKGYKEVKKDLIIKLPKYSLFELENGRKRMLASAGELQKGNELALPSKYVNFLYLASHYEKLKGSPEDNEQKQLFVEQHKHYLDEIIEQISEFSKRVILADANLDKVLSAYNKHRDKPIREQAENIIHLFTLTNLGAPAAFKYFDTTIDRKRYTSTKEVLDATLIHQSITGLYETRIDLSQLGGDGGGSSEAAAKGGGGGLLGRDLLTKLKAQIQFSTEGPQVTWEDRPAMCLVLNLEEEYRLHEKPVPPSIDPSWLQLFPMVWAEKAGMGLANQVPPVVVELKSDASPVAVRQYPMSKEAREGIRPHIQRFLDLGILVPCQSPWNTPLLPVKKPGTNDYRPVQDLREVNKRVQDIHPTVPNPYNLLSSLPPSHTWYSVLDLKDAFFCLKLHPNSQPLFAFEWRDPEKGNTGQLTWTRLPQGFKNSPTLFNEALHRDLASFRALNPQVVMLQYVDDLLVAAPTYRDCKEGTRRLLQELSKLGYRVSAKKAQLCREEVTYLGYLLKGGKRWLTPARKATVMKIPTPTTPRQVREFLGTAGFCRLWIPGFASLAAPLYPLTRPKVPFTWTEAHQEAFGRIKEALLSAPALALPDLTKPFALYVDEKEGVARGVLTQTLGPWRRPVAYLSKKLDPVASGWPTCLKAIAAVALLLKDADKLTLGQNVLVIAPHNLESIVRQPPDRWMTNARMTHYQSLLLNERVSFAPPAILNPATLLPVESDDTPIHICSEILAEETGTRPDLRDQPLPGVPAWYTDGSSFIMDGRRQAGAAIVDNKRTVWASNLPEGTSAQKAELIALTQALRLAEGKSINIYTDSRYAFATAHVHGAIYKQRGWLTSAGKDIKNKEEILALLEAIHLPKRVAIIHCPGHQRGTDPVATGNRKADEAAKQAAQSTRILTETTKNAGKRTADGSEFEKRTADGSEFESPKKKAKVE

SEQ ID NO: 1635 - protein, 2131 aa, synthetic construct
MPAAKRVKLDGGDKKYSIGLDIGTNSVGWAVITDEYKVPSKKFKVLGNTDRHSIKKNLIGALLFDSGETAEATRLKRTARRRYTRRKNRICYLQEIFSNEMAKVDDSFFHRLEESFLVEEDKKHERHPIFGNIVDEVAYHEKYPTIYHLRKKLVDSTDKADLRLIYLALAHMIKFRGHFLIEGDLNPDNSDVDKLFIQLVQTYNQLFEENPINASGVDAKAILSARLSKSRRLENLIAQLPGEKKNGLFGNLIALSLGLTPNFKSNFDLAEDAKLQLSKDTYDDDLDNLLAQIGDQYADLFLAAKNLSDAILLSDILRVNTEITKAPLSASMIKRYDEHHQDLTLLKALVRQQLPEKYKEIFFDQSKNGYAGYIDGGASQEEFYKFIKPILEKMDGTEELLVKLNREDLLRKQRTFDNGSIPHQIHLGELHAILRRQEDFYPFLKDNREKIEKILTFRIPYYVGPLARGNSRFAWMTRKSEETITPWNFEEVVDKGASAQSFIERMTNFDKNLPNEKVLPKHSLLYEYFTVYNELTKVKYVTEGMRKPAFLSGEQKKAIVDLLFKTNRKVTVKQLKEDYFKKIECFDSVEISGVEDRFNASLGTYHDLLKIIKDKDFLDNEENEDILEDIVLTLTLFEDREMIEERLKTYAHLFDDKVMKQLKRRRYTGWGRLSRKLINGIRDKQSGKTILDFLKSDGFANRNFMQLIHDDSLTFKEDIQKAQVSGQGDSLHEHIANLAGSPAIKKGILQTVKVVDELVKVMGRHKPENIVIEMARENQTTQKGQKNSRERMKRIEEGIKELGSQILKEHPVENTQLQNEKLYLYYLQNGRDMYVDQELDINRLSDYDVDHIVPQSFLKDDSIDNKVLTRSDKARGKSDNVPSEEVVKKMKNYWRQLLNAKLITQRKFDNLTKAERGGLSELDKAGFIKRQLVETRQITKHVAQILDSRMNTKYDENDKLIREVKVITLKSKLVSDFRKDFQFYKVREINNYHHAHDAYLNAVVGTALIKKYPKLESEFVYGDYKVYDVRKMIAKSEQEIGKATAKYFFYSNIMNFFKTEITLANGEIRKRPLIETNGETGEIVWDKGRDFATVRKVLSMPQVNIVKKTEVQTGGFSKESILPKRNSDKLIARKKDWDPKKYGGFDSPTVAYSVLVVAKVEKGKSKKLKSVKELLGITIMERSSFEKNPIDFLEAKGYKEVKKDLIIKLPKYSLFELENGRKRMLASAGELQKGNELALPSKYVNFLYLASHYEKLKGSPEDNEQKQLFVEQHKHYLDEIIEQISEFSKRVILADANLDKVLSAYNKHRDKPIREQAENIIHLFTLTNLGAPAAFKYFDTTIDRKRYTSTKEVLDATLIHQSITGLYETRIDLSQLGGDGGGGGGSEAAAKGGGGSGGLLGRDLLTKLKAQIQFSTEGPQVTWEDRPAMCLVLNLEEEYRLHEKPVPPSIDPSWLQLFPMVWAEKAGMGLANQVPPVVVELKSDASPVAVRQYPMSKEAREGIRPHIQRFLDLGILVPCQSPWNTPLLPVKKPGTNDYRPVQDLREVNKRVQDIHPTVPNPYNLLSSLPPSHTWYSVLDLKDAFFCLKLHPNSQPLFAFEWRDPEKGNTGQLTWTRLPQGFKNSPTLFNEALHRDLASFRALNPQVVMLQYVDDLLVAAPTYRDCKEGTRRLLQELSKLGYRVSAKKAQLCREEVTYLGYLLKGGKRWLTPARKATVMKIPTPTTPRQVREFLGTAGFCRLWIPGFASLAAPLYPLTRPKVPFTWTEAHQEAFGRIKEALLSAPALALPDLTKPFALYVDEKEGVARGVLTQTLGPWRRPVAYLSKKLDPVASGWPTCLKAIAAVALLLKDADKLTLGQNVLVIAPHNLESIVRQPPDRWMTNARMTHYQSLLLNERVSFAPPAILNPATLLPVESDDTPIHICSEILAEETGTRPDLRDQPLPGVPAWYTDGSSFIMDGRRQAGAAIVDNKRTVWASNLPEGTSAQKAELIALTQALRLAEGKSINIYTDSRYAFATAHVHGAIYKQRGWLTSAGKDIKNKEEILALLEAIHLPKRVAIIHCPGHQRGTDPVATGNRKADEAAKQAAQSTRILTETTKNAGKRTADGSEFEKRTADGSEFESPKKKAKVE

SEQ ID NO: 1636 - protein, 2122 aa, synthetic construct
MPAAKRVKLDGGDKKYSIGLDIGTNSVGWAVITDEYKVPSKKFKVLGNTDRHSIKKNLIGALLFDSGETAEATRLKRTARRRYTRRKNRICYLQEIFSNEMAKVDDSFFHRLEESFLVEEDKKHERHPIFGNIVDEVAYHEKYPTIYHLRKKLVDSTDKADLRLIYLALAHMIKFRGHFLIEGDLNPDNSDVDKLFIQLVQTYNQLFEENPINASGVDAKAILSARLSKSRRLENLIAQLPGEKKNGLFGNLIALSLGLTPNFKSNFDLAEDAKLQLSKDTYDDDLDNLLAQIGDQYADLFLAAKNLSDAILLSDILRVNTEITKAPLSASMIKRYDEHHQDLTLLKALVRQQLPEKYKEIFFDQSKNGYAGYIDGGASQEEFYKFIKPILEKMDGTEELLVKLNREDLLRKQRTFDNGSIPHQIHLGELHAILRRQEDFYPFLKDNREKIEKILTFRIPYYVGPLARGNSRFAWMTRKSEETITPWNFEEVVDKGASAQSFIERMTNFDKNLPNEKVLPKHSLLYEYFTVYNELTKVKYVTEGMRKPAFLSGEQKKAIVDLLFKTNRKVTVKQLKEDYFKKIECFDSVEISGVEDRFNASLGTYHDLLKIIKDKDFLDNEENEDILEDIVLTLTLFEDREMIEERLKTYAHLFDDKVMKQLKRRRYTGWGRLSRKLINGIRDKQSGKTILDFLKSDGFANRNFMQLIHDDSLTFKEDIQKAQVSGQGDSLHEHIANLAGSPAIKKGILQTVKVVDELVKVMGRHKPENIVIEMARENQTTQKGQKNSRERMKRIEEGIKELGSQILKEHPVENTQLQNEKLYLYYLQNGRDMYVDQELDINRLSDYDVDHIVPQSFLKDDSIDNKVLTRSDKARGKSDNVPSEEVVKKMKNYWRQLLNAKLITQRKFDNLTKAERGGLSELDKAGFIKRQLVETRQITKHVAQILDSRMNTKYDENDKLIREVKVITLKSKLVSDFRKDFQFYKVREINNYHHAHDAYLNAVVGTALIKKYPKLESEFVYGDYKVYDVRKMIAKSEQEIGKATAKYFFYSNIMNFFKTEITLANGEIRKRPLIETNGETGEIVWDKGRDFATVRKVLSMPQVNIVKKTEVQTGGFSKESILPKRNSDKLIARKKDWDPKKYGGFDSPTVAYSVLVVAKVEKGKSKKLKSVKELLGITIMERSSFEKNPIDFLEAKGYKEVKKDLIIKLPKYSLFELENGRKRMLASAGELQKGNELALPSKYVNFLYLASHYEKLKGSPEDNEQKQLFVEQHKHYLDEIIEQISEFSKRVILADANLDKVLSAYNKHRDKPIREQAENIIHLFTLTNLGAPAAFKYFDTTIDRKRYTSTKEVLDATLIHQSITGLYETRIDLSQLGGDGGPAPGGSGGLLGRDLLTKLKAQIQFSTEGPQVTWEDRPAMCLVLNLEEEYRLHEKPVPPSIDPSWLQLFPMVWAEKAGMGLANQVPPVVVELKSDASPVAVRQYPMSKEAREGIRPHIQRFLDLGILVPCQSPWNTPLLPVKKPGTNDYRPVQDLREVNKRVQDIHPTVPNPYNLLSSLPPSHTWYSVLDLKDAFFCLKLHPNSQPLFAFEWRDPEKGNTGQLTWTRLPQGFKNSPTLFNEALHRDLASFRALNPQVVMLQYVDDLLVAAPTYRDCKEGTRRLLQELSKLGYRVSAKKAQLCREEVTYLGYLLKGGKRWLTPARKATVMKIPTPTTPRQVREFLGTAGFCRLWIPGFASLAAPLYPLTRPKVPFTWTEAHQEAFGRIKEALLSAPALALPDLTKPFALYVDEKEGVARGVLTQTLGPWRRPVAYLSKKLDPVASGWPTCLKAIAAVALLLKDADKLTLGQNVLVIAPHNLESIVRQPPDRWMTNARMTHYQSLLLNERVSFAPPAILNPATLLPVESDDTPIHICSEILAEETGTRPDLRDQPLPGVPAWYTDGSSFIMDGRRQAGAAIVDNKRTVWASNLPEGTSAQKAELIALTQALRLAEGKSINIYTDSRYAFATAHVHGAIYKQRGWLTSAGKDIKNKEEILALLEAIHLPKRVAIIHCPGHQRGTDPVATGNRKADEAAKQAAQSTRILTETTKNAGKRTADGSEFEKRTADGSEFESPKKKAKVE

SEQ ID NO: 1637 - protein, 2122 aa, synthetic construct
MPAAKRVKLDGGDKKYSIGLDIGTNSVGWAVITDEYKVPSKKFKVLGNTDRHSIKKNLIGALLFDSGETAEATRLKRTARRRYTRRKNRICYLQEIFSNEMAKVDDSFFHRLEESFLVEEDKKHERHPIFGNIVDEVAYHEKYPTIYHLRKKLVDSTDKADLRLIYLALAHMIKFRGHFLIEGDLNPDNSDVDKLFIQLVQTYNQLFEENPINASGVDAKAILSARLSKSRRLENLIAQLPGEKKNGLFGNLIALSLGLTPNFKSNFDLAEDAKLQLSKDTYDDDLDNLLAQIGDQYADLFLAAKNLSDAILLSDILRVNTEITKAPLSASMIKRYDEHHQDLTLLKALVRQQLPEKYKEIFFDQSKNGYAGYIDGGASQEEFYKFIKPILEKMDGTEELLVKLNREDLLRKQRTFDNGSIPHQIHLGELHAILRRQEDFYPFLKDNREKIEKILTFRIPYYVGPLARGNSRFAWMTRKSEETITPWNFEEVVDKGASAQSFIERMTNFDKNLPNEKVLPKHSLLYEYFTVYNELTKVKYVTEGMRKPAFLSGEQKKAIVDLLFKTNRKVTVKQLKEDYFKKIECFDSVEISGVEDRFNASLGTYHDLLKIIKDKDFLDNEENEDILEDIVLTLTLFEDREMIEERLKTYAHLFDDKVMKQLKRRRYTGWGRLSRKLINGIRDKQSGKTILDFLKSDGFANRNFMQLIHDDSLTFKEDIQKAQVSGQGDSLHEHIANLAGSPAIKKGILQTVKVVDELVKVMGRHKPENIVIEMARENQTTQKGQKNSRERMKRIEEGIKELGSQILKEHPVENTQLQNEKLYLYYLQNGRDMYVDQELDINRLSDYDVDHIVPQSFLKDDSIDNKVLTRSDKARGKSDNVPSEEVVKKMKNYWRQLLNAKLITQRKFDNLTKAERGGLSELDKAGFIKRQLVETRQITKHVAQILDSRMNTKYDENDKLIREVKVITLKSKLVSDFRKDFQFYKVREINNYHHAHDAYLNAVVGTALIKKYPKLESEFVYGDYKVYDVRKMIAKSEQEIGKATAKYFFYSNIMNFFKTEITLANGEIRKRPLIETNGETGEIVWDKGRDFATVRKVLSMPQVNIVKKTEVQTGGFSKESILPKRNSDKLIARKKDWDPKKYGGFDSPTVAYSVLVVAKVEKGKSKKLKSVKELLGITIMERSSFEKNPIDFLEAKGYKEVKKDLIIKLPKYSLFELENGRKRMLASAGELQKGNELALPSKYVNFLYLASHYEKLKGSPEDNEQKQLFVEQHKHYLDEIIEQISEFSKRVILADANLDKVLSAYNKHRDKPIREQAENIIHLFTLTNLGAPAAFKYFDTTIDRKRYTSTKEVLDATLIHQSITGLYETRIDLSQLGGDGGGGSGSSGGLLGRDLLTKLKAQIQFSTEGPQVTWEDRPAMCLVLNLEEEYRLHEKPVPPSIDPSWLQLFPMVWAEKAGMGLANQVPPVVVELKSDASPVAVRQYPMSKEAREGIRPHIQRFLDLGILVPCQSPWNTPLLPVKKPGTNDYRPVQDLREVNKRVQDIHPTVPNPYNLLSSLPPSHTWYSVLDLKDAFFCLKLHPNSQPLFAFEWRDPEKGNTGQLTWTRLPQGFKNSPTLFNEALHRDLASFRALNPQVVMLQYVDDLLVAAPTYRDCKEGTRRLLQELSKLGYRVSAKKAQLCREEVTYLGYLLKGGKRWLTPARKATVMKIPTPTTPRQVREFLGTAGFCRLWIPGFASLAAPLYPLTRPKVPFTWTEAHQEAFGRIKEALLSAPALALPDLTKPFALYVDEKEGVARGVLTQTLGPWRRPVAYLSKKLDPVASGWPTCLKAIAAVALLLKDADKLTLGQNVLVIAPHNLESIVRQPPDRWMTNARMTHYQSLLLNERVSFAPPAILNPATLLPVESDDTPIHICSEILAEETGTRPDLRDQPLPGVPAWYTDGSSFIMDGRRQAGAAIVDNKRTVWASNLPEGTSAQKAELIALTQALRLAEGKSINIYTDSRYAFATAHVHGAIYKQRGWLTSAGKDIKNKEEILALLEAIHLPKRVAIIHCPGHQRGTDPVATGNRKADEAAKQAAQSTRILTETTKNAGKRTADGSEFEKRTADGSEFESPKKKAKVE

SEQ ID NO: 1638 - protein, 2131 aa, synthetic construct
MPAAKRVKLDGGDKKYSIGLDIGTNSVGWAVITDEYKVPSKKFKVLGNTDRHSIKKNLIGALLFDSGETAEATRLKRTARRRYTRRKNRICYLQEIFSNEMAKVDDSFFHRLEESFLVEEDKKHERHPIFGNIVDEVAYHEKYPTIYHLRKKLVDSTDKADLRLIYLALAHMIKFRGHFLIEGDLNPDNSDVDKLFIQLVQTYNQLFEENPINASGVDAKAILSARLSKSRRLENLIAQLPGEKKNGLFGNLIALSLGLTPNFKSNFDLAEDAKLQLSKDTYDDDLDNLLAQIGDQYADLFLAAKNLSDAILLSDILRVNTEITKAPLSASMIKRYDEHHQDLTLLKALVRQQLPEKYKEIFFDQSKNGYAGYIDGGASQEEFYKFIKPILEKMDGTEELLVKLNREDLLRKQRTFDNGSIPHQIHLGELHAILRRQEDFYPFLKDNREKIEKILTFRIPYYVGPLARGNSRFAWMTRKSEETITPWNFEEVVDKGASAQSFIERMTNFDKNLPNEKVLPKHSLLYEYFTVYNELTKVKYVTEGMRKPAFLSGEQKKAIVDLLFKTNRKVTVKQLKEDYFKKIECFDSVEISGVEDRFNASLGTYHDLLKIIKDKDFLDNEENEDILEDIVLTLTLFEDREMIEERLKTYAHLFDDKVMKQLKRRRYTGWGRLSRKLINGIRDKQSGKTILDFLKSDGFANRNFMQLIHDDSLTFKEDIQKAQVSGQGDSLHEHIANLAGSPAIKKGILQTVKVVDELVKVMGRHKPENIVIEMARENQTTQKGQKNSRERMKRIEEGIKELGSQILKEHPVENTQLQNEKLYLYYLQNGRDMYVDQELDINRLSDYDVDHIVPQSFLKDDSIDNKVLTRSDKARGKSDNVPSEEVVKKMKNYWRQLLNAKLITQRKFDNLTKAERGGLSELDKAGFIKRQLVETRQITKHVAQILDSRMNTKYDENDKLIREVKVITLKSKLVSDFRKDFQFYKVREINNYHHAHDAYLNAVVGTALIKKYPKLESEFVYGDYKVYDVRKMIAKSEQEIGKATAKYFFYSNIMNFFKTEITLANGEIRKRPLIETNGETGEIVWDKGRDFATVRKVLSMPQVNIVKKTEVQTGGFSKESILPKRNSDKLIARKKDWDPKKYGGFDSPTVAYSVLVVAKVEKGKSKKLKSVKELLGITIMERSSFEKNPIDFLEAKGYKEVKKDLIIKLPKYSLFELENGRKRMLASAGELQKGNELALPSKYVNFLYLASHYEKLKGSPEDNEQKQLFVEQHKHYLDEIIEQISEFSKRVILADANLDKVLSAYNKHRDKPIREQAENIIHLFTLTNLGAPAAFKYFDTTIDRKRYTSTKEVLDATLIHQSITGLYETRIDLSQLGGDGGEAAAKGGGGSEAAAKGGLLGRDLLTKLKAQIQFSTEGPQVTWEDRPAMCLVLNLEEEYRLHEKPVPPSIDPSWLQLFPMVWAEKAGMGLANQVPPVVVELKSDASPVAVRQYPMSKEAREGIRPHIQRFLDLGILVPCQSPWNTPLLPVKKPGTNDYRPVQDLREVNKRVQDIHPTVPNPYNLLSSLPPSHTWYSVLDLKDAFFCLKLHPNSQPLFAFEWRDPEKGNTGQLTWTRLPQGFKNSPTLFNEALHRDLASFRALNPQVVMLQYVDDLLVAAPTYRDCKEGTRRLLQELSKLGYRVSAKKAQLCREEVTYLGYLLKGGKRWLTPARKATVMKIPTPTTPRQVREFLGTAGFCRLWIPGFASLAAPLYPLTRPKVPFTWTEAHQEAFGRIKEALLSAPALALPDLTKPFALYVDEKEGVARGVLTQTLGPWRRPVAYLSKKLDPVASGWPTCLKAIAAVALLLKDADKLTLGQNVLVIAPHNLESIVRQPPDRWMTNARMTHYQSLLLNERVSFAPPAILNPATLLPVESDDTPIHICSEILAEETGTRPDLRDQPLPGVPAWYTDGSSFIMDGRRQAGAAIVDNKRTVWASNLPEGTSAQKAELIALTQALRLAEGKSINIYTDSRYAFATAHVHGAIYKQRGWLTSAGKDIKNKEEILALLEAIHLPKRVAIIHCPGHQRGTDPVATGNRKADEAAKQAAQSTRILTETTKNAGKRTADGSEFEKRTADGSEFESPKKKAKVE

SEQ ID NO: 1639 - protein, 2127 aa, synthetic construct
MPAAKRVKLDGGDKKYSIGLDIGTNSVGWAVITDEYKVPSKKFKVLGNTDRHSIKKNLIGALLFDSGETAEATRLKRTARRRYTRRKNRICYLQEIFSNEMAKVDDSFFHRLEESFLVEEDKKHERHPIFGNIVDEVAYHEKYPTIYHLRKKLVDSTDKADLRLIYLALAHMIKFRGHFLIEGDLNPDNSDVDKLFIQLVQTYNQLFEENPINASGVDAKAILSARLSKSRRLENLIAQLPGEKKNGLFGNLIALSLGLTPNFKSNFDLAEDAKLQLSKDTYDDDLDNLLAQIGDQYADLFLAAKNLSDAILLSDILRVNTEITKAPLSASMIKRYDEHHQDLTLLKALVRQQLPEKYKEIFFDQSKNGYAGYIDGGASQEEFYKFIKPILEKMDGTEELLVKLNREDLLRKQRTFDNGSIPHQIHLGELHAILRRQEDFYPFLKDNREKIEKILTFRIPYYVGPLARGNSRFAWMTRKSEETITPWNFEEVVDKGASAQSFIERMTNFDKNLPNEKVLPKHSLLYEYFTVYNELTKVKYVTEGMRKPAFLSGEQKKAIVDLLFKTNRKVTVKQLKEDYFKKIECFDSVEISGVEDRFNASLGTYHDLLKIIKDKDFLDNEENEDILEDIVLTLTLFEDREMIEERLKTYAHLFDDKVMKQLKRRRYTGWGRLSRKLINGIRDKQSGKTILDFLKSDGFANRNFMQLIHDDSLTFKEDIQKAQVSGQGDSLHEHIANLAGSPAIKKGILQTVKVVDELVKVMGRHKPENIVIEMARENQTTQKGQKNSRERMKRIEEGIKELGSQILKEHPVENTQLQNEKLYLYYLQNGRDMYVDQELDINRLSDYDVDHIVPQSFLKDDSIDNKVLTRSDKARGKSDNVPSEEVVKKMKNYWRQLLNAKLITQRKFDNLTKAERGGLSELDKAGFIKRQLVETRQITKHVAQILDSRMNTKYDENDKLIREVKVITLKSKLVSDFRKDFQFYKVREINNYHHAHDAYLNAVVGTALIKKYPKLESEFVYGDYKVYDVRKMIAKSEQEIGKATAKYFFYSNIMNFFKTEITLANGEIRKRPLIETNGETGEIVWDKGRDFATVRKVLSMPQVNIVKKTEVQTGGFSKESILPKRNSDKLIARKKDWDPKKYGGFDSPTVAYSVLVVAKVEKGKSKKLKSVKELLGITIMERSSFEKNPIDFLEAKGYKEVKKDLIIKLPKYSLFELENGRKRMLASAGELQKGNELALPSKYVNFLYLASHYEKLKGSPEDNEQKQLFVEQHKHYLDEIIEQISEFSKRVILADANLDKVLSAYNKHRDKPIREQAENIIHLFTLTNLGAPAAFKYFDTTIDRKRYTSTKEVLDATLIHQSITGLYETRIDLSQLGGDGGGGGGSSEAAAKGGLLGRDLLTKLKAQIQFSTEGPQVTWEDRPAMCLVLNLEEEYRLHEKPVPPSIDPSWLQLFPMVWAEKAGMGLANQVPPVVVELKSDASPVAVRQYPMSKEAREGIRPHIQRFLDLGILVPCQSPWNTPLLPVKKPGTNDYRPVQDLREVNKRVQDIHPTVPNPYNLLSSLPPSHTWYSVLDLKDAFFCLKLHPNSQPLFAFEWRDPEKGNTGQLTWTRLPQGFKNSPTLFNEALHRDLASFRALNPQVVMLQYVDDLLVAAPTYRDCKEGTRRLLQELSKLGYRVSAKKAQLCREEVTYLGYLLKGGKRWLTPARKATVMKIPTPTTPRQVREFLGTAGFCRLWIPGFASLAAPLYPLTRPKVPFTWTEAHQEAFGRIKEALLSAPALALPDLTKPFALYVDEKEGVARGVLTQTLGPWRRPVAYLSKKLDPVASGWPTCLKAIAAVALLLKDADKLTLGQNVLVIAPHNLESIVRQPPDRWMTNARMTHYQSLLLNERVSFAPPAILNPATLLPVESDDTPIHICSEILAEETGTRPDLRDQPLPGVPAWYTDGSSFIMDGRRQAGAAIVDNKRTVWASNLPEGTSAQKAELIALTQALRLAEGKSINIYTDSRYAFATAHVHGAIYKQRGWLTSAGKDIKNKEEILALLEAIHLPKRVAIIHCPGHQRGTDPVATGNRKADEAAKQAAQSTRILTETTKNAGKRTADGSEFEKRTADGSEFESPKKKAKVE

SEQ ID NO: 1640 - protein, 2127 aa, synthetic construct
MPAAKRVKLDGGDKKYSIGLDIGTNSVGWAVITDEYKVPSKKFKVLGNTDRHSIKKNLIGALLFDSGETAEATRLKRTARRRYTRRKNRICYLQEIFSNEMAKVDDSFFHRLEESFLVEEDKKHERHPIFGNIVDEVAYHEKYPTIYHLRKKLVDSTDKADLRLIYLALAHMIKFRGHFLIEGDLNPDNSDVDKLFIQLVQTYNQLFEENPINASGVDAKAILSARLSKSRRLENLIAQLPGEKKNGLFGNLIALSLGLTPNFKSNFDLAEDAKLQLSKDTYDDDLDNLLAQIGDQYADLFLAAKNLSDAILLSDILRVNTEITKAPLSASMIKRYDEHHQDLTLLKALVRQQLPEKYKEIFFDQSKNGYAGYIDGGASQEEFYKFIKPILEKMDGTEELLVKLNREDLLRKQRTFDNGSIPHQIHLGELHAILRRQEDFYPFLKDNREKIEKILTFRIPYYVGPLARGNSRFAWMTRKSEETITPWNFEEVVDKGASAQSFIERMTNFDKNLPNEKVLPKHSLLYEYFTVYNELTKVKYVTEGMRKPAFLSGEQKKAIVDLLFKTNRKVTVKQLKEDYFKKIECFDSVEISGVEDRFNASLGTYHDLLKIIKDKDFLDNEENEDILEDIVLTLTLFEDREMIEERLKTYAHLFDDKVMKQLKRRRYTGWGRLSRKLINGIRDKQSGKTILDFLKSDGFANRNFMQLIHDDSLTFKEDIQKAQVSGQGDSLHEHIANLAGSPAIKKGILQTVKVVDELVKVMGRHKPENIVIEMARENQTTQKGQKNSRERMKRIEEGIKELGSQILKEHPVENTQLQNEKLYLYYLQNGRDMYVDQELDINRLSDYDVDHIVPQSFLKDDSIDNKVLTRSDKARGKSDNVPSEEVVKKMKNYWRQLLNAKLITQRKFDNLTKAERGGLSELDKAGFIKRQLVETRQITKHVAQILDSRMNTKYDENDKLIREVKVITLKSKLVSDFRKDFQFYKVREINNYHHAHDAYLNAVVGTALIKKYPKLESEFVYGDYKVYDVRKMIAKSEQEIGKATAKYFFYSNIMNFFKTEITLANGEIRKRPLIETNGETGEIVWDKGRDFATVRKVLSMPQVNIVKKTEVQTGGFSKESILPKRNSDKLIARKKDWDPKKYGGFDSPTVAYSVLVVAKVEKGKSKKLKSVKELLGITIMERSSFEKNPIDFLEAKGYKEVKKDLIIKLPKYSLFELENGRKRMLASAGELQKGNELALPSKYVNFLYLASHYEKLKGSPEDNEQKQLFVEQHKHYLDEIIEQISEFSKRVILADANLDKVLSAYNKHRDKPIREQAENIIHLFTLTNLGAPAAFKYFDTTIDRKRYTSTKEVLDATLIHQSITGLYETRIDLSQLGGDGGPAPGGSEAAAKGGLLGRDLLTKLKAQIQFSTEGPQVTWEDRPAMCLVLNLEEEYRLHEKPVPPSIDPSWLQLFPMVWAEKAGMGLANQVPPVVVELKSDASPVAVRQYPMSKEAREGIRPHIQRFLDLGILVPCQSPWNTPLLPVKKPGTNDYRPVQDLREVNKRVQDIHPTVPNPYNLLSSLPPSHTWYSVLDLKDAFFCLKLHPNSQPLFAFEWRDPEKGNTGQLTWTRLPQGFKNSPTLFNEALHRDLASFRALNPQVVMLQYVDDLLVAAPTYRDCKEGTRRLLQELSKLGYRVSAKKAQLCREEVTYLGYLLKGGKRWLTPARKATVMKIPTPTTPRQVREFLGTAGFCRLWIPGFASLAAPLYPLTRPKVPFTWTEAHQEAFGRIKEALLSAPALALPDLTKPFALYVDEKEGVARGVLTQTLGPWRRPVAYLSKKLDPVASGWPTCLKAIAAVALLLKDADKLTLGQNVLVIAPHNLESIVRQPPDRWMTNARMTHYQSLLLNERVSFAPPAILNPATLLPVESDDTPIHICSEILAEETGTRPDLRDQPLPGVPAWYTDGSSFIMDGRRQAGAAIVDNKRTVWASNLPEGTSAQKAELIALTQALRLAEGKSINIYTDSRYAFATAHVHGAIYKQRGWLTSAGKDIKNKEEILALLEAIHLPKRVAIIHCPGHQRGTDPVATGNRKADEAAKQAAQSTRILTETTKNAGKRTADGSEFEKRTADGSEFESPKKKAKVE

SEQ ID NO: 1641 - protein, 2127 aa, synthetic construct
MPAAKRVKLDGGDKKYSIGLDIGTNSVGWAVITDEYKVPSKKFKVLGNTDRHSIKKNLIGALLFDSGETAEATRLKRTARRRYTRRKNRICYLQEIFSNEMAKVDDSFFHRLEESFLVEEDKKHERHPIFGNIVDEVAYHEKYPTIYHLRKKLVDSTDKADLRLIYLALAHMIKFRGHFLIEGDLNPDNSDVDKLFIQLVQTYNQLFEENPINASGVDAKAILSARLSKSRRLENLIAQLPGEKKNGLFGNLIALSLGLTPNFKSNFDLAEDAKLQLSKDTYDDDLDNLLAQIGDQYADLFLAAKNLSDAILLSDILRVNTEITKAPLSASMIKRYDEHHQDLTLLKALVRQQLPEKYKEIFFDQSKNGYAGYIDGGASQEEFYKFIKPILEKMDGTEELLVKLNREDLLRKQRTFDNGSIPHQIHLGELHAILRRQEDFYPFLKDNREKIEKILTFRIPYYVGPLARGNSRFAWMTRKSEETITPWNFEEVVDKGASAQSFIERMTNFDKNLPNEKVLPKHSLLYEYFTVYNELTKVKYVTEGMRKPAFLSGEQKKAIVDLLFKTNRKVTVKQLKEDYFKKIECFDSVEISGVEDRFNASLGTYHDLLKIIKDKDFLDNEENEDILEDIVLTLTLFEDREMIEERLKTYAHLFDDKVMKQLKRRRYTGWGRLSRKLINGIRDKQSGKTILDFLKSDGFANRNFMQLIHDDSLTFKEDIQKAQVSGQGDSLHEHIANLAGSPAIKKGILQTVKVVDELVKVMGRHKPENIVIEMARENQTTQKGQKNSRERMKRIEEGIKELGSQILKEHPVENTQLQNEKLYLYYLQNGRDMYVDQELDINRLSDYDVDHIVPQSFLKDDSIDNKVLTRSDKARGKSDNVPSEEVVKKMKNYWRQLLNAKLITQRKFDNLTKAERGGLSELDKAGFIKRQLVETRQITKHVAQILDSRMNTKYDENDKLIREVKVITLKSKLVSDFRKDFQFYKVREINNYHHAHDAYLNAVVGTALIKKYPKLESEFVYGDYKVYDVRKMIAKSEQEIGKATAKYFFYSNIMNFFKTEITLANGEIRKRPLIETNGETGEIVWDKGRDFATVRKVLSMPQVNIVKKTEVQTGGFSKESILPKRNSDKLIARKKDWDPKKYGGFDSPTVAYSVLVVAKVEKGKSKKLKSVKELLGITIMERSSFEKNPIDFLEAKGYKEVKKDLIIKLPKYSLFELENGRKRMLASAGELQKGNELALPSKYVNFLYLASHYEKLKGSPEDNEQKQLFVEQHKHYLDEIIEQISEFSKRVILADANLDKVLSAYNKHRDKPIREQAENIIHLFTLTNLGAPAAFKYFDTTIDRKRYTSTKEVLDATLIHQSITGLYETRIDLSQLGGDGGPAPEAAAKGGSGGLLGRDLLTKLKAQIQFSTEGPQVTWEDRPAMCLVLNLEEEYRLHEKPVPPSIDPSWLQLFPMVWAEKAGMGLANQVPPVVVELKSDASPVAVRQYPMSKEAREGIRPHIQRFLDLGILVPCQSPWNTPLLPVKKPGTNDYRPVQDLREVNKRVQDIHPTVPNPYNLLSSLPPSHTWYSVLDLKDAFFCLKLHPNSQPLFAFEWRDPEKGNTGQLTWTRLPQGFKNSPTLFNEALHRDLASFRALNPQVVMLQYVDDLLVAAPTYRDCKEGTRRLLQELSKLGYRVSAKKAQLCREEVTYLGYLLKGGKRWLTPARKATVMKIPTPTTPRQVREFLGTAGFCRLWIPGFASLAAPLYPLTRPKVPFTWTEAHQEAFGRIKEALLSAPALALPDLTKPFALYVDEKEGVARGVLTQTLGPWRRPVAYLSKKLDPVASGWPTCLKAIAAVALLLKDADKLTLGQNVLVIAPHNLESIVRQPPDRWMTNARMTHYQSLLLNERVSFAPPAILNPATLLPVESDDTPIHICSEILAEETGTRPDLRDQPLPGVPAWYTDGSSFIMDGRRQAGAAIVDNKRTVWASNLPEGTSAQKAELIALTQALRLAEGKSINIYTDSRYAFATAHVHGAIYKQRGWLTSAGKDIKNKEEILALLEAIHLPKRVAIIHCPGHQRGTDPVATGNRKADEAAKQAAQSTRILTETTKNAGKRTADGSEFEKRTADGSEFESPKKKAKVE

SEQ ID NO: 1642 - protein, 2122 aa, synthetic construct
MPAAKRVKLDGGDKKYSIGLDIGTNSVGWAVITDEYKVPSKKFKVLGNTDRHSIKKNLIGALLFDSGETAEATRLKRTARRRYTRRKNRICYLQEIFSNEMAKVDDSFFHRLEESFLVEEDKKHERHPIFGNIVDEVAYHEKYPTIYHLRKKLVDSTDKADLRLIYLALAHMIKFRGHFLIEGDLNPDNSDVDKLFIQLVQTYNQLFEENPINASGVDAKAILSARLSKSRRLENLIAQLPGEKKNGLFGNLIALSLGLTPNFKSNFDLAEDAKLQLSKDTYDDDLDNLLAQIGDQYADLFLAAKNLSDAILLSDILRVNTEITKAPLSASMIKRYDEHHQDLTLLKALVRQQLPEKYKEIFFDQSKNGYAGYIDGGASQEEFYKFIKPILEKMDGTEELLVKLNREDLLRKQRTFDNGSIPHQIHLGELHAILRRQEDFYPFLKDNREKIEKILTFRIPYYVGPLARGNSRFAWMTRKSEETITPWNFEEVVDKGASAQSFIERMTNFDKNLPNEKVLPKHSLLYEYFTVYNELTKVKYVTEGMRKPAFLSGEQKKAIVDLLFKTNRKVTVKQLKEDYFKKIECFDSVEISGVEDRFNASLGTYHDLLKIIKDKDFLDNEENEDILEDIVLTLTLFEDREMIEERLKTYAHLFDDKVMKQLKRRRYTGWGRLSRKLINGIRDKQSGKTILDFLKSDGFANRNFMQLIHDDSLTFKEDIQKAQVSGQGDSLHEHIANLAGSPAIKKGILQTVKVVDELVKVMGRHKPENIVIEMARENQTTQKGQKNSRERMKRIEEGIKELGSQILKEHPVENTQLQNEKLYLYYLQNGRDMYVDQELDINRLSDYDVDHIVPQSFLKDDSIDNKVLTRSDKARGKSDNVPSEEVVKKMKNYWRQLLNAKLITQRKFDNLTKAERGGLSELDKAGFIKRQLVETRQITKHVAQILDSRMNTKYDENDKLIREVKVITLKSKLVSDFRKDFQFYKVREINNYHHAHDAYLNAVVGTALIKKYPKLESEFVYGDYKVYDVRKMIAKSEQEIGKATAKYFFYSNIMNFFKTEITLANGEIRKRPLIETNGETGEIVWDKGRDFATVRKVLSMPQVNIVKKTEVQTGGFSKESILPKRNSDKLIARKKDWDPKKYGGFDSPTVAYSVLVVAKVEKGKSKKLKSVKELLGITIMERSSFEKNPIDFLEAKGYKEVKKDLIIKLPKYSLFELENGRKRMLASAGELQKGNELALPSKYVNFLYLASHYEKLKGSPEDNEQKQLFVEQHKHYLDEIIEQISEFSKRVILADANLDKVLSAYNKHRDKPIREQAENIIHLFTLTNLGAPAAFKYFDTTIDRKRYTSTKEVLDATLIHQSITGLYETRIDLSQLGGDGGGGGGGSGGLLGRDLLTKLKAQIQFSTEGPQVTWEDRPAMCLVLNLEEEYRLHEKPVPPSIDPSWLQLFPMVWAEKAGMGLANQVPPVVVELKSDASPVAVRQYPMSKEAREGIRPHIQRFLDLGILVPCQSPWNTPLLPVKKPGTNDYRPVQDLREVNKRVQDIHPTVPNPYNLLSSLPPSHTWYSVLDLKDAFFCLKLHPNSQPLFAFEWRDPEKGNTGQLTWTRLPQGFKNSPTLFNEALHRDLASFRALNPQVVMLQYVDDLLVAAPTYRDCKEGTRRLLQELSKLGYRVSAKKAQLCREEVTYLGYLLKGGKRWLTPARKATVMKIPTPTTPRQVREFLGTAGFCRLWIPGFASLAAPLYPLTRPKVPFTWTEAHQEAFGRIKEALLSAPALALPDLTKPFALYVDEKEGVARGVLTQTLGPWRRPVAYLSKKLDPVASGWPTCLKAIAAVALLLKDADKLTLGQNVLVIAPHNLESIVRQPPDRWMTNARMTHYQSLLLNERVSFAPPAILNPATLLPVESDDTPIHICSEILAEETGTRPDLRDQPLPGVPAWYTDGSSFIMDGRRQAGAAIVDNKRTVWASNLPEGTSAQKAELIALTQALRLAEGKSINIYTDSRYAFATAHVHGAIYKQRGWLTSAGKDIKNKEEILALLEAIHLPKRVAIIHCPGHQRGTDPVATGNRKADEAAKQAAQSTRILTETTKNAGKRTADGSEFEKRTADGSEFESPKKKAKVE

SEQ ID NO: 1643 - protein, 2121 aa, synthetic construct
MPAAKRVKLDGGDKKYSIGLDIGTNSVGWAVITDEYKVPSKKFKVLGNTDRHSIKKNLIGALLFDSGETAEATRLKRTARRRYTRRKNRICYLQEIFSNEMAKVDDSFFHRLEESFLVEEDKKHERHPIFGNIVDEVAYHEKYPTIYHLRKKLVDSTDKADLRLIYLALAHMIKFRGHFLIEGDLNPDNSDVDKLFIQLVQTYNQLFEENPINASGVDAKAILSARLSKSRRLENLIAQLPGEKKNGLFGNLIALSLGLTPNFKSNFDLAEDAKLQLSKDTYDDDLDNLLAQIGDQYADLFLAAKNLSDAILLSDILRVNTEITKAPLSASMIKRYDEHHQDLTLLKALVRQQLPEKYKEIFFDQSKNGYAGYIDGGASQEEFYKFIKPILEKMDGTEELLVKLNREDLLRKQRTFDNGSIPHQIHLGELHAILRRQEDFYPFLKDNREKIEKILTFRIPYYVGPLARGNSRFAWMTRKSEETITPWNFEEVVDKGASAQSFIERMTNFDKNLPNEKVLPKHSLLYEYFTVYNELTKVKYVTEGMRKPAFLSGEQKKAIVDLLFKTNRKVTVKQLKEDYFKKIECFDSVEISGVEDRFNASLGTYHDLLKIIKDKDFLDNEENEDILEDIVLTLTLFEDREMIEERLKTYAHLFDDKVMKQLKRRRYTGWGRLSRKLINGIRDKQSGKTILDFLKSDGFANRNFMQLIHDDSLTFKEDIQKAQVSGQGDSLHEHIANLAGSPAIKKGILQTVKVVDELVKVMGRHKPENIVIEMARENQTTQKGQKNSRERMKRIEEGIKELGSQILKEHPVENTQLQNEKLYLYYLQNGRDMYVDQELDINRLSDYDVDHIVPQSFLKDDSIDNKVLTRSDKARGKSDNVPSEEVVKKMKNYWRQLLNAKLITQRKFDNLTKAERGGLSELDKAGFIKRQLVETRQITKHVAQILDSRMNTKYDENDKLIREVKVITLKSKLVSDFRKDFQFYKVREINNYHHAHDAYLNAVVGTALIKKYPKLESEFVYGDYKVYDVRKMIAKSEQEIGKATAKYFFYSNIMNFFKTEITLANGEIRKRPLIETNGETGEIVWDKGRDFATVRKVLSMPQVNIVKKTEVQTGGFSKESILPKRNSDKLIARKKDWDPKKYGGFDSPTVAYSVLVVAKVEKGKSKKLKSVKELLGITIMERSSFEKNPIDFLEAKGYKEVKKDLIIKLPKYSLFELENGRKRMLASAGELQKGNELALPSKYVNFLYLASHYEKLKGSPEDNEQKQLFVEQHKHYLDEIIEQISEFSKRVILADANLDKVLSAYNKHRDKPIREQAENIIHLFTLTNLGAPAAFKYFDTTIDRKRYTSTKEVLDATLIHQSITGLYETRIDLSQLGGDGGGGGGGGGLLGRDLLTKLKAQIQFSTEGPQVTWEDRPAMCLVLNLEEEYRLHEKPVPPSIDPSWLQLFPMVWAEKAGMGLANQVPPVVVELKSDASPVAVRQYPMSKEAREGIRPHIQRFLDLGILVPCQSPWNTPLLPVKKPGTNDYRPVQDLREVNKRVQDIHPTVPNPYNLLSSLPPSHTWYSVLDLKDAFFCLKLHPNSQPLFAFEWRDPEKGNTGQLTWTRLPQGFKNSPTLFNEALHRDLASFRALNPQVVMLQYVDDLLVAAPTYRDCKEGTRRLLQELSKLGYRVSAKKAQLCREEVTYLGYLLKGGKRWLTPARKATVMKIPTPTTPRQVREFLGTAGFCRLWIPGFASLAAPLYPLTRPKVPFTWTEAHQEAFGRIKEALLSAPALALPDLTKPFALYVDEKEGVARGVLTQTLGPWRRPVAYLSKKLDPVASGWPTCLKAIAAVALLLKDADKLTLGQNVLVIAPHNLESIVRQPPDRWMTNARMTHYQSLLLNERVSFAPPAILNPATLLPVESDDTPIHICSEILAEETGTRPDLRDQPLPGVPAWYTDGSSFIMDGRRQAGAAIVDNKRTVWASNLPEGTSAQKAELIALTQALRLAEGKSINIYTDSRYAFATAHVHGAIYKQRGWLTSAGKDIKNKEEILALLEAIHLPKRVAIIHCPGHQRGTDPVATGNRKADEAAKQAAQSTRILTETTKNAGKRTADGSEFEKRTADGSEFESPKKKAKVE

SEQ ID NO: 1644 - protein, 2127 aa, synthetic construct
MPAAKRVKLDGGDKKYSIGLDIGTNSVGWAVITDEYKVPSKKFKVLGNTDRHSIKKNLIGALLFDSGETAEATRLKRTARRRYTRRKNRICYLQEIFSNEMAKVDDSFFHRLEESFLVEEDKKHERHPIFGNIVDEVAYHEKYPTIYHLRKKLVDSTDKADLRLIYLALAHMIKFRGHFLIEGDLNPDNSDVDKLFIQLVQTYNQLFEENPINASGVDAKAILSARLSKSRRLENLIAQLPGEKKNGLFGNLIALSLGLTPNFKSNFDLAEDAKLQLSKDTYDDDLDNLLAQIGDQYADLFLAAKNLSDAILLSDILRVNTEITKAPLSASMIKRYDEHHQDLTLLKALVRQQLPEKYKEIFFDQSKNGYAGYIDGGASQEEFYKFIKPILEKMDGTEELLVKLNREDLLRKQRTFDNGSIPHQIHLGELHAILRRQEDFYPFLKDNREKIEKILTFRIPYYVGPLARGNSRFAWMTRKSEETITPWNFEEVVDKGASAQSFIERMTNFDKNLPNEKVLPKHSLLYEYFTVYNELTKVKYVTEGMRKPAFLSGEQKKAIVDLLFKTNRKVTVKQLKEDYFKKIECFDSVEISGVEDRFNASLGTYHDLLKIIKDKDFLDNEENEDILEDIVLTLTLFEDREMIEERLKTYAHLFDDKVMKQLKRRRYTGWGRLSRKLINGIRDKQSGKTILDFLKSDGFANRNFMQLIHDDSLTFKEDIQKAQVSGQGDSLHEHIANLAGSPAIKKGILQTVKVVDELVKVMGRHKPENIVIEMARENQTTQKGQKNSRERMKRIEEGIKELGSQILKEHPVENTQLQNEKLYLYYLQNGRDMYVDQELDINRLSDYDVDHIVPQSFLKDDSIDNKVLTRSDKARGKSDNVPSEEVVKKMKNYWRQLLNAKLITQRKFDNLTKAERGGLSELDKAGFIKRQLVETRQITKHVAQILDSRMNTKYDENDKLIREVKVITLKSKLVSDFRKDFQFYKVREINNYHHAHDAYLNAVVGTALIKKYPKLESEFVYGDYKVYDVRKMIAKSEQEIGKATAKYFFYSNIMNFFKTEITLANGEIRKRPLIETNGETGEIVWDKGRDFATVRKVLSMPQVNIVKKTEVQTGGFSKESILPKRNSDKLIARKKDWDPKKYGGFDSPTVAYSVLVVAKVEKGKSKKLKSVKELLGITIMERSSFEKNPIDFLEAKGYKEVKKDLIIKLPKYSLFELENGRKRMLASAGELQKGNELALPSKYVNFLYLASHYEKLKGSPEDNEQKQLFVEQHKHYLDEIIEQISEFSKRVILADANLDKVLSAYNKHRDKPIREQAENIIHLFTLTNLGAPAAFKYFDTTIDRKRYTSTKEVLDATLIHQSITGLYETRIDLSQLGGDGGGGSGSSEAAAKGGLLGRDLLTKLKAQIQFSTEGPQVTWEDRPAMCLVLNLEEEYRLHEKPVPPSIDPSWLQLFPMVWAEKAGMGLANQVPPVVVELKSDASPVAVRQYPMSKEAREGIRPHIQRFLDLGILVPCQSPWNTPLLPVKKPGTNDYRPVQDLREVNKRVQDIHPTVPNPYNLLSSLPPSHTWYSVLDLKDAFFCLKLHPNSQPLFAFEWRDPEKGNTGQLTWTRLPQGFKNSPTLFNEALHRDLASFRALNPQVVMLQYVDDLLVAAPTYRDCKEGTRRLLQELSKLGYRVSAKKAQLCREEVTYLGYLLKGGKRWLTPARKATVMKIPTPTTPRQVREFLGTAGFCRLWIPGFASLAAPLYPLTRPKVPFTWTEAHQEAFGRIKEALLSAPALALPDLTKPFALYVDEKEGVARGVLTQTLGPWRRPVAYLSKKLDPVASGWPTCLKAIAAVALLLKDADKLTLGQNVLVIAPHNLESIVRQPPDRWMTNARMTHYQSLLLNERVSFAPPAILNPATLLPVESDDTPIHICSEILAEETGTRPDLRDQPLPGVPAWYTDGSSFIMDGRRQAGAAIVDNKRTVWASNLPEGTSAQKAELIALTQALRLAEGKSINIYTDSRYAFATAHVHGAIYKQRGWLTSAGKDIKNKEEILALLEAIHLPKRVAIIHCPGHQRGTDPVATGNRKADEAAKQAAQSTRILTETTKNAGKRTADGSEFEKRTADGSEFESPKKKAKVE

SEQ ID NO: 1645 - protein, 2127 aa, synthetic construct
MPAAKRVKLDGGDKKYSIGLDIGTNSVGWAVITDEYKVPSKKFKVLGNTDRHSIKKNLIGALLFDSGETAEATRLKRTARRRYTRRKNRICYLQEIFSNEMAKVDDSFFHRLEESFLVEEDKKHERHPIFGNIVDEVAYHEKYPTIYHLRKKLVDSTDKADLRLIYLALAHMIKFRGHFLIEGDLNPDNSDVDKLFIQLVQTYNQLFEENPINASGVDAKAILSARLSKSRRLENLIAQLPGEKKNGLFGNLIALSLGLTPNFKSNFDLAEDAKLQLSKDTYDDDLDNLLAQIGDQYADLFLAAKNLSDAILLSDILRVNTEITKAPLSASMIKRYDEHHQDLTLLKALVRQQLPEKYKEIFFDQSKNGYAGYIDGGASQEEFYKFIKPILEKMDGTEELLVKLNREDLLRKQRTFDNGSIPHQIHLGELHAILRRQEDFYPFLKDNREKIEKILTFRIPYYVGPLARGNSRFAWMTRKSEETITPWNFEEVVDKGASAQSFIERMTNFDKNLPNEKVLPKHSLLYEYFTVYNELTKVKYVTEGMRKPAFLSGEQKKAIVDLLFKTNRKVTVKQLKEDYFKKIECFDSVEISGVEDRFNASLGTYHDLLKIIKDKDFLDNEENEDILEDIVLTLTLFEDREMIEERLKTYAHLFDDKVMKQLKRRRYTGWGRLSRKLINGIRDKQSGKTILDFLKSDGFANRNFMQLIHDDSLTFKEDIQKAQVSGQGDSLHEHIANLAGSPAIKKGILQTVKVVDELVKVMGRHKPENIVIEMARENQTTQKGQKNSRERMKRIEEGIKELGSQILKEHPVENTQLQNEKLYLYYLQNGRDMYVDQELDINRLSDYDVDHIVPQSFLKDDSIDNKVLTRSDKARGKSDNVPSEEVVKKMKNYWRQLLNAKLITQRKFDNLTKAERGGLSELDKAGFIKRQLVETRQITKHVAQILDSRMNTKYDENDKLIREVKVITLKSKLVSDFRKDFQFYKVREINNYHHAHDAYLNAVVGTALIKKYPKLESEFVYGDYKVYDVRKMIAKSEQEIGKATAKYFFYSNIMNFFKTEITLANGEIRKRPLIETNGETGEIVWDKGRDFATVRKVLSMPQVNIVKKTEVQTGGFSKESILPKRNSDKLIARKKDWDPKKYGGFDSPTVAYSVLVVAKVEKGKSKKLKSVKELLGITIMERSSFEKNPIDFLEAKGYKEVKKDLIIKLPKYSLFELENGRKRMLASAGELQKGNELALPSKYVNFLYLASHYEKLKGSPEDNEQKQLFVEQHKHYLDEIIEQISEFSKRVILADANLDKVLSAYNKHRDKPIREQAENIIHLFTLTNLGAPAAFKYFDTTIDRKRYTSTKEVLDATLIHQSITGLYETRIDLSQLGGDGGEAAAKGGSGSSGGLLGRDLLTKLKAQIQFSTEGPQVTWEDRPAMCLVLNLEEEYRLHEKPVPPSIDPSWLQLFPMVWAEKAGMGLANQVPPVVVELKSDASPVAVRQYPMSKEAREGIRPHIQRFLDLGILVPCQSPWNTPLLPVKKPGTNDYRPVQDLREVNKRVQDIHPTVPNPYNLLSSLPPSHTWYSVLDLKDAFFCLKLHPNSQPLFAFEWRDPEKGNTGQLTWTRLPQGFKNSPTLFNEALHRDLASFRALNPQVVMLQYVDDLLVAAPTYRDCKEGTRRLLQELSKLGYRVSAKKAQLCREEVTYLGYLLKGGKRWLTPARKATVMKIPTPTTPRQVREFLGTAGFCRLWIPGFASLAAPLYPLTRPKVPFTWTEAHQEAFGRIKEALLSAPALALPDLTKPFALYVDEKEGVARGVLTQTLGPWRRPVAYLSKKLDPVASGWPTCLKAIAAVALLLKDADKLTLGQNVLVIAPHNLESIVRQPPDRWMTNARMTHYQSLLLNERVSFAPPAILNPATLLPVESDDTPIHICSEILAEETGTRPDLRDQPLPGVPAWYTDGSSFIMDGRRQAGAAIVDNKRTVWASNLPEGTSAQKAELIALTQALRLAEGKSINIYTDSRYAFATAHVHGAIYKQRGWLTSAGKDIKNKEEILALLEAIHLPKRVAIIHCPGHQRGTDPVATGNRKADEAAKQAAQSTRILTETTKNAGKRTADGSEFEKRTADGSEFESPKKKAKVE

SEQ ID NO: 1646 - protein, 2127 aa, synthetic construct
MPAAKRVKLDGGDKKYSIGLDIGTNSVGWAVITDEYKVPSKKFKVLGNTDRHSIKKNLIGALLFDSGETAEATRLKRTARRRYTRRKNRICYLQEIFSNEMAKVDDSFFHRLEESFLVEEDKKHERHPIFGNIVDEVAYHEKYPTIYHLRKKLVDSTDKADLRLIYLALAHMIKFRGHFLIEGDLNPDNSDVDKLFIQLVQTYNQLFEENPINASGVDAKAILSARLSKSRRLENLIAQLPGEKKNGLFGNLIALSLGLTPNFKSNFDLAEDAKLQLSKDTYDDDLDNLLAQIGDQYADLFLAAKNLSDAILLSDILRVNTEITKAPLSASMIKRYDEHHQDLTLLKALVRQQLPEKYKEIFFDQSKNGYAGYIDGGASQEEFYKFIKPILEKMDGTEELLVKLNREDLLRKQRTFDNGSIPHQIHLGELHAILRRQEDFYPFLKDNREKIEKILTFRIPYYVGPLARGNSRFAWMTRKSEETITPWNFEEVVDKGASAQSFIERMTNFDKNLPNEKVLPKHSLLYEYFTVYNELTKVKYVTEGMRKPAFLSGEQKKAIVDLLFKTNRKVTVKQLKEDYFKKIECFDSVEISGVEDRFNASLGTYHDLLKIIKDKDFLDNEENEDILEDIVLTLTLFEDREMIEERLKTYAHLFDDKVMKQLKRRRYTGWGRLSRKLINGIRDKQSGKTILDFLKSDGFANRNFMQLIHDDSLTFKEDIQKAQVSGQGDSLHEHIANLAGSPAIKKGILQTVKVVDELVKVMGRHKPENIVIEMARENQTTQKGQKNSRERMKRIEEGIKELGSQILKEHPVENTQLQNEKLYLYYLQNGRDMYVDQELDINRLSDYDVDHIVPQSFLKDDSIDNKVLTRSDKARGKSDNVPSEEVVKKMKNYWRQLLNAKLITQRKFDNLTKAERGGLSELDKAGFIKRQLVETRQITKHVAQILDSRMNTKYDENDKLIREVKVITLKSKLVSDFRKDFQFYKVREINNYHHAHDAYLNAVVGTALIKKYPKLESEFVYGDYKVYDVRKMIAKSEQEIGKATAKYFFYSNIMNFFKTEITLANGEIRKRPLIETNGETGEIVWDKGRDFATVRKVLSMPQVNIVKKTEVQTGGFSKESILPKRNSDKLIARKKDWDPKKYGGFDSPTVAYSVLVVAKVEKGKSKKLKSVKELLGITIMERSSFEKNPIDFLEAKGYKEVKKDLIIKLPKYSLFELENGRKRMLASAGELQKGNELALPSKYVNFLYLASHYEKLKGSPEDNEQKQLFVEQHKHYLDEIIEQISEFSKRVILADANLDKVLSAYNKHRDKPIREQAENIIHLFTLTNLGAPAAFKYFDTTIDRKRYTSTKEVLDATLIHQSITGLYETRIDLSQLGGDGGEAAAKGGGGGSGGLLGRDLLTKLKAQIQFSTEGPQVTWEDRPAMCLVLNLEEEYRLHEKPVPPSIDPSWLQLFPMVWAEKAGMGLANQVPPVVVELKSDASPVAVRQYPMSKEAREGIRPHIQRFLDLGILVPCQSPWNTPLLPVKKPGTNDYRPVQDLREVNKRVQDIHPTVPNPYNLLSSLPPSHTWYSVLDLKDAFFCLKLHPNSQPLFAFEWRDPEKGNTGQLTWTRLPQGFKNSPTLFNEALHRDLASFRALNPQVVMLQYVDDLLVAAPTYRDCKEGTRRLLQELSKLGYRVSAKKAQLCREEVTYLGYLLKGGKRWLTPARKATVMKIPTPTTPRQVREFLGTAGFCRLWIPGFASLAAPLYPLTRPKVPFTWTEAHQEAFGRIKEALLSAPALALPDLTKPFALYVDEKEGVARGVLTQTLGPWRRPVAYLSKKLDPVASGWPTCLKAIAAVALLLKDADKLTLGQNVLVIAPHNLESIVRQPPDRWMTNARMTHYQSLLLNERVSFAPPAILNPATLLPVESDDTPIHICSEILAEETGTRPDLRDQPLPGVPAWYTDGSSFIMDGRRQAGAAIVDNKRTVWASNLPEGTSAQKAELIALTQALRLAEGKSINIYTDSRYAFATAHVHGAIYKQRGWLTSAGKDIKNKEEILALLEAIHLPKRVAIIHCPGHQRGTDPVATGNRKADEAAKQAAQSTRILTETTKNAGKRTADGSEFEKRTADGSEFESPKKKAKVE

SEQ ID NO: 1647 - protein, 2127 aa, synthetic construct
MPAAKRVKLDGGDKKYSIGLDIGTNSVGWAVITDEYKVPSKKFKVLGNTDRHSIKKNLIGALLFDSGETAEATRLKRTARRRYTRRKNRICYLQEIFSNEMAKVDDSFFHRLEESFLVEEDKKHERHPIFGNIVDEVAYHEKYPTIYHLRKKLVDSTDKADLRLIYLALAHMIKFRGHFLIEGDLNPDNSDVDKLFIQLVQTYNQLFEENPINASGVDAKAILSARLSKSRRLENLIAQLPGEKKNGLFGNLIALSLGLTPNFKSNFDLAEDAKLQLSKDTYDDDLDNLLAQIGDQYADLFLAAKNLSDAILLSDILRVNTEITKAPLSASMIKRYDEHHQDLTLLKALVRQQLPEKYKEIFFDQSKNGYAGYIDGGASQEEFYKFIKPILEKMDGTEELLVKLNREDLLRKQRTFDNGSIPHQIHLGELHAILRRQEDFYPFLKDNREKIEKILTFRIPYYVGPLARGNSRFAWMTRKSEETITPWNFEEVVDKGASAQSFIERMTNFDKNLPNEKVLPKHSLLYEYFTVYNELTKVKYVTEGMRKPAFLSGEQKKAIVDLLFKTNRKVTVKQLKEDYFKKIECFDSVEISGVEDRFNASLGTYHDLLKIIKDKDFLDNEENEDILEDIVLTLTLFEDREMIEERLKTYAHLFDDKVMKQLKRRRYTGWGRLSRKLINGIRDKQSGKTILDFLKSDGFANRNFMQLIHDDSLTFKEDIQKAQVSGQGDSLHEHIANLAGSPAIKKGILQTVKVVDELVKVMGRHKPENIVIEMARENQTTQKGQKNSRERMKRIEEGIKELGSQILKEHPVENTQLQNEKLYLYYLQNGRDMYVDQELDINRLSDYDVDHIVPQSFLKDDSIDNKVLTRSDKARGKSDNVPSEEVVKKMKNYWRQLLNAKLITQRKFDNLTKAERGGLSELDKAGFIKRQLVETRQITKHVAQILDSRMNTKYDENDKLIREVKVITLKSKLVSDFRKDFQFYKVREINNYHHAHDAYLNAVVGTALIKKYPKLESEFVYGDYKVYDVRKMIAKSEQEIGKATAKYFFYSNIMNFFKTEITLANGEIRKRPLIETNGETGEIVWDKGRDFATVRKVLSMPQVNIVKKTEVQTGGFSKESILPKRNSDKLIARKKDWDPKKYGGFDSPTVAYSVLVVAKVEKGKSKKLKSVKELLGITIMERSSFEKNPIDFLEAKGYKEVKKDLIIKLPKYSLFELENGRKRMLASAGELQKGNELALPSKYVNFLYLASHYEKLKGSPEDNEQKQLFVEQHKHYLDEIIEQISEFSKRVILADANLDKVLSAYNKHRDKPIREQAENIIHLFTLTNLGAPAAFKYFDTTIDRKRYTSTKEVLDATLIHQSITGLYETRIDLSQLGGDGGGGSEAAAKGGGGGLLGRDLLTKLKAQIQFSTEGPQVTWEDRPAMCLVLNLEEEYRLHEKPVPPSIDPSWLQLFPMVWAEKAGMGLANQVPPVVVELKSDASPVAVRQYPMSKEAREGIRPHIQRFLDLGILVPCQSPWNTPLLPVKKPGTNDYRPVQDLREVNKRVQDIHPTVPNPYNLLSSLPPSHTWYSVLDLKDAFFCLKLHPNSQPLFAFEWRDPEKGNTGQLTWTRLPQGFKNSPTLFNEALHRDLASFRALNPQVVMLQYVDDLLVAAPTYRDCKEGTRRLLQELSKLGYRVSAKKAQLCREEVTYLGYLLKGGKRWLTPARKATVMKIPTPTTPRQVREFLGTAGFCRLWIPGFASLAAPLYPLTRPKVPFTWTEAHQEAFGRIKEALLSAPALALPDLTKPFALYVDEKEGVARGVLTQTLGPWRRPVAYLSKKLDPVASGWPTCLKAIAAVALLLKDADKLTLGQNVLVIAPHNLESIVRQPPDRWMTNARMTHYQSLLLNERVSFAPPAILNPATLLPVESDDTPIHICSEILAEETGTRPDLRDQPLPGVPAWYTDGSSFIMDGRRQAGAAIVDNKRTVWASNLPEGTSAQKAELIALTQALRLAEGKSINIYTDSRYAFATAHVHGAIYKQRGWLTSAGKDIKNKEEILALLEAIHLPKRVAIIHCPGHQRGTDPVATGNRKADEAAKQAAQSTRILTETTKNAGKRTADGSEFEKRTADGSEFESPKKKAKVE

SEQ ID NO: 1648 - protein, 2125 aa, synthetic construct
MPAAKRVKLDGGDKKYSIGLDIGTNSVGWAVITDEYKVPSKKFKVLGNTDRHSIKKNLIGALLFDSGETAEATRLKRTARRRYTRRKNRICYLQEIFSNEMAKVDDSFFHRLEESFLVEEDKKHERHPIFGNIVDEVAYHEKYPTIYHLRKKLVDSTDKADLRLIYLALAHMIKFRGHFLIEGDLNPDNSDVDKLFIQLVQTYNQLFEENPINASGVDAKAILSARLSKSRRLENLIAQLPGEKKNGLFGNLIALSLGLTPNFKSNFDLAEDAKLQLSKDTYDDDLDNLLAQIGDQYADLFLAAKNLSDAILLSDILRVNTEITKAPLSASMIKRYDEHHQDLTLLKALVRQQLPEKYKEIFFDQSKNGYAGYIDGGASQEEFYKFIKPILEKMDGTEELLVKLNREDLLRKQRTFDNGSIPHQIHLGELHAILRRQEDFYPFLKDNREKIEKILTFRIPYYVGPLARGNSRFAWMTRKSEETITPWNFEEVVDKGASAQSFIERMTNFDKNLPNEKVLPKHSLLYEYFTVYNELTKVKYVTEGMRKPAFLSGEQKKAIVDLLFKTNRKVTVKQLKEDYFKKIECFDSVEISGVEDRFNASLGTYHDLLKIIKDKDFLDNEENEDILEDIVLTLTLFEDREMIEERLKTYAHLFDDKVMKQLKRRRYTGWGRLSRKLINGIRDKQSGKTILDFLKSDGFANRNFMQLIHDDSLTFKEDIQKAQVSGQGDSLHEHIANLAGSPAIKKGILQTVKVVDELVKVMGRHKPENIVIEMARENQTTQKGQKNSRERMKRIEEGIKELGSQILKEHPVENTQLQNEKLYLYYLQNGRDMYVDQELDINRLSDYDVDHIVPQSFLKDDSIDNKVLTRSDKARGKSDNVPSEEVVKKMKNYWRQLLNAKLITQRKFDNLTKAERGGLSELDKAGFIKRQLVETRQITKHVAQILDSRMNTKYDENDKLIREVKVITLKSKLVSDFRKDFQFYKVREINNYHHAHDAYLNAVVGTALIKKYPKLESEFVYGDYKVYDVRKMIAKSEQEIGKATAKYFFYSNIMNFFKTEITLANGEIRKRPLIETNGETGEIVWDKGRDFATVRKVLSMPQVNIVKKTEVQTGGFSKESILPKRNSDKLIARKKDWDPKKYGGFDSPTVAYSVLVVAKVEKGKSKKLKSVKELLGITIMERSSFEKNPIDFLEAKGYKEVKKDLIIKLPKYSLFELENGRKRMLASAGELQKGNELALPSKYVNFLYLASHYEKLKGSPEDNEQKQLFVEQHKHYLDEIIEQISEFSKRVILADANLDKVLSAYNKHRDKPIREQAENIIHLFTLTNLGAPAAFKYFDTTIDRKRYTSTKEVLDATLIHQSITGLYETRIDLSQLGGDGGGGSPAPGSSGGLLGRDLLTKLKAQIQFSTEGPQVTWEDRPAMCLVLNLEEEYRLHEKPVPPSIDPSWLQLFPMVWAEKAGMGLANQVPPVVVELKSDASPVAVRQYPMSKEAREGIRPHIQRFLDLGILVPCQSPWNTPLLPVKKPGTNDYRPVQDLREVNKRVQDIHPTVPNPYNLLSSLPPSHTWYSVLDLKDAFFCLKLHPNSQPLFAFEWRDPEKGNTGQLTWTRLPQGFKNSPTLFNEALHRDLASFRALNPQVVMLQYVDDLLVAAPTYRDCKEGTRRLLQELSKLGYRVSAKKAQLCREEVTYLGYLLKGGKRWLTPARKATVMKIPTPTTPRQVREFLGTAGFCRLWIPGFASLAAPLYPLTRPKVPFTWTEAHQEAFGRIKEALLSAPALALPDLTKPFALYVDEKEGVARGVLTQTLGPWRRPVAYLSKKLDPVASGWPTCLKAIAAVALLLKDADKLTLGQNVLVIAPHNLESIVRQPPDRWMTNARMTHYQSLLLNERVSFAPPAILNPATLLPVESDDTPIHICSEILAEETGTRPDLRDQPLPGVPAWYTDGSSFIMDGRRQAGAAIVDNKRTVWASNLPEGTSAQKAELIALTQALRLAEGKSINIYTDSRYAFATAHVHGAIYKQRGWLTSAGKDIKNKEEILALLEAIHLPKRVAIIHCPGHQRGTDPVATGNRKADEAAKQAAQSTRILTETTKNAGKRTADGSEFEKRTADGSEFESPKKKAKVE

SEQ ID NO: 1649 - protein, 2149 aa, synthetic construct
MPAAKRVKLDGGDKKYSIGLDIGTNSVGWAVITDEYKVPSKKFKVLGNTDRHSIKKNLIGALLFDSGETAEATRLKRTARRRYTRRKNRICYLQEIFSNEMAKVDDSFFHRLEESFLVEEDKKHERHPIFGNIVDEVAYHEKYPTIYHLRKKLVDSTDKADLRLIYLALAHMIKFRGHFLIEGDLNPDNSDVDKLFIQLVQTYNQLFEENPINASGVDAKAILSARLSKSRRLENLIAQLPGEKKNGLFGNLIALSLGLTPNFKSNFDLAEDAKLQLSKDTYDDDLDNLLAQIGDQYADLFLAAKNLSDAILLSDILRVNTEITKAPLSASMIKRYDEHHQDLTLLKALVRQQLPEKYKEIFFDQSKNGYAGYIDGGASQEEFYKFIKPILEKMDGTEELLVKLNREDLLRKQRTFDNGSIPHQIHLGELHAILRRQEDFYPFLKDNREKIEKILTFRIPYYVGPLARGNSRFAWMTRKSEETITPWNFEEVVDKGASAQSFIERMTNFDKNLPNEKVLPKHSLLYEYFTVYNELTKVKYVTEGMRKPAFLSGEQKKAIVDLLFKTNRKVTVKQLKEDYFKKIECFDSVEISGVEDRFNASLGTYHDLLKIIKDKDFLDNEENEDILEDIVLTLTLFEDREMIEERLKTYAHLFDDKVMKQLKRRRYTGWGRLSRKLINGIRDKQSGKTILDFLKSDGFANRNFMQLIHDDSLTFKEDIQKAQVSGQGDSLHEHIANLAGSPAIKKGILQTVKVVDELVKVMGRHKPENIVIEMARENQTTQKGQKNSRERMKRIEEGIKELGSQILKEHPVENTQLQNEKLYLYYLQNGRDMYVDQELDINRLSDYDVDHIVPQSFLKDDSIDNKVLTRSDKARGKSDNVPSEEVVKKMKNYWRQLLNAKLITQRKFDNLTKAERGGLSELDKAGFIKRQLVETRQITKHVAQILDSRMNTKYDENDKLIREVKVITLKSKLVSDFRKDFQFYKVREINNYHHAHDAYLNAVVGTALIKKYPKLESEFVYGDYKVYDVRKMIAKSEQEIGKATAKYFFYSNIMNFFKTEITLANGEIRKRPLIETNGETGEIVWDKGRDFATVRKVLSMPQVNIVKKTEVQTGGFSKESILPKRNSDKLIARKKDWDPKKYGGFDSPTVAYSVLVVAKVEKGKSKKLKSVKELLGITIMERSSFEKNPIDFLEAKGYKEVKKDLIIKLPKYSLFELENGRKRMLASAGELQKGNELALPSKYVNFLYLASHYEKLKGSPEDNEQKQLFVEQHKHYLDEIIEQISEFSKRVILADANLDKVLSAYNKHRDKPIREQAENIIHLFTLTNLGAPAAFKYFDTTIDRKRYTSTKEVLDATLIHQSITGLYETRIDLSQLGGDGGSGGSSGGSSGSETPGTSESATPESSGGSSGGSSGGLLGRDLLTKLKAQIQFSTEGPQVTWEDRPAMCLVLNLEEEYRLHEKPVPPSIDPSWLQLFPMVWAEKAGMGLANQVPPVVVELKSDASPVAVRQYPMSKEAREGIRPHIQRFLDLGILVPCQSPWNTPLLPVKKPGTNDYRPVQDLREVNKRVQDIHPTVPNPYNLLSSLPPSHTWYSVLDLKDAFFCLKLHPNSQPLFAFEWRDPEKGNTGQLTWTRLPQGFKNSPTLFNEALHRDLASFRALNPQVVMLQYVDDLLVAAPTYRDCKEGTRRLLQELSKLGYRVSAKKAQLCREEVTYLGYLLKGGKRWLTPARKATVMKIPTPTTPRQVREFLGTAGFCRLWIPGFASLAAPLYPLTRPKVPFTWTEAHQEAFGRIKEALLSAPALALPDLTKPFALYVDEKEGVARGVLTQTLGPWRRPVAYLSKKLDPVASGWPTCLKAIAAVALLLKDADKLTLGQNVLVIAPHNLESIVRQPPDRWMTNARMTHYQSLLLNERVSFAPPAILNPATLLPVESDDTPIHICSEILAEETGTRPDLRDQPLPGVPAWYTDGSSFIMDGRRQAGAAIVDNKRTVWASNLPEGTSAQKAELIALTQALRLAEGKSINIYTDSRYAFATAHVHGAIYKQRGWLTSAGKDIKNKEEILALLEAIHLPKRVAIIHCPGHQRGTDPVATGNRKADEAAKQAAQSTRILTETTKNAGKRTADGSEFEKRTADGSEFESPKKKAKVE

SEQ ID NO: 1650 - protein, 2121 aa, synthetic construct
MPAAKRVKLDGGDKKYSIGLDIGTNSVGWAVITDEYKVPSKKFKVLGNTDRHSIKKNLIGALLFDSGETAEATRLKRTARRRYTRRKNRICYLQEIFSNEMAKVDDSFFHRLEESFLVEEDKKHERHPIFGNIVDEVAYHEKYPTIYHLRKKLVDSTDKADLRLIYLALAHMIKFRGHFLIEGDLNPDNSDVDKLFIQLVQTYNQLFEENPINASGVDAKAILSARLSKSRRLENLIAQLPGEKKNGLFGNLIALSLGLTPNFKSNFDLAEDAKLQLSKDTYDDDLDNLLAQIGDQYADLFLAAKNLSDAILLSDILRVNTEITKAPLSASMIKRYDEHHQDLTLLKALVRQQLPEKYKEIFFDQSKNGYAGYIDGGASQEEFYKFIKPILEKMDGTEELLVKLNREDLLRKQRTFDNGSIPHQIHLGELHAILRRQEDFYPFLKDNREKIEKILTFRIPYYVGPLARGNSRFAWMTRKSEETITPWNFEEVVDKGASAQSFIERMTNFDKNLPNEKVLPKHSLLYEYFTVYNELTKVKYVTEGMRKPAFLSGEQKKAIVDLLFKTNRKVTVKQLKEDYFKKIECFDSVEISGVEDRFNASLGTYHDLLKIIKDKDFLDNEENEDILEDIVLTLTLFEDREMIEERLKTYAHLFDDKVMKQLKRRRYTGWGRLSRKLINGIRDKQSGKTILDFLKSDGFANRNFMQLIHDDSLTFKEDIQKAQVSGQGDSLHEHIANLAGSPAIKKGILQTVKVVDELVKVMGRHKPENIVIEMARENQTTQKGQKNSRERMKRIEEGIKELGSQILKEHPVENTQLQNEKLYLYYLQNGRDMYVDQELDINRLSDYDVDHIVPQSFLKDDSIDNKVLTRSDKARGKSDNVPSEEVVKKMKNYWRQLLNAKLITQRKFDNLTKAERGGLSELDKAGFIKRQLVETRQITKHVAQILDSRMNTKYDENDKLIREVKVITLKSKLVSDFRKDFQFYKVREINNYHHAHDAYLNAVVGTALIKKYPKLESEFVYGDYKVYDVRKMIAKSEQEIGKATAKYFFYSNIMNFFKTEITLANGEIRKRPLIETNGETGEIVWDKGRDFATVRKVLSMPQVNIVKKTEVQTGGFSKESILPKRNSDKLIARKKDWDPKKYGGFDSPTVAYSVLVVAKVEKGKSKKLKSVKELLGITIMERSSFEKNPIDFLEAKGYKEVKKDLIIKLPKYSLFELENGRKRMLASAGELQKGNELALPSKYVNFLYLASHYEKLKGSPEDNEQKQLFVEQHKHYLDEIIEQISEFSKRVILADANLDKVLSAYNKHRDKPIREQAENIIHLFTLTNLGAPAAFKYFDTTIDRKRYTSTKEVLDATLIHQSITGLYETRIDLSQLGGDGGGGGGSGGLLGRDLLTKLKAQIQFSTEGPQVTWEDRPAMCLVLNLEEEYRLHEKPVPPSIDPSWLQLFPMVWAEKAGMGLANQVPPVVVELKSDASPVAVRQYPMSKEAREGIRPHIQRFLDLGILVPCQSPWNTPLLPVKKPGTNDYRPVQDLREVNKRVQDIHPTVPNPYNLLSSLPPSHTWYSVLDLKDAFFCLKLHPNSQPLFAFEWRDPEKGNTGQLTWTRLPQGFKNSPTLFNEALHRDLASFRALNPQVVMLQYVDDLLVAAPTYRDCKEGTRRLLQELSKLGYRVSAKKAQLCREEVTYLGYLLKGGKRWLTPARKATVMKIPTPTTPRQVREFLGTAGFCRLWIPGFASLAAPLYPLTRPKVPFTWTEAHQEAFGRIKEALLSAPALALPDLTKPFALYVDEKEGVARGVLTQTLGPWRRPVAYLSKKLDPVASGWPTCLKAIAAVALLLKDADKLTLGQNVLVIAPHNLESIVRQPPDRWMTNARMTHYQSLLLNERVSFAPPAILNPATLLPVESDDTPIHICSEILAEETGTRPDLRDQPLPGVPAWYTDGSSFIMDGRRQAGAAIVDNKRTVWASNLPEGTSAQKAELIALTQALRLAEGKSINIYTDSRYAFATAHVHGAIYKQRGWLTSAGKDIKNKEEILALLEAIHLPKRVAIIHCPGHQRGTDPVATGNRKADEAAKQAAQSTRILTETTKNAGKRTADGSEFEKRTADGSEFESPKKKAKVE

SEQ ID NO: 1651 - protein, 2125 aa, synthetic construct
MPAAKRVKLDGGDKKYSIGLDIGTNSVGWAVITDEYKVPSKKFKVLGNTDRHSIKKNLIGALLFDSGETAEATRLKRTARRRYTRRKNRICYLQEIFSNEMAKVDDSFFHRLEESFLVEEDKKHERHPIFGNIVDEVAYHEKYPTIYHLRKKLVDSTDKADLRLIYLALAHMIKFRGHFLIEGDLNPDNSDVDKLFIQLVQTYNQLFEENPINASGVDAKAILSARLSKSRRLENLIAQLPGEKKNGLFGNLIALSLGLTPNFKSNFDLAEDAKLQLSKDTYDDDLDNLLAQIGDQYADLFLAAKNLSDAILLSDILRVNTEITKAPLSASMIKRYDEHHQDLTLLKALVRQQLPEKYKEIFFDQSKNGYAGYIDGGASQEEFYKFIKPILEKMDGTEELLVKLNREDLLRKQRTFDNGSIPHQIHLGELHAILRRQEDFYPFLKDNREKIEKILTFRIPYYVGPLARGNSRFAWMTRKSEETITPWNFEEVVDKGASAQSFIERMTNFDKNLPNEKVLPKHSLLYEYFTVYNELTKVKYVTEGMRKPAFLSGEQKKAIVDLLFKTNRKVTVKQLKEDYFKKIECFDSVEISGVEDRFNASLGTYHDLLKIIKDKDFLDNEENEDILEDIVLTLTLFEDREMIEERLKTYAHLFDDKVMKQLKRRRYTGWGRLSRKLINGIRDKQSGKTILDFLKSDGFANRNFMQLIHDDSLTFKEDIQKAQVSGQGDSLHEHIANLAGSPAIKKGILQTVKVVDELVKVMGRHKPENIVIEMARENQTTQKGQKNSRERMKRIEEGIKELGSQILKEHPVENTQLQNEKLYLYYLQNGRDMYVDQELDINRLSDYDVDHIVPQSFLKDDSIDNKVLTRSDKARGKSDNVPSEEVVKKMKNYWRQLLNAKLITQRKFDNLTKAERGGLSELDKAGFIKRQLVETRQITKHVAQILDSRMNTKYDENDKLIREVKVITLKSKLVSDFRKDFQFYKVREINNYHHAHDAYLNAVVGTALIKKYPKLESEFVYGDYKVYDVRKMIAKSEQEIGKATAKYFFYSNIMNFFKTEITLANGEIRKRPLIETNGETGEIVWDKGRDFATVRKVLSMPQVNIVKKTEVQTGGFSKESILPKRNSDKLIARKKDWDPKKYGGFDSPTVAYSVLVVAKVEKGKSKKLKSVKELLGITIMERSSFEKNPIDFLEAKGYKEVKKDLIIKLPKYSLFELENGRKRMLASAGELQKGNELALPSKYVNFLYLASHYEKLKGSPEDNEQKQLFVEQHKHYLDEIIEQISEFSKRVILADANLDKVLSAYNKHRDKPIREQAENIIHLFTLTNLGAPAAFKYFDTTIDRKRYTSTKEVLDATLIHQSITGLYETRIDLSQLGGDGGPAPGSSGGSGGLLGRDLLTKLKAQIQFSTEGPQVTWEDRPAMCLVLNLEEEYRLHEKPVPPSIDPSWLQLFPMVWAEKAGMGLANQVPPVVVELKSDASPVAVRQYPMSKEAREGIRPHIQRFLDLGILVPCQSPWNTPLLPVKKPGTNDYRPVQDLREVNKRVQDIHPTVPNPYNLLSSLPPSHTWYSVLDLKDAFFCLKLHPNSQPLFAFEWRDPEKGNTGQLTWTRLPQGFKNSPTLFNEALHRDLASFRALNPQVVMLQYVDDLLVAAPTYRDCKEGTRRLLQELSKLGYRVSAKKAQLCREEVTYLGYLLKGGKRWLTPARKATVMKIPTPTTPRQVREFLGTAGFCRLWIPGFASLAAPLYPLTRPKVPFTWTEAHQEAFGRIKEALLSAPALALPDLTKPFALYVDEKEGVARGVLTQTLGPWRRPVAYLSKKLDPVASGWPTCLKAIAAVALLLKDADKLTLGQNVLVIAPHNLESIVRQPPDRWMTNARMTHYQSLLLNERVSFAPPAILNPATLLPVESDDTPIHICSEILAEETGTRPDLRDQPLPGVPAWYTDGSSFIMDGRRQAGAAIVDNKRTVWASNLPEGTSAQKAELIALTQALRLAEGKSINIYTDSRYAFATAHVHGAIYKQRGWLTSAGKDIKNKEEILALLEAIHLPKRVAIIHCPGHQRGTDPVATGNRKADEAAKQAAQSTRILTETTKNAGKRTADGSEFEKRTADGSEFESPKKKAKVE

SEQ ID NO: 1652 - protein, 2125 aa, synthetic construct
MPAAKRVKLDGGDKKYSIGLDIGTNSVGWAVITDEYKVPSKKFKVLGNTDRHSIKKNLIGALLFDSGETAEATRLKRTARRRYTRRKNRICYLQEIFSNEMAKVDDSFFHRLEESFLVEEDKKHERHPIFGNIVDEVAYHEKYPTIYHLRKKLVDSTDKADLRLIYLALAHMIKFRGHFLIEGDLNPDNSDVDKLFIQLVQTYNQLFEENPINASGVDAKAILSARLSKSRRLENLIAQLPGEKKNGLFGNLIALSLGLTPNFKSNFDLAEDAKLQLSKDTYDDDLDNLLAQIGDQYADLFLAAKNLSDAILLSDILRVNTEITKAPLSASMIKRYDEHHQDLTLLKALVRQQLPEKYKEIFFDQSKNGYAGYIDGGASQEEFYKFIKPILEKMDGTEELLVKLNREDLLRKQRTFDNGSIPHQIHLGELHAILRRQEDFYPFLKDNREKIEKILTFRIPYYVGPLARGNSRFAWMTRKSEETITPWNFEEVVDKGASAQSFIERMTNFDKNLPNEKVLPKHSLLYEYFTVYNELTKVKYVTEGMRKPAFLSGEQKKAIVDLLFKTNRKVTVKQLKEDYFKKIECFDSVEISGVEDRFNASLGTYHDLLKIIKDKDFLDNEENEDILEDIVLTLTLFEDREMIEERLKTYAHLFDDKVMKQLKRRRYTGWGRLSRKLINGIRDKQSGKTILDFLKSDGFANRNFMQLIHDDSLTFKEDIQKAQVSGQGDSLHEHIANLAGSPAIKKGILQTVKVVDELVKVMGRHKPENIVIEMARENQTTQKGQKNSRERMKRIEEGIKELGSQILKEHPVENTQLQNEKLYLYYLQNGRDMYVDQELDINRLSDYDVDHIVPQSFLKDDSIDNKVLTRSDKARGKSDNVPSEEVVKKMKNYWRQLLNAKLITQRKFDNLTKAERGGLSELDKAGFIKRQLVETRQITKHVAQILDSRMNTKYDENDKLIREVKVITLKSKLVSDFRKDFQFYKVREINNYHHAHDAYLNAVVGTALIKKYPKLESEFVYGDYKVYDVRKMIAKSEQEIGKATAKYFFYSNIMNFFKTEITLANGEIRKRPLIETNGETGEIVWDKGRDFATVRKVLSMPQVNIVKKTEVQTGGFSKESILPKRNSDKLIARKKDWDPKKYGGFDSPTVAYSVLVVAKVEKGKSKKLKSVKELLGITIMERSSFEKNPIDFLEAKGYKEVKKDLIIKLPKYSLFELENGRKRMLASAGELQKGNELALPSKYVNFLYLASHYEKLKGSPEDNEQKQLFVEQHKHYLDEIIEQISEFSKRVILADANLDKVLSAYNKHRDKPIREQAENIIHLFTLTNLGAPAAFKYFDTTIDRKRYTSTKEVLDATLIHQSITGLYETRIDLSQLGGDGGPAPGGSGGGGGLLGRDLLTKLKAQIQFSTEGPQVTWEDRPAMCLVLNLEEEYRLHEKPVPPSIDPSWLQLFPMVWAEKAGMGLANQVPPVVVELKSDASPVAVRQYPMSKEAREGIRPHIQRFLDLGILVPCQSPWNTPLLPVKKPGTNDYRPVQDLREVNKRVQDIHPTVPNPYNLLSSLPPSHTWYSVLDLKDAFFCLKLHPNSQPLFAFEWRDPEKGNTGQLTWTRLPQGFKNSPTLFNEALHRDLASFRALNPQVVMLQYVDDLLVAAPTYRDCKEGTRRLLQELSKLGYRVSAKKAQLCREEVTYLGYLLKGGKRWLTPARKATVMKIPTPTTPRQVREFLGTAGFCRLWIPGFASLAAPLYPLTRPKVPFTWTEAHQEAFGRIKEALLSAPALALPDLTKPFALYVDEKEGVARGVLTQTLGPWRRPVAYLSKKLDPVASGWPTCLKAIAAVALLLKDADKLTLGQNVLVIAPHNLESIVRQPPDRWMTNARMTHYQSLLLNERVSFAPPAILNPATLLPVESDDTPIHICSEILAEETGTRPDLRDQPLPGVPAWYTDGSSFIMDGRRQAGAAIVDNKRTVWASNLPEGTSAQKAELIALTQALRLAEGKSINIYTDSRYAFATAHVHGAIYKQRGWLTSAGKDIKNKEEILALLEAIHLPKRVAIIHCPGHQRGTDPVATGNRKADEAAKQAAQSTRILTETTKNAGKRTADGSEFEKRTADGSEFESPKKKAKVE

SEQ ID NO: 1653 - protein, 2125 aa, synthetic construct
MPAAKRVKLDGGDKKYSIGLDIGTNSVGWAVITDEYKVPSKKFKVLGNTDRHSIKKNLIGALLFDSGETAEATRLKRTARRRYTRRKNRICYLQEIFSNEMAKVDDSFFHRLEESFLVEEDKKHERHPIFGNIVDEVAYHEKYPTIYHLRKKLVDSTDKADLRLIYLALAHMIKFRGHFLIEGDLNPDNSDVDKLFIQLVQTYNQLFEENPINASGVDAKAILSARLSKSRRLENLIAQLPGEKKNGLFGNLIALSLGLTPNFKSNFDLAEDAKLQLSKDTYDDDLDNLLAQIGDQYADLFLAAKNLSDAILLSDILRVNTEITKAPLSASMIKRYDEHHQDLTLLKALVRQQLPEKYKEIFFDQSKNGYAGYIDGGASQEEFYKFIKPILEKMDGTEELLVKLNREDLLRKQRTFDNGSIPHQIHLGELHAILRRQEDFYPFLKDNREKIEKILTFRIPYYVGPLARGNSRFAWMTRKSEETITPWNFEEVVDKGASAQSFIERMTNFDKNLPNEKVLPKHSLLYEYFTVYNELTKVKYVTEGMRKPAFLSGEQKKAIVDLLFKTNRKVTVKQLKEDYFKKIECFDSVEISGVEDRFNASLGTYHDLLKIIKDKDFLDNEENEDILEDIVLTLTLFEDREMIEERLKTYAHLFDDKVMKQLKRRRYTGWGRLSRKLINGIRDKQSGKTILDFLKSDGFANRNFMQLIHDDSLTFKEDIQKAQVSGQGDSLHEHIANLAGSPAIKKGILQTVKVVDELVKVMGRHKPENIVIEMARENQTTQKGQKNSRERMKRIEEGIKELGSQILKEHPVENTQLQNEKLYLYYLQNGRDMYVDQELDINRLSDYDVDHIVPQSFLKDDSIDNKVLTRSDKARGKSDNVPSEEVVKKMKNYWRQLLNAKLITQRKFDNLTKAERGGLSELDKAGFIKRQLVETRQITKHVAQILDSRMNTKYDENDKLIREVKVITLKSKLVSDFRKDFQFYKVREINNYHHAHDAYLNAVVGTALIKKYPKLESEFVYGDYKVYDVRKMIAKSEQEIGKATAKYFFYSNIMNFFKTEITLANGEIRKRPLIETNGETGEIVWDKGRDFATVRKVLSMPQVNIVKKTEVQTGGFSKESILPKRNSDKLIARKKDWDPKKYGGFDSPTVAYSVLVVAKVEKGKSKKLKSVKELLGITIMERSSFEKNPIDFLEAKGYKEVKKDLIIKLPKYSLFELENGRKRMLASAGELQKGNELALPSKYVNFLYLASHYEKLKGSPEDNEQKQLFVEQHKHYLDEIIEQISEFSKRVILADANLDKVLSAYNKHRDKPIREQAENIIHLFTLTNLGAPAAFKYFDTTIDRKRYTSTKEVLDATLIHQSITGLYETRIDLSQLGGDGGGGGGGSPAPGGLLGRDLLTKLKAQIQFSTEGPQVTWEDRPAMCLVLNLEEEYRLHEKPVPPSIDPSWLQLFPMVWAEKAGMGLANQVPPVVVELKSDASPVAVRQYPMSKEAREGIRPHIQRFLDLGILVPCQSPWNTPLLPVKKPGTNDYRPVQDLREVNKRVQDIHPTVPNPYNLLSSLPPSHTWYSVLDLKDAFFCLKLHPNSQPLFAFEWRDPEKGNTGQLTWTRLPQGFKNSPTLFNEALHRDLASFRALNPQVVMLQYVDDLLVAAPTYRDCKEGTRRLLQELSKLGYRVSAKKAQLCREEVTYLGYLLKGGKRWLTPARKATVMKIPTPTTPRQVREFLGTAGFCRLWIPGFASLAAPLYPLTRPKVPFTWTEAHQEAFGRIKEALLSAPALALPDLTKPFALYVDEKEGVARGVLTQTLGPWRRPVAYLSKKLDPVASGWPTCLKAIAAVALLLKDADKLTLGQNVLVIAPHNLESIVRQPPDRWMTNARMTHYQSLLLNERVSFAPPAILNPATLLPVESDDTPIHICSEILAEETGTRPDLRDQPLPGVPAWYTDGSSFIMDGRRQAGAAIVDNKRTVWASNLPEGTSAQKAELIALTQALRLAEGKSINIYTDSRYAFATAHVHGAIYKQRGWLTSAGKDIKNKEEILALLEAIHLPKRVAIIHCPGHQRGTDPVATGNRKADEAAKQAAQSTRILTETTKNAGKRTADGSEFEKRTADGSEFESPKKKAKVE

SEQ ID NO: 1654 - protein, 2127 aa, synthetic construct
MPAAKRVKLDGGDKKYSIGLDIGTNSVGWAVITDEYKVPSKKFKVLGNTDRHSIKKNLIGALLFDSGETAEATRLKRTARRRYTRRKNRICYLQEIFSNEMAKVDDSFFHRLEESFLVEEDKKHERHPIFGNIVDEVAYHEKYPTIYHLRKKLVDSTDKADLRLIYLALAHMIKFRGHFLIEGDLNPDNSDVDKLFIQLVQTYNQLFEENPINASGVDAKAILSARLSKSRRLENLIAQLPGEKKNGLFGNLIALSLGLTPNFKSNFDLAEDAKLQLSKDTYDDDLDNLLAQIGDQYADLFLAAKNLSDAILLSDILRVNTEITKAPLSASMIKRYDEHHQDLTLLKALVRQQLPEKYKEIFFDQSKNGYAGYIDGGASQEEFYKFIKPILEKMDGTEELLVKLNREDLLRKQRTFDNGSIPHQIHLGELHAILRRQEDFYPFLKDNREKIEKILTFRIPYYVGPLARGNSRFAWMTRKSEETITPWNFEEVVDKGASAQSFIERMTNFDKNLPNEKVLPKHSLLYEYFTVYNELTKVKYVTEGMRKPAFLSGEQKKAIVDLLFKTNRKVTVKQLKEDYFKKIECFDSVEISGVEDRFNASLGTYHDLLKIIKDKDFLDNEENEDILEDIVLTLTLFEDREMIEERLKTYAHLFDDKVMKQLKRRRYTGWGRLSRKLINGIRDKQSGKTILDFLKSDGFANRNFMQLIHDDSLTFKEDIQKAQVSGQGDSLHEHIANLAGSPAIKKGILQTVKVVDELVKVMGRHKPENIVIEMARENQTTQKGQKNSRERMKRIEEGIKELGSQILKEHPVENTQLQNEKLYLYYLQNGRDMYVDQELDINRLSDYDVDHIVPQSFLKDDSIDNKVLTRSDKARGKSDNVPSEEVVKKMKNYWRQLLNAKLITQRKFDNLTKAERGGLSELDKAGFIKRQLVETRQITKHVAQILDSRMNTKYDENDKLIREVKVITLKSKLVSDFRKDFQFYKVREINNYHHAHDAYLNAVVGTALIKKYPKLESEFVYGDYKVYDVRKMIAKSEQEIGKATAKYFFYSNIMNFFKTEITLANGEIRKRPLIETNGETGEIVWDKGRDFATVRKVLSMPQVNIVKKTEVQTGGFSKESILPKRNSDKLIARKKDWDPKKYGGFDSPTVAYSVLVVAKVEKGKSKKLKSVKELLGITIMERSSFEKNPIDFLEAKGYKEVKKDLIIKLPKYSLFELENGRKRMLASAGELQKGNELALPSKYVNFLYLASHYEKLKGSPEDNEQKQLFVEQHKHYLDEIIEQISEFSKRVILADANLDKVLSAYNKHRDKPIREQAENIIHLFTLTNLGAPAAFKYFDTTIDRKRYTSTKEVLDATLIHQSITGLYETRIDLSQLGGDGGGGSEAAAKPAPGGLLGRDLLTKLKAQIQFSTEGPQVTWEDRPAMCLVLNLEEEYRLHEKPVPPSIDPSWLQLFPMVWAEKAGMGLANQVPPVVVELKSDASPVAVRQYPMSKEAREGIRPHIQRFLDLGILVPCQSPWNTPLLPVKKPGTNDYRPVQDLREVNKRVQDIHPTVPNPYNLLSSLPPSHTWYSVLDLKDAFFCLKLHPNSQPLFAFEWRDPEKGNTGQLTWTRLPQGFKNSPTLFNEALHRDLASFRALNPQVVMLQYVDDLLVAAPTYRDCKEGTRRLLQELSKLGYRVSAKKAQLCREEVTYLGYLLKGGKRWLTPARKATVMKIPTPTTPRQVREFLGTAGFCRLWIPGFASLAAPLYPLTRPKVPFTWTEAHQEAFGRIKEALLSAPALALPDLTKPFALYVDEKEGVARGVLTQTLGPWRRPVAYLSKKLDPVASGWPTCLKAIAAVALLLKDADKLTLGQNVLVIAPHNLESIVRQPPDRWMTNARMTHYQSLLLNERVSFAPPAILNPATLLPVESDDTPIHICSEILAEETGTRPDLRDQPLPGVPAWYTDGSSFIMDGRRQAGAAIVDNKRTVWASNLPEGTSAQKAELIALTQALRLAEGKSINIYTDSRYAFATAHVHGAIYKQRGWLTSAGKDIKNKEEILALLEAIHLPKRVAIIHCPGHQRGTDPVATGNRKADEAAKQAAQSTRILTETTKNAGKRTADGSEFEKRTADGSEFESPKKKAKVE

SEQ ID NO: 1655 - protein, 2125 aa, synthetic construct
MPAAKRVKLDGGDKKYSIGLDIGTNSVGWAVITDEYKVPSKKFKVLGNTDRHSIKKNLIGALLFDSGETAEATRLKRTARRRYTRRKNRICYLQEIFSNEMAKVDDSFFHRLEESFLVEEDKKHERHPIFGNIVDEVAYHEKYPTIYHLRKKLVDSTDKADLRLIYLALAHMIKFRGHFLIEGDLNPDNSDVDKLFIQLVQTYNQLFEENPINASGVDAKAILSARLSKSRRLENLIAQLPGEKKNGLFGNLIALSLGLTPNFKSNFDLAEDAKLQLSKDTYDDDLDNLLAQIGDQYADLFLAAKNLSDAILLSDILRVNTEITKAPLSASMIKRYDEHHQDLTLLKALVRQQLPEKYKEIFFDQSKNGYAGYIDGGASQEEFYKFIKPILEKMDGTEELLVKLNREDLLRKQRTFDNGSIPHQIHLGELHAILRRQEDFYPFLKDNREKIEKILTFRIPYYVGPLARGNSRFAWMTRKSEETITPWNFEEVVDKGASAQSFIERMTNFDKNLPNEKVLPKHSLLYEYFTVYNELTKVKYVTEGMRKPAFLSGEQKKAIVDLLFKTNRKVTVKQLKEDYFKKIECFDSVEISGVEDRFNASLGTYHDLLKIIKDKDFLDNEENEDILEDIVLTLTLFEDREMIEERLKTYAHLFDDKVMKQLKRRRYTGWGRLSRKLINGIRDKQSGKTILDFLKSDGFANRNFMQLIHDDSLTFKEDIQKAQVSGQGDSLHEHIANLAGSPAIKKGILQTVKVVDELVKVMGRHKPENIVIEMARENQTTQKGQKNSRERMKRIEEGIKELGSQILKEHPVENTQLQNEKLYLYYLQNGRDMYVDQELDINRLSDYDVDHIVPQSFLKDDSIDNKVLTRSDKARGKSDNVPSEEVVKKMKNYWRQLLNAKLITQRKFDNLTKAERGGLSELDKAGFIKRQLVETRQITKHVAQILDSRMNTKYDENDKLIREVKVITLKSKLVSDFRKDFQFYKVREINNYHHAHDAYLNAVVGTALIKKYPKLESEFVYGDYKVYDVRKMIAKSEQEIGKATAKYFFYSNIMNFFKTEITLANGEIRKRPLIETNGETGEIVWDKGRDFATVRKVLSMPQVNIVKKTEVQTGGFSKESILPKRNSDKLIARKKDWDPKKYGGFDSPTVAYSVLVVAKVEKGKSKKLKSVKELLGITIMERSSFEKNPIDFLEAKGYKEVKKDLIIKLPKYSLFELENGRKRMLASAGELQKGNELALPSKYVNFLYLASHYEKLKGSPEDNEQKQLFVEQHKHYLDEIIEQISEFSKRVILADANLDKVLSAYNKHRDKPIREQAENIIHLFTLTNLGAPAAFKYFDTTIDRKRYTSTKEVLDATLIHQSITGLYETRIDLSQLGGDGGGGSGGSGGSGGLLGRDLLTKLKAQIQFSTEGPQVTWEDRPAMCLVLNLEEEYRLHEKPVPPSIDPSWLQLFPMVWAEKAGMGLANQVPPVVVELKSDASPVAVRQYPMSKEAREGIRPHIQRFLDLGILVPCQSPWNTPLLPVKKPGTNDYRPVQDLREVNKRVQDIHPTVPNPYNLLSSLPPSHTWYSVLDLKDAFFCLKLHPNSQPLFAFEWRDPEKGNTGQLTWTRLPQGFKNSPTLFNEALHRDLASFRALNPQVVMLQYVDDLLVAAPTYRDCKEGTRRLLQELSKLGYRVSAKKAQLCREEVTYLGYLLKGGKRWLTPARKATVMKIPTPTTPRQVREFLGTAGFCRLWIPGFASLAAPLYPLTRPKVPFTWTEAHQEAFGRIKEALLSAPALALPDLTKPFALYVDEKEGVARGVLTQTLGPWRRPVAYLSKKLDPVASGWPTCLKAIAAVALLLKDADKLTLGQNVLVIAPHNLESIVRQPPDRWMTNARMTHYQSLLLNERVSFAPPAILNPATLLPVESDDTPIHICSEILAEETGTRPDLRDQPLPGVPAWYTDGSSFIMDGRRQAGAAIVDNKRTVWASNLPEGTSAQKAELIALTQALRLAEGKSINIYTDSRYAFATAHVHGAIYKQRGWLTSAGKDIKNKEEILALLEAIHLPKRVAIIHCPGHQRGTDPVATGNRKADEAAKQAAQSTRILTETTKNAGKRTADGSEFEKRTADGSEFESPKKKAKVE

SEQ ID NO: 1656 - protein, 2127 aa, synthetic construct
MPAAKRVKLDGGDKKYSIGLDIGTNSVGWAVITDEYKVPSKKFKVLGNTDRHSIKKNLIGALLFDSGETAEATRLKRTARRRYTRRKNRICYLQEIFSNEMAKVDDSFFHRLEESFLVEEDKKHERHPIFGNIVDEVAYHEKYPTIYHLRKKLVDSTDKADLRLIYLALAHMIKFRGHFLIEGDLNPDNSDVDKLFIQLVQTYNQLFEENPINASGVDAKAILSARLSKSRRLENLIAQLPGEKKNGLFGNLIALSLGLTPNFKSNFDLAEDAKLQLSKDTYDDDLDNLLAQIGDQYADLFLAAKNLSDAILLSDILRVNTEITKAPLSASMIKRYDEHHQDLTLLKALVRQQLPEKYKEIFFDQSKNGYAGYIDGGASQEEFYKFIKPILEKMDGTEELLVKLNREDLLRKQRTFDNGSIPHQIHLGELHAILRRQEDFYPFLKDNREKIEKILTFRIPYYVGPLARGNSRFAWMTRKSEETITPWNFEEVVDKGASAQSFIERMTNFDKNLPNEKVLPKHSLLYEYFTVYNELTKVKYVTEGMRKPAFLSGEQKKAIVDLLFKTNRKVTVKQLKEDYFKKIECFDSVEISGVEDRFNASLGTYHDLLKIIKDKDFLDNEENEDILEDIVLTLTLFEDREMIEERLKTYAHLFDDKVMKQLKRRRYTGWGRLSRKLINGIRDKQSGKTILDFLKSDGFANRNFMQLIHDDSLTFKEDIQKAQVSGQGDSLHEHIANLAGSPAIKKGILQTVKVVDELVKVMGRHKPENIVIEMARENQTTQKGQKNSRERMKRIEEGIKELGSQILKEHPVENTQLQNEKLYLYYLQNGRDMYVDQELDINRLSDYDVDHIVPQSFLKDDSIDNKVLTRSDKARGKSDNVPSEEVVKKMKNYWRQLLNAKLITQRKFDNLTKAERGGLSELDKAGFIKRQLVETRQITKHVAQILDSRMNTKYDENDKLIREVKVITLKSKLVSDFRKDFQFYKVREINNYHHAHDAYLNAVVGTALIKKYPKLESEFVYGDYKVYDVRKMIAKSEQEIGKATAKYFFYSNIMNFFKTEITLANGEIRKRPLIETNGETGEIVWDKGRDFATVRKVLSMPQVNIVKKTEVQTGGFSKESILPKRNSDKLIARKKDWDPKKYGGFDSPTVAYSVLVVAKVEKGKSKKLKSVKELLGITIMERSSFEKNPIDFLEAKGYKEVKKDLIIKLPKYSLFELENGRKRMLASAGELQKGNELALPSKYVNFLYLASHYEKLKGSPEDNEQKQLFVEQHKHYLDEIIEQISEFSKRVILADANLDKVLSAYNKHRDKPIREQAENIIHLFTLTNLGAPAAFKYFDTTIDRKRYTSTKEVLDATLIHQSITGLYETRIDLSQLGGDGGPAPEAAAKGSSGGLLGRDLLTKLKAQIQFSTEGPQVTWEDRPAMCLVLNLEEEYRLHEKPVPPSIDPSWLQLFPMVWAEKAGMGLANQVPPVVVELKSDASPVAVRQYPMSKEAREGIRPHIQRFLDLGILVPCQSPWNTPLLPVKKPGTNDYRPVQDLREVNKRVQDIHPTVPNPYNLLSSLPPSHTWYSVLDLKDAFFCLKLHPNSQPLFAFEWRDPEKGNTGQLTWTRLPQGFKNSPTLFNEALHRDLASFRALNPQVVMLQYVDDLLVAAPTYRDCKEGTRRLLQELSKLGYRVSAKKAQLCREEVTYLGYLLKGGKRWLTPARKATVMKIPTPTTPRQVREFLGTAGFCRLWIPGFASLAAPLYPLTRPKVPFTWTEAHQEAFGRIKEALLSAPALALPDLTKPFALYVDEKEGVARGVLTQTLGPWRRPVAYLSKKLDPVASGWPTCLKAIAAVALLLKDADKLTLGQNVLVIAPHNLESIVRQPPDRWMTNARMTHYQSLLLNERVSFAPPAILNPATLLPVESDDTPIHICSEILAEETGTRPDLRDQPLPGVPAWYTDGSSFIMDGRRQAGAAIVDNKRTVWASNLPEGTSAQKAELIALTQALRLAEGKSINIYTDSRYAFATAHVHGAIYKQRGWLTSAGKDIKNKEEILALLEAIHLPKRVAIIHCPGHQRGTDPVATGNRKADEAAKQAAQSTRILTETTKNAGKRTADGSEFEKRTADGSEFESPKKKAKVE

SEQ ID NO: 1657 - protein, 2122 aa, synthetic construct
MPAAKRVKLDGGDKKYSIGLDIGTNSVGWAVITDEYKVPSKKFKVLGNTDRHSIKKNLIGALLFDSGETAEATRLKRTARRRYTRRKNRICYLQEIFSNEMAKVDDSFFHRLEESFLVEEDKKHERHPIFGNIVDEVAYHEKYPTIYHLRKKLVDSTDKADLRLIYLALAHMIKFRGHFLIEGDLNPDNSDVDKLFIQLVQTYNQLFEENPINASGVDAKAILSARLSKSRRLENLIAQLPGEKKNGLFGNLIALSLGLTPNFKSNFDLAEDAKLQLSKDTYDDDLDNLLAQIGDQYADLFLAAKNLSDAILLSDILRVNTEITKAPLSASMIKRYDEHHQDLTLLKALVRQQLPEKYKEIFFDQSKNGYAGYIDGGASQEEFYKFIKPILEKMDGTEELLVKLNREDLLRKQRTFDNGSIPHQIHLGELHAILRRQEDFYPFLKDNREKIEKILTFRIPYYVGPLARGNSRFAWMTRKSEETITPWNFEEVVDKGASAQSFIERMTNFDKNLPNEKVLPKHSLLYEYFTVYNELTKVKYVTEGMRKPAFLSGEQKKAIVDLLFKTNRKVTVKQLKEDYFKKIECFDSVEISGVEDRFNASLGTYHDLLKIIKDKDFLDNEENEDILEDIVLTLTLFEDREMIEERLKTYAHLFDDKVMKQLKRRRYTGWGRLSRKLINGIRDKQSGKTILDFLKSDGFANRNFMQLIHDDSLTFKEDIQKAQVSGQGDSLHEHIANLAGSPAIKKGILQTVKVVDELVKVMGRHKPENIVIEMARENQTTQKGQKNSRERMKRIEEGIKELGSQILKEHPVENTQLQNEKLYLYYLQNGRDMYVDQELDINRLSDYDVDHIVPQSFLKDDSIDNKVLTRSDKARGKSDNVPSEEVVKKMKNYWRQLLNAKLITQRKFDNLTKAERGGLSELDKAGFIKRQLVETRQITKHVAQILDSRMNTKYDENDKLIREVKVITLKSKLVSDFRKDFQFYKVREINNYHHAHDAYLNAVVGTALIKKYPKLESEFVYGDYKVYDVRKMIAKSEQEIGKATAKYFFYSNIMNFFKTEITLANGEIRKRPLIETNGETGEIVWDKGRDFATVRKVLSMPQVNIVKKTEVQTGGFSKESILPKRNSDKLIARKKDWDPKKYGGFDSPTVAYSVLVVAKVEKGKSKKLKSVKELLGITIMERSSFEKNPIDFLEAKGYKEVKKDLIIKLPKYSLFELENGRKRMLASAGELQKGNELALPSKYVNFLYLASHYEKLKGSPEDNEQKQLFVEQHKHYLDEIIEQISEFSKRVILADANLDKVLSAYNKHRDKPIREQAENIIHLFTLTNLGAPAAFKYFDTTIDRKRYTSTKEVLDATLIHQSITGLYETRIDLSQLGGDGGGGGGSSGGLLGRDLLTKLKAQIQFSTEGPQVTWEDRPAMCLVLNLEEEYRLHEKPVPPSIDPSWLQLFPMVWAEKAGMGLANQVPPVVVELKSDASPVAVRQYPMSKEAREGIRPHIQRFLDLGILVPCQSPWNTPLLPVKKPGTNDYRPVQDLREVNKRVQDIHPTVPNPYNLLSSLPPSHTWYSVLDLKDAFFCLKLHPNSQPLFAFEWRDPEKGNTGQLTWTRLPQGFKNSPTLFNEALHRDLASFRALNPQVVMLQYVDDLLVAAPTYRDCKEGTRRLLQELSKLGYRVSAKKAQLCREEVTYLGYLLKGGKRWLTPARKATVMKIPTPTTPRQVREFLGTAGFCRLWIPGFASLAAPLYPLTRPKVPFTWTEAHQEAFGRIKEALLSAPALALPDLTKPFALYVDEKEGVARGVLTQTLGPWRRPVAYLSKKLDPVASGWPTCLKAIAAVALLLKDADKLTLGQNVLVIAPHNLESIVRQPPDRWMTNARMTHYQSLLLNERVSFAPPAILNPATLLPVESDDTPIHICSEILAEETGTRPDLRDQPLPGVPAWYTDGSSFIMDGRRQAGAAIVDNKRTVWASNLPEGTSAQKAELIALTQALRLAEGKSINIYTDSRYAFATAHVHGAIYKQRGWLTSAGKDIKNKEEILALLEAIHLPKRVAIIHCPGHQRGTDPVATGNRKADEAAKQAAQSTRILTETTKNAGKRTADGSEFEKRTADGSEFESPKKKAKVE

SEQ ID NO: 1658 - protein, 2125 aa, synthetic construct
MPAAKRVKLDGGDKKYSIGLDIGTNSVGWAVITDEYKVPSKKFKVLGNTDRHSIKKNLIGALLFDSGETAEATRLKRTARRRYTRRKNRICYLQEIFSNEMAKVDDSFFHRLEESFLVEEDKKHERHPIFGNIVDEVAYHEKYPTIYHLRKKLVDSTDKADLRLIYLALAHMIKFRGHFLIEGDLNPDNSDVDKLFIQLVQTYNQLFEENPINASGVDAKAILSARLSKSRRLENLIAQLPGEKKNGLFGNLIALSLGLTPNFKSNFDLAEDAKLQLSKDTYDDDLDNLLAQIGDQYADLFLAAKNLSDAILLSDILRVNTEITKAPLSASMIKRYDEHHQDLTLLKALVRQQLPEKYKEIFFDQSKNGYAGYIDGGASQEEFYKFIKPILEKMDGTEELLVKLNREDLLRKQRTFDNGSIPHQIHLGELHAILRRQEDFYPFLKDNREKIEKILTFRIPYYVGPLARGNSRFAWMTRKSEETITPWNFEEVVDKGASAQSFIERMTNFDKNLPNEKVLPKHSLLYEYFTVYNELTKVKYVTEGMRKPAFLSGEQKKAIVDLLFKTNRKVTVKQLKEDYFKKIECFDSVEISGVEDRFNASLGTYHDLLKIIKDKDFLDNEENEDILEDIVLTLTLFEDREMIEERLKTYAHLFDDKVMKQLKRRRYTGWGRLSRKLINGIRDKQSGKTILDFLKSDGFANRNFMQLIHDDSLTFKEDIQKAQVSGQGDSLHEHIANLAGSPAIKKGILQTVKVVDELVKVMGRHKPENIVIEMARENQTTQKGQKNSRERMKRIEEGIKELGSQILKEHPVENTQLQNEKLYLYYLQNGRDMYVDQELDINRLSDYDVDHIVPQSFLKDDSIDNKVLTRSDKARGKSDNVPSEEVVKKMKNYWRQLLNAKLITQRKFDNLTKAERGGLSELDKAGFIKRQLVETRQITKHVAQILDSRMNTKYDENDKLIREVKVITLKSKLVSDFRKDFQFYKVREINNYHHAHDAYLNAVVGTALIKKYPKLESEFVYGDYKVYDVRKMIAKSEQEIGKATAKYFFYSNIMNFFKTEITLANGEIRKRPLIETNGETGEIVWDKGRDFATVRKVLSMPQVNIVKKTEVQTGGFSKESILPKRNSDKLIARKKDWDPKKYGGFDSPTVAYSVLVVAKVEKGKSKKLKSVKELLGITIMERSSFEKNPIDFLEAKGYKEVKKDLIIKLPKYSLFELENGRKRMLASAGELQKGNELALPSKYVNFLYLASHYEKLKGSPEDNEQKQLFVEQHKHYLDEIIEQISEFSKRVILADANLDKVLSAYNKHRDKPIREQAENIIHLFTLTNLGAPAAFKYFDTTIDRKRYTSTKEVLDATLIHQSITGLYETRIDLSQLGGDGGPAPGGSGSSGGLLGRDLLTKLKAQIQFSTEGPQVTWEDRPAMCLVLNLEEEYRLHEKPVPPSIDPSWLQLFPMVWAEKAGMGLANQVPPVVVELKSDASPVAVRQYPMSKEAREGIRPHIQRFLDLGILVPCQSPWNTPLLPVKKPGTNDYRPVQDLREVNKRVQDIHPTVPNPYNLLSSLPPSHTWYSVLDLKDAFFCLKLHPNSQPLFAFEWRDPEKGNTGQLTWTRLPQGFKNSPTLFNEALHRDLASFRALNPQVVMLQYVDDLLVAAPTYRDCKEGTRRLLQELSKLGYRVSAKKAQLCREEVTYLGYLLKGGKRWLTPARKATVMKIPTPTTPRQVREFLGTAGFCRLWIPGFASLAAPLYPLTRPKVPFTWTEAHQEAFGRIKEALLSAPALALPDLTKPFALYVDEKEGVARGVLTQTLGPWRRPVAYLSKKLDPVASGWPTCLKAIAAVALLLKDADKLTLGQNVLVIAPHNLESIVRQPPDRWMTNARMTHYQSLLLNERVSFAPPAILNPATLLPVESDDTPIHICSEILAEETGTRPDLRDQPLPGVPAWYTDGSSFIMDGRRQAGAAIVDNKRTVWASNLPEGTSAQKAELIALTQALRLAEGKSINIYTDSRYAFATAHVHGAIYKQRGWLTSAGKDIKNKEEILALLEAIHLPKRVAIIHCPGHQRGTDPVATGNRKADEAAKQAAQSTRILTETTKNAGKRTADGSEFEKRTADGSEFESPKKKAKVE

SEQ ID NO: 1659 - protein, 2127 aa, synthetic construct
MPAAKRVKLDGGDKKYSIGLDIGTNSVGWAVITDEYKVPSKKFKVLGNTDRHSIKKNLIGALLFDSGETAEATRLKRTARRRYTRRKNRICYLQEIFSNEMAKVDDSFFHRLEESFLVEEDKKHERHPIFGNIVDEVAYHEKYPTIYHLRKKLVDSTDKADLRLIYLALAHMIKFRGHFLIEGDLNPDNSDVDKLFIQLVQTYNQLFEENPINASGVDAKAILSARLSKSRRLENLIAQLPGEKKNGLFGNLIALSLGLTPNFKSNFDLAEDAKLQLSKDTYDDDLDNLLAQIGDQYADLFLAAKNLSDAILLSDILRVNTEITKAPLSASMIKRYDEHHQDLTLLKALVRQQLPEKYKEIFFDQSKNGYAGYIDGGASQEEFYKFIKPILEKMDGTEELLVKLNREDLLRKQRTFDNGSIPHQIHLGELHAILRRQEDFYPFLKDNREKIEKILTFRIPYYVGPLARGNSRFAWMTRKSEETITPWNFEEVVDKGASAQSFIERMTNFDKNLPNEKVLPKHSLLYEYFTVYNELTKVKYVTEGMRKPAFLSGEQKKAIVDLLFKTNRKVTVKQLKEDYFKKIECFDSVEISGVEDRFNASLGTYHDLLKIIKDKDFLDNEENEDILEDIVLTLTLFEDREMIEERLKTYAHLFDDKVMKQLKRRRYTGWGRLSRKLINGIRDKQSGKTILDFLKSDGFANRNFMQLIHDDSLTFKEDIQKAQVSGQGDSLHEHIANLAGSPAIKKGILQTVKVVDELVKVMGRHKPENIVIEMARENQTTQKGQKNSRERMKRIEEGIKELGSQILKEHPVENTQLQNEKLYLYYLQNGRDMYVDQELDINRLSDYDVDHIVPQSFLKDDSIDNKVLTRSDKARGKSDNVPSEEVVKKMKNYWRQLLNAKLITQRKFDNLTKAERGGLSELDKAGFIKRQLVETRQITKHVAQILDSRMNTKYDENDKLIREVKVITLKSKLVSDFRKDFQFYKVREINNYHHAHDAYLNAVVGTALIKKYPKLESEFVYGDYKVYDVRKMIAKSEQEIGKATAKYFFYSNIMNFFKTEITLANGEIRKRPLIETNGETGEIVWDKGRDFATVRKVLSMPQVNIVKKTEVQTGGFSKESILPKRNSDKLIARKKDWDPKKYGGFDSPTVAYSVLVVAKVEKGKSKKLKSVKELLGITIMERSSFEKNPIDFLEAKGYKEVKKDLIIKLPKYSLFELENGRKRMLASAGELQKGNELALPSKYVNFLYLASHYEKLKGSPEDNEQKQLFVEQHKHYLDEIIEQISEFSKRVILADANLDKVLSAYNKHRDKPIREQAENIIHLFTLTNLGAPAAFKYFDTTIDRKRYTSTKEVLDATLIHQSITGLYETRIDLSQLGGDGGGGSGGGEAAAKGGLLGRDLLTKLKAQIQFSTEGPQVTWEDRPAMCLVLNLEEEYRLHEKPVPPSIDPSWLQLFPMVWAEKAGMGLANQVPPVVVELKSDASPVAVRQYPMSKEAREGIRPHIQRFLDLGILVPCQSPWNTPLLPVKKPGTNDYRPVQDLREVNKRVQDIHPTVPNPYNLLSSLPPSHTWYSVLDLKDAFFCLKLHPNSQPLFAFEWRDPEKGNTGQLTWTRLPQGFKNSPTLFNEALHRDLASFRALNPQVVMLQYVDDLLVAAPTYRDCKEGTRRLLQELSKLGYRVSAKKAQLCREEVTYLGYLLKGGKRWLTPARKATVMKIPTPTTPRQVREFLGTAGFCRLWIPGFASLAAPLYPLTRPKVPFTWTEAHQEAFGRIKEALLSAPALALPDLTKPFALYVDEKEGVARGVLTQTLGPWRRPVAYLSKKLDPVASGWPTCLKAIAAVALLLKDADKLTLGQNVLVIAPHNLESIVRQPPDRWMTNARMTHYQSLLLNERVSFAPPAILNPATLLPVESDDTPIHICSEILAEETGTRPDLRDQPLPGVPAWYTDGSSFIMDGRRQAGAAIVDNKRTVWASNLPEGTSAQKAELIALTQALRLAEGKSINIYTDSRYAFATAHVHGAIYKQRGWLTSAGKDIKNKEEILALLEAIHLPKRVAIIHCPGHQRGTDPVATGNRKADEAAKQAAQSTRILTETTKNAGKRTADGSEFEKRTADGSEFESPKKKAKVE

SEQ ID NO: 1660 - protein, 2132 aa, synthetic construct
MPAAKRVKLDGGDKKYSIGLDIGTNSVGWAVITDEYKVPSKKFKVLGNTDRHSIKKNLIGALLFDSGETAEATRLKRTARRRYTRRKNRICYLQEIFSNEMAKVDDSFFHRLEESFLVEEDKKHERHPIFGNIVDEVAYHEKYPTIYHLRKKLVDSTDKADLRLIYLALAHMIKFRGHFLIEGDLNPDNSDVDKLFIQLVQTYNQLFEENPINASGVDAKAILSARLSKSRRLENLIAQLPGEKKNGLFGNLIALSLGLTPNFKSNFDLAEDAKLQLSKDTYDDDLDNLLAQIGDQYADLFLAAKNLSDAILLSDILRVNTEITKAPLSASMIKRYDEHHQDLTLLKALVRQQLPEKYKEIFFDQSKNGYAGYIDGGASQEEFYKFIKPILEKMDGTEELLVKLNREDLLRKQRTFDNGSIPHQIHLGELHAILRRQEDFYPFLKDNREKIEKILTFRIPYYVGPLARGNSRFAWMTRKSEETITPWNFEEVVDKGASAQSFIERMTNFDKNLPNEKVLPKHSLLYEYFTVYNELTKVKYVTEGMRKPAFLSGEQKKAIVDLLFKTNRKVTVKQLKEDYFKKIECFDSVEISGVEDRFNASLGTYHDLLKIIKDKDFLDNEENEDILEDIVLTLTLFEDREMIEERLKTYAHLFDDKVMKQLKRRRYTGWGRLSRKLINGIRDKQSGKTILDFLKSDGFANRNFMQLIHDDSLTFKEDIQKAQVSGQGDSLHEHIANLAGSPAIKKGILQTVKVVDELVKVMGRHKPENIVIEMARENQTTQKGQKNSRERMKRIEEGIKELGSQILKEHPVENTQLQNEKLYLYYLQNGRDMYVDQELDINRLSDYDVDHIVPQSFLKDDSIDNKVLTRSDKARGKSDNVPSEEVVKKMKNYWRQLLNAKLITQRKFDNLTKAERGGLSELDKAGFIKRQLVETRQITKHVAQILDSRMNTKYDENDKLIREVKVITLKSKLVSDFRKDFQFYKVREINNYHHAHDAYLNAVVGTALIKKYPKLESEFVYGDYKVYDVRKMIAKSEQEIGKATAKYFFYSNIMNFFKTEITLANGEIRKRPLIETNGETGEIVWDKGRDFATVRKVLSMPQVNIVKKTEVQTGGFSKESILPKRNSDKLIARKKDWDPKKYGGFDSPTVAYSVLVVAKVEKGKSKKLKSVKELLGITIMERSSFEKNPIDFLEAKGYKEVKKDLIIKLPKYSLFELENGRKRMLASAGELQKGNELALPSKYVNFLYLASHYEKLKGSPEDNEQKQLFVEQHKHYLDEIIEQISEFSKRVILADANLDKVLSAYNKHRDKPIREQAENIIHLFTLTNLGAPAAFKYFDTTIDRKRYTSTKEVLDATLIHQSITGLYETRIDLSQLGGDGGSGSETPGTSESATPESGGLLGRDLLTKLKAQIQFSTEGPQVTWEDRPAMCLVLNLEEEYRLHEKPVPPSIDPSWLQLFPMVWAEKAGMGLANQVPPVVVELKSDASPVAVRQYPMSKEAREGIRPHIQRFLDLGILVPCQSPWNTPLLPVKKPGTNDYRPVQDLREVNKRVQDIHPTVPNPYNLLSSLPPSHTWYSVLDLKDAFFCLKLHPNSQPLFAFEWRDPEKGNTGQLTWTRLPQGFKNSPTLFNEALHRDLASFRALNPQVVMLQYVDDLLVAAPTYRDCKEGTRRLLQELSKLGYRVSAKKAQLCREEVTYLGYLLKGGKRWLTPARKATVMKIPTPTTPRQVREFLGTAGFCRLWIPGFASLAAPLYPLTRPKVPFTWTEAHQEAFGRIKEALLSAPALALPDLTKPFALYVDEKEGVARGVLTQTLGPWRRPVAYLSKKLDPVASGWPTCLKAIAAVALLLKDADKLTLGQNVLVIAPHNLESIVRQPPDRWMTNARMTHYQSLLLNERVSFAPPAILNPATLLPVESDDTPIHICSEILAEETGTRPDLRDQPLPGVPAWYTDGSSFIMDGRRQAGAAIVDNKRTVWASNLPEGTSAQKAELIALTQALRLAEGKSINIYTDSRYAFATAHVHGAIYKQRGWLTSAGKDIKNKEEILALLEAIHLPKRVAIIHCPGHQRGTDPVATGNRKADEAAKQAAQSTRILTETTKNAGKRTADGSEFEKRTADGSEFESPKKKAKVE

SEQ ID NO: 1661 - protein, 2125 aa, synthetic construct
MPAAKRVKLDGGDKKYSIGLDIGTNSVGWAVITDEYKVPSKKFKVLGNTDRHSIKKNLIGALLFDSGETAEATRLKRTARRRYTRRKNRICYLQEIFSNEMAKVDDSFFHRLEESFLVEEDKKHERHPIFGNIVDEVAYHEKYPTIYHLRKKLVDSTDKADLRLIYLALAHMIKFRGHFLIEGDLNPDNSDVDKLFIQLVQTYNQLFEENPINASGVDAKAILSARLSKSRRLENLIAQLPGEKKNGLFGNLIALSLGLTPNFKSNFDLAEDAKLQLSKDTYDDDLDNLLAQIGDQYADLFLAAKNLSDAILLSDILRVNTEITKAPLSASMIKRYDEHHQDLTLLKALVRQQLPEKYKEIFFDQSKNGYAGYIDGGASQEEFYKFIKPILEKMDGTEELLVKLNREDLLRKQRTFDNGSIPHQIHLGELHAILRRQEDFYPFLKDNREKIEKILTFRIPYYVGPLARGNSRFAWMTRKSEETITPWNFEEVVDKGASAQSFIERMTNFDKNLPNEKVLPKHSLLYEYFTVYNELTKVKYVTEGMRKPAFLSGEQKKAIVDLLFKTNRKVTVKQLKEDYFKKIECFDSVEISGVEDRFNASLGTYHDLLKIIKDKDFLDNEENEDILEDIVLTLTLFEDREMIEERLKTYAHLFDDKVMKQLKRRRYTGWGRLSRKLINGIRDKQSGKTILDFLKSDGFANRNFMQLIHDDSLTFKEDIQKAQVSGQGDSLHEHIANLAGSPAIKKGILQTVKVVDELVKVMGRHKPENIVIEMARENQTTQKGQKNSRERMKRIEEGIKELGSQILKEHPVENTQLQNEKLYLYYLQNGRDMYVDQELDINRLSDYDVDHIVPQSFLKDDSIDNKVLTRSDKARGKSDNVPSEEVVKKMKNYWRQLLNAKLITQRKFDNLTKAERGGLSELDKAGFIKRQLVETRQITKHVAQILDSRMNTKYDENDKLIREVKVITLKSKLVSDFRKDFQFYKVREINNYHHAHDAYLNAVVGTALIKKYPKLESEFVYGDYKVYDVRKMIAKSEQEIGKATAKYFFYSNIMNFFKTEITLANGEIRKRPLIETNGETGEIVWDKGRDFATVRKVLSMPQVNIVKKTEVQTGGFSKESILPKRNSDKLIARKKDWDPKKYGGFDSPTVAYSVLVVAKVEKGKSKKLKSVKELLGITIMERSSFEKNPIDFLEAKGYKEVKKDLIIKLPKYSLFELENGRKRMLASAGELQKGNELALPSKYVNFLYLASHYEKLKGSPEDNEQKQLFVEQHKHYLDEIIEQISEFSKRVILADANLDKVLSAYNKHRDKPIREQAENIIHLFTLTNLGAPAAFKYFDTTIDRKRYTSTKEVLDATLIHQSITGLYETRIDLSQLGGDGGGSSGGSPAPGGLLGRDLLTKLKAQIQFSTEGPQVTWEDRPAMCLVLNLEEEYRLHEKPVPPSIDPSWLQLFPMVWAEKAGMGLANQVPPVVVELKSDASPVAVRQYPMSKEAREGIRPHIQRFLDLGILVPCQSPWNTPLLPVKKPGTNDYRPVQDLREVNKRVQDIHPTVPNPYNLLSSLPPSHTWYSVLDLKDAFFCLKLHPNSQPLFAFEWRDPEKGNTGQLTWTRLPQGFKNSPTLFNEALHRDLASFRALNPQVVMLQYVDDLLVAAPTYRDCKEGTRRLLQELSKLGYRVSAKKAQLCREEVTYLGYLLKGGKRWLTPARKATVMKIPTPTTPRQVREFLGTAGFCRLWIPGFASLAAPLYPLTRPKVPFTWTEAHQEAFGRIKEALLSAPALALPDLTKPFALYVDEKEGVARGVLTQTLGPWRRPVAYLSKKLDPVASGWPTCLKAIAAVALLLKDADKLTLGQNVLVIAPHNLESIVRQPPDRWMTNARMTHYQSLLLNERVSFAPPAILNPATLLPVESDDTPIHICSEILAEETGTRPDLRDQPLPGVPAWYTDGSSFIMDGRRQAGAAIVDNKRTVWASNLPEGTSAQKAELIALTQALRLAEGKSINIYTDSRYAFATAHVHGAIYKQRGWLTSAGKDIKNKEEILALLEAIHLPKRVAIIHCPGHQRGTDPVATGNRKADEAAKQAAQSTRILTETTKNAGKRTADGSEFEKRTADGSEFESPKKKAKVE

SEQ ID NO: 1662 - protein, 2146 aa, synthetic construct
MPAAKRVKLDGGDKKYSIGLDIGTNSVGWAVITDEYKVPSKKFKVLGNTDRHSIKKNLIGALLFDSGETAEATRLKRTARRRYTRRKNRICYLQEIFSNEMAKVDDSFFHRLEESFLVEEDKKHERHPIFGNIVDEVAYHEKYPTIYHLRKKLVDSTDKADLRLIYLALAHMIKFRGHFLIEGDLNPDNSDVDKLFIQLVQTYNQLFEENPINASGVDAKAILSARLSKSRRLENLIAQLPGEKKNGLFGNLIALSLGLTPNFKSNFDLAEDAKLQLSKDTYDDDLDNLLAQIGDQYADLFLAAKNLSDAILLSDILRVNTEITKAPLSASMIKRYDEHHQDLTLLKALVRQQLPEKYKEIFFDQSKNGYAGYIDGGASQEEFYKFIKPILEKMDGTEELLVKLNREDLLRKQRTFDNGSIPHQIHLGELHAILRRQEDFYPFLKDNREKIEKILTFRIPYYVGPLARGNSRFAWMTRKSEETITPWNFEEVVDKGASAQSFIERMTNFDKNLPNEKVLPKHSLLYEYFTVYNELTKVKYVTEGMRKPAFLSGEQKKAIVDLLFKTNRKVTVKQLKEDYFKKIECFDSVEISGVEDRFNASLGTYHDLLKIIKDKDFLDNEENEDILEDIVLTLTLFEDREMIEERLKTYAHLFDDKVMKQLKRRRYTGWGRLSRKLINGIRDKQSGKTILDFLKSDGFANRNFMQLIHDDSLTFKEDIQKAQVSGQGDSLHEHIANLAGSPAIKKGILQTVKVVDELVKVMGRHKPENIVIEMARENQTTQKGQKNSRERMKRIEEGIKELGSQILKEHPVENTQLQNEKLYLYYLQNGRDMYVDQELDINRLSDYDVDHIVPQSFLKDDSIDNKVLTRSDKARGKSDNVPSEEVVKKMKNYWRQLLNAKLITQRKFDNLTKAERGGLSELDKAGFIKRQLVETRQITKHVAQILDSRMNTKYDENDKLIREVKVITLKSKLVSDFRKDFQFYKVREINNYHHAHDAYLNAVVGTALIKKYPKLESEFVYGDYKVYDVRKMIAKSEQEIGKATAKYFFYSNIMNFFKTEITLANGEIRKRPLIETNGETGEIVWDKGRDFATVRKVLSMPQVNIVKKTEVQTGGFSKESILPKRNSDKLIARKKDWDPKKYGGFDSPTVAYSVLVVAKVEKGKSKKLKSVKELLGITIMERSSFEKNPIDFLEAKGYKEVKKDLIIKLPKYSLFELENGRKRMLASAGELQKGNELALPSKYVNFLYLASHYEKLKGSPEDNEQKQLFVEQHKHYLDEIIEQISEFSKRVILADANLDKVLSAYNKHRDKPIREQAENIIHLFTLTNLGAPAAFKYFDTTIDRKRYTSTKEVLDATLIHQSITGLYETRIDLSQLGGDGGGGGGSGGGGSGGGGSGGGGSGGGGSGGGGSGGLLGRDLLTKLKAQIQFSTEGPQVTWEDRPAMCLVLNLEEEYRLHEKPVPPSIDPSWLQLFPMVWAEKAGMGLANQVPPVVVELKSDASPVAVRQYPMSKEAREGIRPHIQRFLDLGILVPCQSPWNTPLLPVKKPGTNDYRPVQDLREVNKRVQDIHPTVPNPYNLLSSLPPSHTWYSVLDLKDAFFCLKLHPNSQPLFAFEWRDPEKGNTGQLTWTRLPQGFKNSPTLFNEALHRDLASFRALNPQVVMLQYVDDLLVAAPTYRDCKEGTRRLLQELSKLGYRVSAKKAQLCREEVTYLGYLLKGGKRWLTPARKATVMKIPTPTTPRQVREFLGKAGFCRLFIPGFASLAAPLYPLTRPKVPFTWTEAHQEAFGRIKEALLSAPALALPDLTKPFALYVDEKEGVARGVLTQTLGPWRRPVAYLSKKLDPVASGWPTCLKAIAAVALLLKDADKLTLGQNVLVIAPHNLESIVRQPPDRWMTNARMTHYQSLLLNERVSFAPPAILNPATLLPVESDDTPIHICSEILAEETGTRPDLRDQPLPGVPAWYTDGSSFIMDGRRQAGAAIVDNKRTVWASNLPEGTSAQKAELIALTQALRLAEGKSINIYTDSRYAFATAHVHGAIYKQRGWLTSAGKDIKNKEEILALLEAIHLPKRVAIIHCPGHQRGTDPVATGNRKADEAAKQAAQSTRILTETTKNAGKRTADGSEFEKRTADGSEFESPKKKAKVE

SEQ ID NO: 1663 - protein, 2127 aa, synthetic construct
MPAAKRVKLDGGDKKYSIGLDIGTNSVGWAVITDEYKVPSKKFKVLGNTDRHSIKKNLIGALLFDSGETAEATRLKRTARRRYTRRKNRICYLQEIFSNEMAKVDDSFFHRLEESFLVEEDKKHERHPIFGNIVDEVAYHEKYPTIYHLRKKLVDSTDKADLRLIYLALAHMIKFRGHFLIEGDLNPDNSDVDKLFIQLVQTYNQLFEENPINASGVDAKAILSARLSKSRRLENLIAQLPGEKKNGLFGNLIALSLGLTPNFKSNFDLAEDAKLQLSKDTYDDDLDNLLAQIGDQYADLFLAAKNLSDAILLSDILRVNTEITKAPLSASMIKRYDEHHQDLTLLKALVRQQLPEKYKEIFFDQSKNGYAGYIDGGASQEEFYKFIKPILEKMDGTEELLVKLNREDLLRKQRTFDNGSIPHQIHLGELHAILRRQEDFYPFLKDNREKIEKILTFRIPYYVGPLARGNSRFAWMTRKSEETITPWNFEEVVDKGASAQSFIERMTNFDKNLPNEKVLPKHSLLYEYFTVYNELTKVKYVTEGMRKPAFLSGEQKKAIVDLLFKTNRKVTVKQLKEDYFKKIECFDSVEISGVEDRFNASLGTYHDLLKIIKDKDFLDNEENEDILEDIVLTLTLFEDREMIEERLKTYAHLFDDKVMKQLKRRRYTGWGRLSRKLINGIRDKQSGKTILDFLKSDGFANRNFMQLIHDDSLTFKEDIQKAQVSGQGDSLHEHIANLAGSPAIKKGILQTVKVVDELVKVMGRHKPENIVIEMARENQTTQKGQKNSRERMKRIEEGIKELGSQILKEHPVENTQLQNEKLYLYYLQNGRDMYVDQELDINRLSDYDVDHIVPQSFLKDDSIDNKVLTRSDKARGKSDNVPSEEVVKKMKNYWRQLLNAKLITQRKFDNLTKAERGGLSELDKAGFIKRQLVETRQITKHVAQILDSRMNTKYDENDKLIREVKVITLKSKLVSDFRKDFQFYKVREINNYHHAHDAYLNAVVGTALIKKYPKLESEFVYGDYKVYDVRKMIAKSEQEIGKATAKYFFYSNIMNFFKTEITLANGEIRKRPLIETNGETGEIVWDKGRDFATVRKVLSMPQVNIVKKTEVQTGGFSKESILPKRNSDKLIARKKDWDPKKYGGFDSPTVAYSVLVVAKVEKGKSKKLKSVKELLGITIMERSSFEKNPIDFLEAKGYKEVKKDLIIKLPKYSLFELENGRKRMLASAGELQKGNELALPSKYVNFLYLASHYEKLKGSPEDNEQKQLFVEQHKHYLDEIIEQISEFSKRVILADANLDKVLSAYNKHRDKPIREQAENIIHLFTLTNLGAPAAFKYFDTTIDRKRYTSTKEVLDATLIHQSITGLYETRIDLSQLGGDGGPAPEAAAKGGGGGLLGRDLLTKLKAQIQFSTEGPQVTWEDRPAMCLVLNLEEEYRLHEKPVPPSIDPSWLQLFPMVWAEKAGMGLANQVPPVVVELKSDASPVAVRQYPMSKEAREGIRPHIQRFLDLGILVPCQSPWNTPLLPVKKPGTNDYRPVQDLREVNKRVQDIHPTVPNPYNLLSSLPPSHTWYSVLDLKDAFFCLKLHPNSQPLFAFEWRDPEKGNTGQLTWTRLPQGFKNSPTLFNEALHRDLASFRALNPQVVMLQYVDDLLVAAPTYRDCKEGTRRLLQELSKLGYRVSAKKAQLCREEVTYLGYLLKGGKRWLTPARKATVMKIPTPTTPRQVREFLGKAGFCRLFIPGFASLAAPLYPLTRPKVPFTWTEAHQEAFGRIKEALLSAPALALPDLTKPFALYVDEKEGVARGVLTQTLGPWRRPVAYLSKKLDPVASGWPTCLKAIAAVALLLKDADKLTLGQNVLVIAPHNLESIVRQPPDRWMTNARMTHYQSLLLNERVSFAPPAILNPATLLPVESDDTPIHICSEILAEETGTRPDLRDQPLPGVPAWYTDGSSFIMDGRRQAGAAIVDNKRTVWASNLPEGTSAQKAELIALTQALRLAEGKSINIYTDSRYAFATAHVHGAIYKQRGWLTSAGKDIKNKEEILALLEAIHLPKRVAIIHCPGHQRGTDPVATGNRKADEAAKQAAQSTRILTETTKNAGKRTADGSEFEKRTADGSEFESPKKKAKVE

SEQ ID NO: 1664 - protein, 2127 aa, synthetic construct
MPAAKRVKLDGGDKKYSIGLDIGTNSVGWAVITDEYKVPSKKFKVLGNTDRHSIKKNLIGALLFDSGETAEATRLKRTARRRYTRRKNRICYLQEIFSNEMAKVDDSFFHRLEESFLVEEDKKHERHPIFGNIVDEVAYHEKYPTIYHLRKKLVDSTDKADLRLIYLALAHMIKFRGHFLIEGDLNPDNSDVDKLFIQLVQTYNQLFEENPINASGVDAKAILSARLSKSRRLENLIAQLPGEKKNGLFGNLIALSLGLTPNFKSNFDLAEDAKLQLSKDTYDDDLDNLLAQIGDQYADLFLAAKNLSDAILLSDILRVNTEITKAPLSASMIKRYDEHHQDLTLLKALVRQQLPEKYKEIFFDQSKNGYAGYIDGGASQEEFYKFIKPILEKMDGTEELLVKLNREDLLRKQRTFDNGSIPHQIHLGELHAILRRQEDFYPFLKDNREKIEKILTFRIPYYVGPLARGNSRFAWMTRKSEETITPWNFEEVVDKGASAQSFIERMTNFDKNLPNEKVLPKHSLLYEYFTVYNELTKVKYVTEGMRKPAFLSGEQKKAIVDLLFKTNRKVTVKQLKEDYFKKIECFDSVEISGVEDRFNASLGTYHDLLKIIKDKDFLDNEENEDILEDIVLTLTLFEDREMIEERLKTYAHLFDDKVMKQLKRRRYTGWGRLSRKLINGIRDKQSGKTILDFLKSDGFANRNFMQLIHDDSLTFKEDIQKAQVSGQGDSLHEHIANLAGSPAIKKGILQTVKVVDELVKVMGRHKPENIVIEMARENQTTQKGQKNSRERMKRIEEGIKELGSQILKEHPVENTQLQNEKLYLYYLQNGRDMYVDQELDINRLSDYDVDHIVPQSFLKDDSIDNKVLTRSDKARGKSDNVPSEEVVKKMKNYWRQLLNAKLITQRKFDNLTKAERGGLSELDKAGFIKRQLVETRQITKHVAQILDSRMNTKYDENDKLIREVKVITLKSKLVSDFRKDFQFYKVREINNYHHAHDAYLNAVVGTALIKKYPKLESEFVYGDYKVYDVRKMIAKSEQEIGKATAKYFFYSNIMNFFKTEITLANGEIRKRPLIETNGETGEIVWDKGRDFATVRKVLSMPQVNIVKKTEVQTGGFSKESILPKRNSDKLIARKKDWDPKKYGGFDSPTVAYSVLVVAKVEKGKSKKLKSVKELLGITIMERSSFEKNPIDFLEAKGYKEVKKDLIIKLPKYSLFELENGRKRMLASAGELQKGNELALPSKYVNFLYLASHYEKLKGSPEDNEQKQLFVEQHKHYLDEIIEQISEFSKRVILADANLDKVLSAYNKHRDKPIREQAENIIHLFTLTNLGAPAAFKYFDTTIDRKRYTSTKEVLDATLIHQSITGLYETRIDLSQLGGDGGEAAAKGSSPAPGGLLGRDLLTKLKAQIQFSTEGPQVTWEDRPAMCLVLNLEEEYRLHEKPVPPSIDPSWLQLFPMVWAEKAGMGLANQVPPVVVELKSDASPVAVRQYPMSKEAREGIRPHIQRFLDLGILVPCQSPWNTPLLPVKKPGTNDYRPVQDLREVNKRVQDIHPTVPNPYNLLSSLPPSHTWYSVLDLKDAFFCLKLHPNSQPLFAFEWRDPEKGNTGQLTWTRLPQGFKNSPTLFNEALHRDLASFRALNPQVVMLQYVDDLLVAAPTYRDCKEGTRRLLQELSKLGYRVSAKKAQLCREEVTYLGYLLKGGKRWLTPARKATVMKIPTPTTPRQVREFLGKAGFCRLFIPGFASLAAPLYPLTRPKVPFTWTEAHQEAFGRIKEALLSAPALALPDLTKPFALYVDEKEGVARGVLTQTLGPWRRPVAYLSKKLDPVASGWPTCLKAIAAVALLLKDADKLTLGQNVLVIAPHNLESIVRQPPDRWMTNARMTHYQSLLLNERVSFAPPAILNPATLLPVESDDTPIHICSEILAEETGTRPDLRDQPLPGVPAWYTDGSSFIMDGRRQAGAAIVDNKRTVWASNLPEGTSAQKAELIALTQALRLAEGKSINIYTDSRYAFATAHVHGAIYKQRGWLTSAGKDIKNKEEILALLEAIHLPKRVAIIHCPGHQRGTDPVATGNRKADEAAKQAAQSTRILTETTKNAGKRTADGSEFEKRTADGSEFESPKKKAKVE

SEQ ID NO: 1665 - protein, 2131 aa, synthetic construct
MPAAKRVKLDGGDKKYSIGLDIGTNSVGWAVITDEYKVPSKKFKVLGNTDRHSIKKNLIGALLFDSGETAEATRLKRTARRRYTRRKNRICYLQEIFSNEMAKVDDSFFHRLEESFLVEEDKKHERHPIFGNIVDEVAYHEKYPTIYHLRKKLVDSTDKADLRLIYLALAHMIKFRGHFLIEGDLNPDNSDVDKLFIQLVQTYNQLFEENPINASGVDAKAILSARLSKSRRLENLIAQLPGEKKNGLFGNLIALSLGLTPNFKSNFDLAEDAKLQLSKDTYDDDLDNLLAQIGDQYADLFLAAKNLSDAILLSDILRVNTEITKAPLSASMIKRYDEHHQDLTLLKALVRQQLPEKYKEIFFDQSKNGYAGYIDGGASQEEFYKFIKPILEKMDGTEELLVKLNREDLLRKQRTFDNGSIPHQIHLGELHAILRRQEDFYPFLKDNREKIEKILTFRIPYYVGPLARGNSRFAWMTRKSEETITPWNFEEVVDKGASAQSFIERMTNFDKNLPNEKVLPKHSLLYEYFTVYNELTKVKYVTEGMRKPAFLSGEQKKAIVDLLFKTNRKVTVKQLKEDYFKKIECFDSVEISGVEDRFNASLGTYHDLLKIIKDKDFLDNEENEDILEDIVLTLTLFEDREMIEERLKTYAHLFDDKVMKQLKRRRYTGWGRLSRKLINGIRDKQSGKTILDFLKSDGFANRNFMQLIHDDSLTFKEDIQKAQVSGQGDSLHEHIANLAGSPAIKKGILQTVKVVDELVKVMGRHKPENIVIEMARENQTTQKGQKNSRERMKRIEEGIKELGSQILKEHPVENTQLQNEKLYLYYLQNGRDMYVDQELDINRLSDYDVDHIVPQSFLKDDSIDNKVLTRSDKARGKSDNVPSEEVVKKMKNYWRQLLNAKLITQRKFDNLTKAERGGLSELDKAGFIKRQLVETRQITKHVAQILDSRMNTKYDENDKLIREVKVITLKSKLVSDFRKDFQFYKVREINNYHHAHDAYLNAVVGTALIKKYPKLESEFVYGDYKVYDVRKMIAKSEQEIGKATAKYFFYSNIMNFFKTEITLANGEIRKRPLIETNGETGEIVWDKGRDFATVRKVLSMPQVNIVKKTEVQTGGFSKESILPKRNSDKLIARKKDWDPKKYGGFDSPTVAYSVLVVAKVEKGKSKKLKSVKELLGITIMERSSFEKNPIDFLEAKGYKEVKKDLIIKLPKYSLFELENGRKRMLASAGELQKGNELALPSKYVNFLYLASHYEKLKGSPEDNEQKQLFVEQHKHYLDEIIEQISEFSKRVILADANLDKVLSAYNKHRDKPIREQAENIIHLFTLTNLGAPAAFKYFDTTIDRKRYTSTKEVLDATLIHQSITGLYETRIDLSQLGGDGGGGSGGSGGSGGSGGSGGLLGRDLLTKLKAQIQFSTEGPQVTWEDRPAMCLVLNLEEEYRLHEKPVPPSIDPSWLQLFPMVWAEKAGMGLANQVPPVVVELKSDASPVAVRQYPMSKEAREGIRPHIQRFLDLGILVPCQSPWNTPLLPVKKPGTNDYRPVQDLREVNKRVQDIHPTVPNPYNLLSSLPPSHTWYSVLDLKDAFFCLKLHPNSQPLFAFEWRDPEKGNTGQLTWTRLPQGFKNSPTLFNEALHRDLASFRALNPQVVMLQYVDDLLVAAPTYRDCKEGTRRLLQELSKLGYRVSAKKAQLCREEVTYLGYLLKGGKRWLTPARKATVMKIPTPTTPRQVREFLGKAGFCRLFIPGFASLAAPLYPLTRPKVPFTWTEAHQEAFGRIKEALLSAPALALPDLTKPFALYVDEKEGVARGVLTQTLGPWRRPVAYLSKKLDPVASGWPTCLKAIAAVALLLKDADKLTLGQNVLVIAPHNLESIVRQPPDRWMTNARMTHYQSLLLNERVSFAPPAILNPATLLPVESDDTPIHICSEILAEETGTRPDLRDQPLPGVPAWYTDGSSFIMDGRRQAGAAIVDNKRTVWASNLPEGTSAQKAELIALTQALRLAEGKSINIYTDSRYAFATAHVHGAIYKQRGWLTSAGKDIKNKEEILALLEAIHLPKRVAIIHCPGHQRGTDPVATGNRKADEAAKQAAQSTRILTETTKNAGKRTADGSEFEKRTADGSEFESPKKKAKVE

SEQ ID NO: 1666 - protein, 2127 aa, synthetic construct
MPAAKRVKLDGGDKKYSIGLDIGTNSVGWAVITDEYKVPSKKFKVLGNTDRHSIKKNLIGALLFDSGETAEATRLKRTARRRYTRRKNRICYLQEIFSNEMAKVDDSFFHRLEESFLVEEDKKHERHPIFGNIVDEVAYHEKYPTIYHLRKKLVDSTDKADLRLIYLALAHMIKFRGHFLIEGDLNPDNSDVDKLFIQLVQTYNQLFEENPINASGVDAKAILSARLSKSRRLENLIAQLPGEKKNGLFGNLIALSLGLTPNFKSNFDLAEDAKLQLSKDTYDDDLDNLLAQIGDQYADLFLAAKNLSDAILLSDILRVNTEITKAPLSASMIKRYDEHHQDLTLLKALVRQQLPEKYKEIFFDQSKNGYAGYIDGGASQEEFYKFIKPILEKMDGTEELLVKLNREDLLRKQRTFDNGSIPHQIHLGELHAILRRQEDFYPFLKDNREKIEKILTFRIPYYVGPLARGNSRFAWMTRKSEETITPWNFEEVVDKGASAQSFIERMTNFDKNLPNEKVLPKHSLLYEYFTVYNELTKVKYVTEGMRKPAFLSGEQKKAIVDLLFKTNRKVTVKQLKEDYFKKIECFDSVEISGVEDRFNASLGTYHDLLKIIKDKDFLDNEENEDILEDIVLTLTLFEDREMIEERLKTYAHLFDDKVMKQLKRRRYTGWGRLSRKLINGIRDKQSGKTILDFLKSDGFANRNFMQLIHDDSLTFKEDIQKAQVSGQGDSLHEHIANLAGSPAIKKGILQTVKVVDELVKVMGRHKPENIVIEMARENQTTQKGQKNSRERMKRIEEGIKELGSQILKEHPVENTQLQNEKLYLYYLQNGRDMYVDQELDINRLSDYDVDHIVPQSFLKDDSIDNKVLTRSDKARGKSDNVPSEEVVKKMKNYWRQLLNAKLITQRKFDNLTKAERGGLSELDKAGFIKRQLVETRQITKHVAQILDSRMNTKYDENDKLIREVKVITLKSKLVSDFRKDFQFYKVREINNYHHAHDAYLNAVVGTALIKKYPKLESEFVYGDYKVYDVRKMIAKSEQEIGKATAKYFFYSNIMNFFKTEITLANGEIRKRPLIETNGETGEIVWDKGRDFATVRKVLSMPQVNIVKKTEVQTGGFSKESILPKRNSDKLIARKKDWDPKKYGGFDSPTVAYSVLVVAKVEKGKSKKLKSVKELLGITIMERSSFEKNPIDFLEAKGYKEVKKDLIIKLPKYSLFELENGRKRMLASAGELQKGNELALPSKYVNFLYLASHYEKLKGSPEDNEQKQLFVEQHKHYLDEIIEQISEFSKRVILADANLDKVLSAYNKHRDKPIREQAENIIHLFTLTNLGAPAAFKYFDTTIDRKRYTSTKEVLDATLIHQSITGLYETRIDLSQLGGDGGGGSPAPEAAAKGGLLGRDLLTKLKAQIQFSTEGPQVTWEDRPAMCLVLNLEEEYRLHEKPVPPSIDPSWLQLFPMVWAEKAGMGLANQVPPVVVELKSDASPVAVRQYPMSKEAREGIRPHIQRFLDLGILVPCQSPWNTPLLPVKKPGTNDYRPVQDLREVNKRVQDIHPTVPNPYNLLSSLPPSHTWYSVLDLKDAFFCLKLHPNSQPLFAFEWRDPEKGNTGQLTWTRLPQGFKNSPTLFNEALHRDLASFRALNPQVVMLQYVDDLLVAAPTYRDCKEGTRRLLQELSKLGYRVSAKKAQLCREEVTYLGYLLKGGKRWLTPARKATVMKIPTPTTPRQVREFLGKAGFCRLFIPGFASLAAPLYPLTRPKVPFTWTEAHQEAFGRIKEALLSAPALALPDLTKPFALYVDEKEGVARGVLTQTLGPWRRPVAYLSKKLDPVASGWPTCLKAIAAVALLLKDADKLTLGQNVLVIAPHNLESIVRQPPDRWMTNARMTHYQSLLLNERVSFAPPAILNPATLLPVESDDTPIHICSEILAEETGTRPDLRDQPLPGVPAWYTDGSSFIMDGRRQAGAAIVDNKRTVWASNLPEGTSAQKAELIALTQALRLAEGKSINIYTDSRYAFATAHVHGAIYKQRGWLTSAGKDIKNKEEILALLEAIHLPKRVAIIHCPGHQRGTDPVATGNRKADEAAKQAAQSTRILTETTKNAGKRTADGSEFEKRTADGSEFESPKKKAKVE

SEQ ID NO: 1667 - protein, 2134 aa, synthetic construct
MPAAKRVKLDGGDKKYSIGLDIGTNSVGWAVITDEYKVPSKKFKVLGNTDRHSIKKNLIGALLFDSGETAEATRLKRTARRRYTRRKNRICYLQEIFSNEMAKVDDSFFHRLEESFLVEEDKKHERHPIFGNIVDEVAYHEKYPTIYHLRKKLVDSTDKADLRLIYLALAHMIKFRGHFLIEGDLNPDNSDVDKLFIQLVQTYNQLFEENPINASGVDAKAILSARLSKSRRLENLIAQLPGEKKNGLFGNLIALSLGLTPNFKSNFDLAEDAKLQLSKDTYDDDLDNLLAQIGDQYADLFLAAKNLSDAILLSDILRVNTEITKAPLSASMIKRYDEHHQDLTLLKALVRQQLPEKYKEIFFDQSKNGYAGYIDGGASQEEFYKFIKPILEKMDGTEELLVKLNREDLLRKQRTFDNGSIPHQIHLGELHAILRRQEDFYPFLKDNREKIEKILTFRIPYYVGPLARGNSRFAWMTRKSEETITPWNFEEVVDKGASAQSFIERMTNFDKNLPNEKVLPKHSLLYEYFTVYNELTKVKYVTEGMRKPAFLSGEQKKAIVDLLFKTNRKVTVKQLKEDYFKKIECFDSVEISGVEDRFNASLGTYHDLLKIIKDKDFLDNEENEDILEDIVLTLTLFEDREMIEERLKTYAHLFDDKVMKQLKRRRYTGWGRLSRKLINGIRDKQSGKTILDFLKSDGFANRNFMQLIHDDSLTFKEDIQKAQVSGQGDSLHEHIANLAGSPAIKKGILQTVKVVDELVKVMGRHKPENIVIEMARENQTTQKGQKNSRERMKRIEEGIKELGSQILKEHPVENTQLQNEKLYLYYLQNGRDMYVDQELDINRLSDYDVDHIVPQSFLKDDSIDNKVLTRSDKARGKSDNVPSEEVVKKMKNYWRQLLNAKLITQRKFDNLTKAERGGLSELDKAGFIKRQLVETRQITKHVAQILDSRMNTKYDENDKLIREVKVITLKSKLVSDFRKDFQFYKVREINNYHHAHDAYLNAVVGTALIKKYPKLESEFVYGDYKVYDVRKMIAKSEQEIGKATAKYFFYSNIMNFFKTEITLANGEIRKRPLIETNGETGEIVWDKGRDFATVRKVLSMPQVNIVKKTEVQTGGFSKESILPKRNSDKLIARKKDWDPKKYGGFDSPTVAYSVLVVAKVEKGKSKKLKSVKELLGITIMERSSFEKNPIDFLEAKGYKEVKKDLIIKLPKYSLFELENGRKRMLASAGELQKGNELALPSKYVNFLYLASHYEKLKGSPEDNEQKQLFVEQHKHYLDEIIEQISEFSKRVILADANLDKVLSAYNKHRDKPIREQAENIIHLFTLTNLGAPAAFKYFDTTIDRKRYTSTKEVLDATLIHQSITGLYETRIDLSQLGGDGGGSSGSSGSSGSSGSSGSSGGLLGRDLLTKLKAQIQFSTEGPQVTWEDRPAMCLVLNLEEEYRLHEKPVPPSIDPSWLQLFPMVWAEKAGMGLANQVPPVVVELKSDASPVAVRQYPMSKEAREGIRPHIQRFLDLGILVPCQSPWNTPLLPVKKPGTNDYRPVQDLREVNKRVQDIHPTVPNPYNLLSSLPPSHTWYSVLDLKDAFFCLKLHPNSQPLFAFEWRDPEKGNTGQLTWTRLPQGFKNSPTLFNEALHRDLASFRALNPQVVMLQYVDDLLVAAPTYRDCKEGTRRLLQELSKLGYRVSAKKAQLCREEVTYLGYLLKGGKRWLTPARKATVMKIPTPTTPRQVREFLGKAGFCRLFIPGFASLAAPLYPLTRPKVPFTWTEAHQEAFGRIKEALLSAPALALPDLTKPFALYVDEKEGVARGVLTQTLGPWRRPVAYLSKKLDPVASGWPTCLKAIAAVALLLKDADKLTLGQNVLVIAPHNLESIVRQPPDRWMTNARMTHYQSLLLNERVSFAPPAILNPATLLPVESDDTPIHICSEILAEETGTRPDLRDQPLPGVPAWYTDGSSFIMDGRRQAGAAIVDNKRTVWASNLPEGTSAQKAELIALTQALRLAEGKSINIYTDSRYAFATAHVHGAIYKQRGWLTSAGKDIKNKEEILALLEAIHLPKRVAIIHCPGHQRGTDPVATGNRKADEAAKQAAQSTRILTETTKNAGKRTADGSEFEKRTADGSEFESPKKKAKVE

SEQ ID NO: 1668 - protein, 2122 aa, synthetic construct
MPAAKRVKLDGGDKKYSIGLDIGTNSVGWAVITDEYKVPSKKFKVLGNTDRHSIKKNLIGALLFDSGETAEATRLKRTARRRYTRRKNRICYLQEIFSNEMAKVDDSFFHRLEESFLVEEDKKHERHPIFGNIVDEVAYHEKYPTIYHLRKKLVDSTDKADLRLIYLALAHMIKFRGHFLIEGDLNPDNSDVDKLFIQLVQTYNQLFEENPINASGVDAKAILSARLSKSRRLENLIAQLPGEKKNGLFGNLIALSLGLTPNFKSNFDLAEDAKLQLSKDTYDDDLDNLLAQIGDQYADLFLAAKNLSDAILLSDILRVNTEITKAPLSASMIKRYDEHHQDLTLLKALVRQQLPEKYKEIFFDQSKNGYAGYIDGGASQEEFYKFIKPILEKMDGTEELLVKLNREDLLRKQRTFDNGSIPHQIHLGELHAILRRQEDFYPFLKDNREKIEKILTFRIPYYVGPLARGNSRFAWMTRKSEETITPWNFEEVVDKGASAQSFIERMTNFDKNLPNEKVLPKHSLLYEYFTVYNELTKVKYVTEGMRKPAFLSGEQKKAIVDLLFKTNRKVTVKQLKEDYFKKIECFDSVEISGVEDRFNASLGTYHDLLKIIKDKDFLDNEENEDILEDIVLTLTLFEDREMIEERLKTYAHLFDDKVMKQLKRRRYTGWGRLSRKLINGIRDKQSGKTILDFLKSDGFANRNFMQLIHDDSLTFKEDIQKAQVSGQGDSLHEHIANLAGSPAIKKGILQTVKVVDELVKVMGRHKPENIVIEMARENQTTQKGQKNSRERMKRIEEGIKELGSQILKEHPVENTQLQNEKLYLYYLQNGRDMYVDQELDINRLSDYDVDHIVPQSFLKDDSIDNKVLTRSDKARGKSDNVPSEEVVKKMKNYWRQLLNAKLITQRKFDNLTKAERGGLSELDKAGFIKRQLVETRQITKHVAQILDSRMNTKYDENDKLIREVKVITLKSKLVSDFRKDFQFYKVREINNYHHAHDAYLNAVVGTALIKKYPKLESEFVYGDYKVYDVRKMIAKSEQEIGKATAKYFFYSNIMNFFKTEITLANGEIRKRPLIETNGETGEIVWDKGRDFATVRKVLSMPQVNIVKKTEVQTGGFSKESILPKRNSDKLIARKKDWDPKKYGGFDSPTVAYSVLVVAKVEKGKSKKLKSVKELLGITIMERSSFEKNPIDFLEAKGYKEVKKDLIIKLPKYSLFELENGRKRMLASAGELQKGNELALPSKYVNFLYLASHYEKLKGSPEDNEQKQLFVEQHKHYLDEIIEQISEFSKRVILADANLDKVLSAYNKHRDKPIREQAENIIHLFTLTNLGAPAAFKYFDTTIDRKRYTSTKEVLDATLIHQSITGLYETRIDLSQLGGDGGGGSGGGGGLLGRDLLTKLKAQIQFSTEGPQVTWEDRPAMCLVLNLEEEYRLHEKPVPPSIDPSWLQLFPMVWAEKAGMGLANQVPPVVVELKSDASPVAVRQYPMSKEAREGIRPHIQRFLDLGILVPCQSPWNTPLLPVKKPGTNDYRPVQDLREVNKRVQDIHPTVPNPYNLLSSLPPSHTWYSVLDLKDAFFCLKLHPNSQPLFAFEWRDPEKGNTGQLTWTRLPQGFKNSPTLFNEALHRDLASFRALNPQVVMLQYVDDLLVAAPTYRDCKEGTRRLLQELSKLGYRVSAKKAQLCREEVTYLGYLLKGGKRWLTPARKATVMKIPTPTTPRQVREFLGKAGFCRLFIPGFASLAAPLYPLTRPKVPFTWTEAHQEAFGRIKEALLSAPALALPDLTKPFALYVDEKEGVARGVLTQTLGPWRRPVAYLSKKLDPVASGWPTCLKAIAAVALLLKDADKLTLGQNVLVIAPHNLESIVRQPPDRWMTNARMTHYQSLLLNERVSFAPPAILNPATLLPVESDDTPIHICSEILAEETGTRPDLRDQPLPGVPAWYTDGSSFIMDGRRQAGAAIVDNKRTVWASNLPEGTSAQKAELIALTQALRLAEGKSINIYTDSRYAFATAHVHGAIYKQRGWLTSAGKDIKNKEEILALLEAIHLPKRVAIIHCPGHQRGTDPVATGNRKADEAAKQAAQSTRILTETTKNAGKRTADGSEFEKRTADGSEFESPKKKAKVE

SEQ ID NO: 1669 - protein, 2124 aa, synthetic construct
MPAAKRVKLDGGDKKYSIGLDIGTNSVGWAVITDEYKVPSKKFKVLGNTDRHSIKKNLIGALLFDSGETAEATRLKRTARRRYTRRKNRICYLQEIFSNEMAKVDDSFFHRLEESFLVEEDKKHERHPIFGNIVDEVAYHEKYPTIYHLRKKLVDSTDKADLRLIYLALAHMIKFRGHFLIEGDLNPDNSDVDKLFIQLVQTYNQLFEENPINASGVDAKAILSARLSKSRRLENLIAQLPGEKKNGLFGNLIALSLGLTPNFKSNFDLAEDAKLQLSKDTYDDDLDNLLAQIGDQYADLFLAAKNLSDAILLSDILRVNTEITKAPLSASMIKRYDEHHQDLTLLKALVRQQLPEKYKEIFFDQSKNGYAGYIDGGASQEEFYKFIKPILEKMDGTEELLVKLNREDLLRKQRTFDNGSIPHQIHLGELHAILRRQEDFYPFLKDNREKIEKILTFRIPYYVGPLARGNSRFAWMTRKSEETITPWNFEEVVDKGASAQSFIERMTNFDKNLPNEKVLPKHSLLYEYFTVYNELTKVKYVTEGMRKPAFLSGEQKKAIVDLLFKTNRKVTVKQLKEDYFKKIECFDSVEISGVEDRFNASLGTYHDLLKIIKDKDFLDNEENEDILEDIVLTLTLFEDREMIEERLKTYAHLFDDKVMKQLKRRRYTGWGRLSRKLINGIRDKQSGKTILDFLKSDGFANRNFMQLIHDDSLTFKEDIQKAQVSGQGDSLHEHIANLAGSPAIKKGILQTVKVVDELVKVMGRHKPENIVIEMARENQTTQKGQKNSRERMKRIEEGIKELGSQILKEHPVENTQLQNEKLYLYYLQNGRDMYVDQELDINRLSDYDVDHIVPQSFLKDDSIDNKVLTRSDKARGKSDNVPSEEVVKKMKNYWRQLLNAKLITQRKFDNLTKAERGGLSELDKAGFIKRQLVETRQITKHVAQILDSRMNTKYDENDKLIREVKVITLKSKLVSDFRKDFQFYKVREINNYHHAHDAYLNAVVGTALIKKYPKLESEFVYGDYKVYDVRKMIAKSEQEIGKATAKYFFYSNIMNFFKTEITLANGEIRKRPLIETNGETGEIVWDKGRDFATVRKVLSMPQVNIVKKTEVQTGGFSKESILPKRNSDKLIARKKDWDPKKYGGFDSPTVAYSVLVVAKVEKGKSKKLKSVKELLGITIMERSSFEKNPIDFLEAKGYKEVKKDLIIKLPKYSLFELENGRKRMLASAGELQKGNELALPSKYVNFLYLASHYEKLKGSPEDNEQKQLFVEQHKHYLDEIIEQISEFSKRVILADANLDKVLSAYNKHRDKPIREQAENIIHLFTLTNLGAPAAFKYFDTTIDRKRYTSTKEVLDATLIHQSITGLYETRIDLSQLGGDGGPAPEAAAKGGLLGRDLLTKLKAQIQFSTEGPQVTWEDRPAMCLVLNLEEEYRLHEKPVPPSIDPSWLQLFPMVWAEKAGMGLANQVPPVVVELKSDASPVAVRQYPMSKEAREGIRPHIQRFLDLGILVPCQSPWNTPLLPVKKPGTNDYRPVQDLREVNKRVQDIHPTVPNPYNLLSSLPPSHTWYSVLDLKDAFFCLKLHPNSQPLFAFEWRDPEKGNTGQLTWTRLPQGFKNSPTLFNEALHRDLASFRALNPQVVMLQYVDDLLVAAPTYRDCKEGTRRLLQELSKLGYRVSAKKAQLCREEVTYLGYLLKGGKRWLTPARKATVMKIPTPTTPRQVREFLGKAGFCRLFIPGFASLAAPLYPLTRPKVPFTWTEAHQEAFGRIKEALLSAPALALPDLTKPFALYVDEKEGVARGVLTQTLGPWRRPVAYLSKKLDPVASGWPTCLKAIAAVALLLKDADKLTLGQNVLVIAPHNLESIVRQPPDRWMTNARMTHYQSLLLNERVSFAPPAILNPATLLPVESDDTPIHICSEILAEETGTRPDLRDQPLPGVPAWYTDGSSFIMDGRRQAGAAIVDNKRTVWASNLPEGTSAQKAELIALTQALRLAEGKSINIYTDSRYAFATAHVHGAIYKQRGWLTSAGKDIKNKEEILALLEAIHLPKRVAIIHCPGHQRGTDPVATGNRKADEAAKQAAQSTRILTETTKNAGKRTADGSEFEKRTADGSEFESPKKKAKVE

SEQ ID NO: 1670 - protein, 2162 aa, synthetic construct
MPAAKRVKLDGGDKKYSIGLDIGTNSVGWAVITDEYKVPSKKFKVLGNTDRHSIKKNLIGALLFDSGETAEATRLKRTARRRYTRRKNRICYLQEIFSNEMAKVDDSFFHRLEESFLVEEDKKHERHPIFGNIVDEVAYHEKYPTIYHLRKKLVDSTDKADLRLIYLALAHMIKFRGHFLIEGDLNPDNSDVDKLFIQLVQTYNQLFEENPINASGVDAKAILSARLSKSRRLENLIAQLPGEKKNGLFGNLIALSLGLTPNFKSNFDLAEDAKLQLSKDTYDDDLDNLLAQIGDQYADLFLAAKNLSDAILLSDILRVNTEITKAPLSASMIKRYDEHHQDLTLLKALVRQQLPEKYKEIFFDQSKNGYAGYIDGGASQEEFYKFIKPILEKMDGTEELLVKLNREDLLRKQRTFDNGSIPHQIHLGELHAILRRQEDFYPFLKDNREKIEKILTFRIPYYVGPLARGNSRFAWMTRKSEETITPWNFEEVVDKGASAQSFIERMTNFDKNLPNEKVLPKHSLLYEYFTVYNELTKVKYVTEGMRKPAFLSGEQKKAIVDLLFKTNRKVTVKQLKEDYFKKIECFDSVEISGVEDRFNASLGTYHDLLKIIKDKDFLDNEENEDILEDIVLTLTLFEDREMIEERLKTYAHLFDDKVMKQLKRRRYTGWGRLSRKLINGIRDKQSGKTILDFLKSDGFANRNFMQLIHDDSLTFKEDIQKAQVSGQGDSLHEHIANLAGSPAIKKGILQTVKVVDELVKVMGRHKPENIVIEMARENQTTQKGQKNSRERMKRIEEGIKELGSQILKEHPVENTQLQNEKLYLYYLQNGRDMYVDQELDINRLSDYDVDHIVPQSFLKDDSIDNKVLTRSDKARGKSDNVPSEEVVKKMKNYWRQLLNAKLITQRKFDNLTKAERGGLSELDKAGFIKRQLVETRQITKHVAQILDSRMNTKYDENDKLIREVKVITLKSKLVSDFRKDFQFYKVREINNYHHAHDAYLNAVVGTALIKKYPKLESEFVYGDYKVYDVRKMIAKSEQEIGKATAKYFFYSNIMNFFKTEITLANGEIRKRPLIETNGETGEIVWDKGRDFATVRKVLSMPQVNIVKKTEVQTGGFSKESILPKRNSDKLIARKKDWDPKKYGGFDSPTVAYSVLVVAKVEKGKSKKLKSVKELLGITIMERSSFEKNPIDFLEAKGYKEVKKDLIIKLPKYSLFELENGRKRMLASAGELQKGNELALPSKYVNFLYLASHYEKLKGSPEDNEQKQLFVEQHKHYLDEIIEQISEFSKRVILADANLDKVLSAYNKHRDKPIREQAENIIHLFTLTNLGAPAAFKYFDTTIDRKRYTSTKEVLDATLIHQSITGLYETRIDLSQLGGDGGAEAAAKEAAAKEAAAKEAAAKALEAEAAAKEAAAKEAAAKEAAAKAGGLLGRDLLTKLKAQIQFSTEGPQVTWEDRPAMCLVLNLEEEYRLHEKPVPPSIDPSWLQLFPMVWAEKAGMGLANQVPPVVVELKSDASPVAVRQYPMSKEAREGIRPHIQRFLDLGILVPCQSPWNTPLLPVKKPGTNDYRPVQDLREVNKRVQDIHPTVPNPYNLLSSLPPSHTWYSVLDLKDAFFCLKLHPNSQPLFAFEWRDPEKGNTGQLTWTRLPQGFKNSPTLFNEALHRDLASFRALNPQVVMLQYVDDLLVAAPTYRDCKEGTRRLLQELSKLGYRVSAKKAQLCREEVTYLGYLLKGGKRWLTPARKATVMKIPTPTTPRQVREFLGKAGFCRLFIPGFASLAAPLYPLTRPKVPFTWTEAHQEAFGRIKEALLSAPALALPDLTKPFALYVDEKEGVARGVLTQTLGPWRRPVAYLSKKLDPVASGWPTCLKAIAAVALLLKDADKLTLGQNVLVIAPHNLESIVRQPPDRWMTNARMTHYQSLLLNERVSFAPPAILNPATLLPVESDDTPIHICSEILAEETGTRPDLRDQPLPGVPAWYTDGSSFIMDGRRQAGAAIVDNKRTVWASNLPEGTSAQKAELIALTQALRLAEGKSINIYTDSRYAFATAHVHGAIYKQRGWLTSAGKDIKNKEEILALLEAIHLPKRVAIIHCPGHQRGTDPVATGNRKADEAAKQAAQSTRILTETTKNAGKRTADGSEFEKRTADGSEFESPKKKAKVE

SEQ ID NO: 1671 - protein, 2124 aa, synthetic construct
MPAAKRVKLDGGDKKYSIGLDIGTNSVGWAVITDEYKVPSKKFKVLGNTDRHSIKKNLIGALLFDSGETAEATRLKRTARRRYTRRKNRICYLQEIFSNEMAKVDDSFFHRLEESFLVEEDKKHERHPIFGNIVDEVAYHEKYPTIYHLRKKLVDSTDKADLRLIYLALAHMIKFRGHFLIEGDLNPDNSDVDKLFIQLVQTYNQLFEENPINASGVDAKAILSARLSKSRRLENLIAQLPGEKKNGLFGNLIALSLGLTPNFKSNFDLAEDAKLQLSKDTYDDDLDNLLAQIGDQYADLFLAAKNLSDAILLSDILRVNTEITKAPLSASMIKRYDEHHQDLTLLKALVRQQLPEKYKEIFFDQSKNGYAGYIDGGASQEEFYKFIKPILEKMDGTEELLVKLNREDLLRKQRTFDNGSIPHQIHLGELHAILRRQEDFYPFLKDNREKIEKILTFRIPYYVGPLARGNSRFAWMTRKSEETITPWNFEEVVDKGASAQSFIERMTNFDKNLPNEKVLPKHSLLYEYFTVYNELTKVKYVTEGMRKPAFLSGEQKKAIVDLLFKTNRKVTVKQLKEDYFKKIECFDSVEISGVEDRFNASLGTYHDLLKIIKDKDFLDNEENEDILEDIVLTLTLFEDREMIEERLKTYAHLFDDKVMKQLKRRRYTGWGRLSRKLINGIRDKQSGKTILDFLKSDGFANRNFMQLIHDDSLTFKEDIQKAQVSGQGDSLHEHIANLAGSPAIKKGILQTVKVVDELVKVMGRHKPENIVIEMARENQTTQKGQKNSRERMKRIEEGIKELGSQILKEHPVENTQLQNEKLYLYYLQNGRDMYVDQELDINRLSDYDVDHIVPQSFLKDDSIDNKVLTRSDKARGKSDNVPSEEVVKKMKNYWRQLLNAKLITQRKFDNLTKAERGGLSELDKAGFIKRQLVETRQITKHVAQILDSRMNTKYDENDKLIREVKVITLKSKLVSDFRKDFQFYKVREINNYHHAHDAYLNAVVGTALIKKYPKLESEFVYGDYKVYDVRKMIAKSEQEIGKATAKYFFYSNIMNFFKTEITLANGEIRKRPLIETNGETGEIVWDKGRDFATVRKVLSMPQVNIVKKTEVQTGGFSKESILPKRNSDKLIARKKDWDPKKYGGFDSPTVAYSVLVVAKVEKGKSKKLKSVKELLGITIMERSSFEKNPIDFLEAKGYKEVKKDLIIKLPKYSLFELENGRKRMLASAGELQKGNELALPSKYVNFLYLASHYEKLKGSPEDNEQKQLFVEQHKHYLDEIIEQISEFSKRVILADANLDKVLSAYNKHRDKPIREQAENIIHLFTLTNLGAPAAFKYFDTTIDRKRYTSTKEVLDATLIHQSITGLYETRIDLSQLGGDGGEAAAKGSSGGLLGRDLLTKLKAQIQFSTEGPQVTWEDRPAMCLVLNLEEEYRLHEKPVPPSIDPSWLQLFPMVWAEKAGMGLANQVPPVVVELKSDASPVAVRQYPMSKEAREGIRPHIQRFLDLGILVPCQSPWNTPLLPVKKPGTNDYRPVQDLREVNKRVQDIHPTVPNPYNLLSSLPPSHTWYSVLDLKDAFFCLKLHPNSQPLFAFEWRDPEKGNTGQLTWTRLPQGFKNSPTLFNEALHRDLASFRALNPQVVMLQYVDDLLVAAPTYRDCKEGTRRLLQELSKLGYRVSAKKAQLCREEVTYLGYLLKGGKRWLTPARKATVMKIPTPTTPRQVREFLGKAGFCRLFIPGFASLAAPLYPLTRPKVPFTWTEAHQEAFGRIKEALLSAPALALPDLTKPFALYVDEKEGVARGVLTQTLGPWRRPVAYLSKKLDPVASGWPTCLKAIAAVALLLKDADKLTLGQNVLVIAPHNLESIVRQPPDRWMTNARMTHYQSLLLNERVSFAPPAILNPATLLPVESDDTPIHICSEILAEETGTRPDLRDQPLPGVPAWYTDGSSFIMDGRRQAGAAIVDNKRTVWASNLPEGTSAQKAELIALTQALRLAEGKSINIYTDSRYAFATAHVHGAIYKQRGWLTSAGKDIKNKEEILALLEAIHLPKRVAIIHCPGHQRGTDPVATGNRKADEAAKQAAQSTRILTETTKNAGKRTADGSEFEKRTADGSEFESPKKKAKVE

SEQ ID NO: 1672 - protein, 2127 aa, synthetic construct
MPAAKRVKLDGGDKKYSIGLDIGTNSVGWAVITDEYKVPSKKFKVLGNTDRHSIKKNLIGALLFDSGETAEATRLKRTARRRYTRRKNRICYLQEIFSNEMAKVDDSFFHRLEESFLVEEDKKHERHPIFGNIVDEVAYHEKYPTIYHLRKKLVDSTDKADLRLIYLALAHMIKFRGHFLIEGDLNPDNSDVDKLFIQLVQTYNQLFEENPINASGVDAKAILSARLSKSRRLENLIAQLPGEKKNGLFGNLIALSLGLTPNFKSNFDLAEDAKLQLSKDTYDDDLDNLLAQIGDQYADLFLAAKNLSDAILLSDILRVNTEITKAPLSASMIKRYDEHHQDLTLLKALVRQQLPEKYKEIFFDQSKNGYAGYIDGGASQEEFYKFIKPILEKMDGTEELLVKLNREDLLRKQRTFDNGSIPHQIHLGELHAILRRQEDFYPFLKDNREKIEKILTFRIPYYVGPLARGNSRFAWMTRKSEETITPWNFEEVVDKGASAQSFIERMTNFDKNLPNEKVLPKHSLLYEYFTVYNELTKVKYVTEGMRKPAFLSGEQKKAIVDLLFKTNRKVTVKQLKEDYFKKIECFDSVEISGVEDRFNASLGTYHDLLKIIKDKDFLDNEENEDILEDIVLTLTLFEDREMIEERLKTYAHLFDDKVMKQLKRRRYTGWGRLSRKLINGIRDKQSGKTILDFLKSDGFANRNFMQLIHDDSLTFKEDIQKAQVSGQGDSLHEHIANLAGSPAIKKGILQTVKVVDELVKVMGRHKPENIVIEMARENQTTQKGQKNSRERMKRIEEGIKELGSQILKEHPVENTQLQNEKLYLYYLQNGRDMYVDQELDINRLSDYDVDHIVPQSFLKDDSIDNKVLTRSDKARGKSDNVPSEEVVKKMKNYWRQLLNAKLITQRKFDNLTKAERGGLSELDKAGFIKRQLVETRQITKHVAQILDSRMNTKYDENDKLIREVKVITLKSKLVSDFRKDFQFYKVREINNYHHAHDAYLNAVVGTALIKKYPKLESEFVYGDYKVYDVRKMIAKSEQEIGKATAKYFFYSNIMNFFKTEITLANGEIRKRPLIETNGETGEIVWDKGRDFATVRKVLSMPQVNIVKKTEVQTGGFSKESILPKRNSDKLIARKKDWDPKKYGGFDSPTVAYSVLVVAKVEKGKSKKLKSVKELLGITIMERSSFEKNPIDFLEAKGYKEVKKDLIIKLPKYSLFELENGRKRMLASAGELQKGNELALPSKYVNFLYLASHYEKLKGSPEDNEQKQLFVEQHKHYLDEIIEQISEFSKRVILADANLDKVLSAYNKHRDKPIREQAENIIHLFTLTNLGAPAAFKYFDTTIDRKRYTSTKEVLDATLIHQSITGLYETRIDLSQLGGDGGGGGEAAAKPAPGGLLGRDLLTKLKAQIQFSTEGPQVTWEDRPAMCLVLNLEEEYRLHEKPVPPSIDPSWLQLFPMVWAEKAGMGLANQVPPVVVELKSDASPVAVRQYPMSKEAREGIRPHIQRFLDLGILVPCQSPWNTPLLPVKKPGTNDYRPVQDLREVNKRVQDIHPTVPNPYNLLSSLPPSHTWYSVLDLKDAFFCLKLHPNSQPLFAFEWRDPEKGNTGQLTWTRLPQGFKNSPTLFNEALHRDLASFRALNPQVVMLQYVDDLLVAAPTYRDCKEGTRRLLQELSKLGYRVSAKKAQLCREEVTYLGYLLKGGKRWLTPARKATVMKIPTPTTPRQVREFLGKAGFCRLFIPGFASLAAPLYPLTRPKVPFTWTEAHQEAFGRIKEALLSAPALALPDLTKPFALYVDEKEGVARGVLTQTLGPWRRPVAYLSKKLDPVASGWPTCLKAIAAVALLLKDADKLTLGQNVLVIAPHNLESIVRQPPDRWMTNARMTHYQSLLLNERVSFAPPAILNPATLLPVESDDTPIHICSEILAEETGTRPDLRDQPLPGVPAWYTDGSSFIMDGRRQAGAAIVDNKRTVWASNLPEGTSAQKAELIALTQALRLAEGKSINIYTDSRYAFATAHVHGAIYKQRGWLTSAGKDIKNKEEILALLEAIHLPKRVAIIHCPGHQRGTDPVATGNRKADEAAKQAAQSTRILTETTKNAGKRTADGSEFEKRTADGSEFESPKKKAKVE

SEQ ID NO: 1673 - protein, 2122 aa, synthetic construct
MPAAKRVKLDGGDKKYSIGLDIGTNSVGWAVITDEYKVPSKKFKVLGNTDRHSIKKNLIGALLFDSGETAEATRLKRTARRRYTRRKNRICYLQEIFSNEMAKVDDSFFHRLEESFLVEEDKKHERHPIFGNIVDEVAYHEKYPTIYHLRKKLVDSTDKADLRLIYLALAHMIKFRGHFLIEGDLNPDNSDVDKLFIQLVQTYNQLFEENPINASGVDAKAILSARLSKSRRLENLIAQLPGEKKNGLFGNLIALSLGLTPNFKSNFDLAEDAKLQLSKDTYDDDLDNLLAQIGDQYADLFLAAKNLSDAILLSDILRVNTEITKAPLSASMIKRYDEHHQDLTLLKALVRQQLPEKYKEIFFDQSKNGYAGYIDGGASQEEFYKFIKPILEKMDGTEELLVKLNREDLLRKQRTFDNGSIPHQIHLGELHAILRRQEDFYPFLKDNREKIEKILTFRIPYYVGPLARGNSRFAWMTRKSEETITPWNFEEVVDKGASAQSFIERMTNFDKNLPNEKVLPKHSLLYEYFTVYNELTKVKYVTEGMRKPAFLSGEQKKAIVDLLFKTNRKVTVKQLKEDYFKKIECFDSVEISGVEDRFNASLGTYHDLLKIIKDKDFLDNEENEDILEDIVLTLTLFEDREMIEERLKTYAHLFDDKVMKQLKRRRYTGWGRLSRKLINGIRDKQSGKTILDFLKSDGFANRNFMQLIHDDSLTFKEDIQKAQVSGQGDSLHEHIANLAGSPAIKKGILQTVKVVDELVKVMGRHKPENIVIEMARENQTTQKGQKNSRERMKRIEEGIKELGSQILKEHPVENTQLQNEKLYLYYLQNGRDMYVDQELDINRLSDYDVDHIVPQSFLKDDSIDNKVLTRSDKARGKSDNVPSEEVVKKMKNYWRQLLNAKLITQRKFDNLTKAERGGLSELDKAGFIKRQLVETRQITKHVAQILDSRMNTKYDENDKLIREVKVITLKSKLVSDFRKDFQFYKVREINNYHHAHDAYLNAVVGTALIKKYPKLESEFVYGDYKVYDVRKMIAKSEQEIGKATAKYFFYSNIMNFFKTEITLANGEIRKRPLIETNGETGEIVWDKGRDFATVRKVLSMPQVNIVKKTEVQTGGFSKESILPKRNSDKLIARKKDWDPKKYGGFDSPTVAYSVLVVAKVEKGKSKKLKSVKELLGITIMERSSFEKNPIDFLEAKGYKEVKKDLIIKLPKYSLFELENGRKRMLASAGELQKGNELALPSKYVNFLYLASHYEKLKGSPEDNEQKQLFVEQHKHYLDEIIEQISEFSKRVILADANLDKVLSAYNKHRDKPIREQAENIIHLFTLTNLGAPAAFKYFDTTIDRKRYTSTKEVLDATLIHQSITGLYETRIDLSQLGGDGGGGGPAPGGLLGRDLLTKLKAQIQFSTEGPQVTWEDRPAMCLVLNLEEEYRLHEKPVPPSIDPSWLQLFPMVWAEKAGMGLANQVPPVVVELKSDASPVAVRQYPMSKEAREGIRPHIQRFLDLGILVPCQSPWNTPLLPVKKPGTNDYRPVQDLREVNKRVQDIHPTVPNPYNLLSSLPPSHTWYSVLDLKDAFFCLKLHPNSQPLFAFEWRDPEKGNTGQLTWTRLPQGFKNSPTLFNEALHRDLASFRALNPQVVMLQYVDDLLVAAPTYRDCKEGTRRLLQELSKLGYRVSAKKAQLCREEVTYLGYLLKGGKRWLTPARKATVMKIPTPTTPRQVREFLGKAGFCRLFIPGFASLAAPLYPLTRPKVPFTWTEAHQEAFGRIKEALLSAPALALPDLTKPFALYVDEKEGVARGVLTQTLGPWRRPVAYLSKKLDPVASGWPTCLKAIAAVALLLKDADKLTLGQNVLVIAPHNLESIVRQPPDRWMTNARMTHYQSLLLNERVSFAPPAILNPATLLPVESDDTPIHICSEILAEETGTRPDLRDQPLPGVPAWYTDGSSFIMDGRRQAGAAIVDNKRTVWASNLPEGTSAQKAELIALTQALRLAEGKSINIYTDSRYAFATAHVHGAIYKQRGWLTSAGKDIKNKEEILALLEAIHLPKRVAIIHCPGHQRGTDPVATGNRKADEAAKQAAQSTRILTETTKNAGKRTADGSEFEKRTADGSEFESPKKKAKVE

SEQ ID NO: 1674 - protein, 2136 aa, synthetic construct
MPAAKRVKLDGGDKKYSIGLDIGTNSVGWAVITDEYKVPSKKFKVLGNTDRHSIKKNLIGALLFDSGETAEATRLKRTARRRYTRRKNRICYLQEIFSNEMAKVDDSFFHRLEESFLVEEDKKHERHPIFGNIVDEVAYHEKYPTIYHLRKKLVDSTDKADLRLIYLALAHMIKFRGHFLIEGDLNPDNSDVDKLFIQLVQTYNQLFEENPINASGVDAKAILSARLSKSRRLENLIAQLPGEKKNGLFGNLIALSLGLTPNFKSNFDLAEDAKLQLSKDTYDDDLDNLLAQIGDQYADLFLAAKNLSDAILLSDILRVNTEITKAPLSASMIKRYDEHHQDLTLLKALVRQQLPEKYKEIFFDQSKNGYAGYIDGGASQEEFYKFIKPILEKMDGTEELLVKLNREDLLRKQRTFDNGSIPHQIHLGELHAILRRQEDFYPFLKDNREKIEKILTFRIPYYVGPLARGNSRFAWMTRKSEETITPWNFEEVVDKGASAQSFIERMTNFDKNLPNEKVLPKHSLLYEYFTVYNELTKVKYVTEGMRKPAFLSGEQKKAIVDLLFKTNRKVTVKQLKEDYFKKIECFDSVEISGVEDRFNASLGTYHDLLKIIKDKDFLDNEENEDILEDIVLTLTLFEDREMIEERLKTYAHLFDDKVMKQLKRRRYTGWGRLSRKLINGIRDKQSGKTILDFLKSDGFANRNFMQLIHDDSLTFKEDIQKAQVSGQGDSLHEHIANLAGSPAIKKGILQTVKVVDELVKVMGRHKPENIVIEMARENQTTQKGQKNSRERMKRIEEGIKELGSQILKEHPVENTQLQNEKLYLYYLQNGRDMYVDQELDINRLSDYDVDHIVPQSFLKDDSIDNKVLTRSDKARGKSDNVPSEEVVKKMKNYWRQLLNAKLITQRKFDNLTKAERGGLSELDKAGFIKRQLVETRQITKHVAQILDSRMNTKYDENDKLIREVKVITLKSKLVSDFRKDFQFYKVREINNYHHAHDAYLNAVVGTALIKKYPKLESEFVYGDYKVYDVRKMIAKSEQEIGKATAKYFFYSNIMNFFKTEITLANGEIRKRPLIETNGETGEIVWDKGRDFATVRKVLSMPQVNIVKKTEVQTGGFSKESILPKRNSDKLIARKKDWDPKKYGGFDSPTVAYSVLVVAKVEKGKSKKLKSVKELLGITIMERSSFEKNPIDFLEAKGYKEVKKDLIIKLPKYSLFELENGRKRMLASAGELQKGNELALPSKYVNFLYLASHYEKLKGSPEDNEQKQLFVEQHKHYLDEIIEQISEFSKRVILADANLDKVLSAYNKHRDKPIREQAENIIHLFTLTNLGAPAAFKYFDTTIDRKRYTSTKEVLDATLIHQSITGLYETRIDLSQLGGDGGEAAAKEAAAKEAAAKEAAAKGGLLGRDLLTKLKAQIQFSTEGPQVTWEDRPAMCLVLNLEEEYRLHEKPVPPSIDPSWLQLFPMVWAEKAGMGLANQVPPVVVELKSDASPVAVRQYPMSKEAREGIRPHIQRFLDLGILVPCQSPWNTPLLPVKKPGTNDYRPVQDLREVNKRVQDIHPTVPNPYNLLSSLPPSHTWYSVLDLKDAFFCLKLHPNSQPLFAFEWRDPEKGNTGQLTWTRLPQGFKNSPTLFNEALHRDLASFRALNPQVVMLQYVDDLLVAAPTYRDCKEGTRRLLQELSKLGYRVSAKKAQLCREEVTYLGYLLKGGKRWLTPARKATVMKIPTPTTPRQVREFLGKAGFCRLFIPGFASLAAPLYPLTRPKVPFTWTEAHQEAFGRIKEALLSAPALALPDLTKPFALYVDEKEGVARGVLTQTLGPWRRPVAYLSKKLDPVASGWPTCLKAIAAVALLLKDADKLTLGQNVLVIAPHNLESIVRQPPDRWMTNARMTHYQSLLLNERVSFAPPAILNPATLLPVESDDTPIHICSEILAEETGTRPDLRDQPLPGVPAWYTDGSSFIMDGRRQAGAAIVDNKRTVWASNLPEGTSAQKAELIALTQALRLAEGKSINIYTDSRYAFATAHVHGAIYKQRGWLTSAGKDIKNKEEILALLEAIHLPKRVAIIHCPGHQRGTDPVATGNRKADEAAKQAAQSTRILTETTKNAGKRTADGSEFEKRTADGSEFESPKKKAKVE

SEQ ID NO: 1675 - protein, 2119 aa, synthetic construct
MPAAKRVKLDGGDKKYSIGLDIGTNSVGWAVITDEYKVPSKKFKVLGNTDRHSIKKNLIGALLFDSGETAEATRLKRTARRRYTRRKNRICYLQEIFSNEMAKVDDSFFHRLEESFLVEEDKKHERHPIFGNIVDEVAYHEKYPTIYHLRKKLVDSTDKADLRLIYLALAHMIKFRGHFLIEGDLNPDNSDVDKLFIQLVQTYNQLFEENPINASGVDAKAILSARLSKSRRLENLIAQLPGEKKNGLFGNLIALSLGLTPNFKSNFDLAEDAKLQLSKDTYDDDLDNLLAQIGDQYADLFLAAKNLSDAILLSDILRVNTEITKAPLSASMIKRYDEHHQDLTLLKALVRQQLPEKYKEIFFDQSKNGYAGYIDGGASQEEFYKFIKPILEKMDGTEELLVKLNREDLLRKQRTFDNGSIPHQIHLGELHAILRRQEDFYPFLKDNREKIEKILTFRIPYYVGPLARGNSRFAWMTRKSEETITPWNFEEVVDKGASAQSFIERMTNFDKNLPNEKVLPKHSLLYEYFTVYNELTKVKYVTEGMRKPAFLSGEQKKAIVDLLFKTNRKVTVKQLKEDYFKKIECFDSVEISGVEDRFNASLGTYHDLLKIIKDKDFLDNEENEDILEDIVLTLTLFEDREMIEERLKTYAHLFDDKVMKQLKRRRYTGWGRLSRKLINGIRDKQSGKTILDFLKSDGFANRNFMQLIHDDSLTFKEDIQKAQVSGQGDSLHEHIANLAGSPAIKKGILQTVKVVDELVKVMGRHKPENIVIEMARENQTTQKGQKNSRERMKRIEEGIKELGSQILKEHPVENTQLQNEKLYLYYLQNGRDMYVDQELDINRLSDYDVDHIVPQSFLKDDSIDNKVLTRSDKARGKSDNVPSEEVVKKMKNYWRQLLNAKLITQRKFDNLTKAERGGLSELDKAGFIKRQLVETRQITKHVAQILDSRMNTKYDENDKLIREVKVITLKSKLVSDFRKDFQFYKVREINNYHHAHDAYLNAVVGTALIKKYPKLESEFVYGDYKVYDVRKMIAKSEQEIGKATAKYFFYSNIMNFFKTEITLANGEIRKRPLIETNGETGEIVWDKGRDFATVRKVLSMPQVNIVKKTEVQTGGFSKESILPKRNSDKLIARKKDWDPKKYGGFDSPTVAYSVLVVAKVEKGKSKKLKSVKELLGITIMERSSFEKNPIDFLEAKGYKEVKKDLIIKLPKYSLFELENGRKRMLASAGELQKGNELALPSKYVNFLYLASHYEKLKGSPEDNEQKQLFVEQHKHYLDEIIEQISEFSKRVILADANLDKVLSAYNKHRDKPIREQAENIIHLFTLTNLGAPAAFKYFDTTIDRKRYTSTKEVLDATLIHQSITGLYETRIDLSQLGGDGGGGSGGLLGRDLLTKLKAQIQFSTEGPQVTWEDRPAMCLVLNLEEEYRLHEKPVPPSIDPSWLQLFPMVWAEKAGMGLANQVPPVVVELKSDASPVAVRQYPMSKEAREGIRPHIQRFLDLGILVPCQSPWNTPLLPVKKPGTNDYRPVQDLREVNKRVQDIHPTVPNPYNLLSSLPPSHTWYSVLDLKDAFFCLKLHPNSQPLFAFEWRDPEKGNTGQLTWTRLPQGFKNSPTLFNEALHRDLASFRALNPQVVMLQYVDDLLVAAPTYRDCKEGTRRLLQELSKLGYRVSAKKAQLCREEVTYLGYLLKGGKRWLTPARKATVMKIPTPTTPRQVREFLGKAGFCRLFIPGFASLAAPLYPLTRPKVPFTWTEAHQEAFGRIKEALLSAPALALPDLTKPFALYVDEKEGVARGVLTQTLGPWRRPVAYLSKKLDPVASGWPTCLKAIAAVALLLKDADKLTLGQNVLVIAPHNLESIVRQPPDRWMTNARMTHYQSLLLNERVSFAPPAILNPATLLPVESDDTPIHICSEILAEETGTRPDLRDQPLPGVPAWYTDGSSFIMDGRRQAGAAIVDNKRTVWASNLPEGTSAQKAELIALTQALRLAEGKSINIYTDSRYAFATAHVHGAIYKQRGWLTSAGKDIKNKEEILALLEAIHLPKRVAIIHCPGHQRGTDPVATGNRKADEAAKQAAQSTRILTETTKNAGKRTADGSEFEKRTADGSEFESPKKKAKVE

SEQ ID NO: 1676 - protein, 2122 aa, synthetic construct
MPAAKRVKLDGGDKKYSIGLDIGTNSVGWAVITDEYKVPSKKFKVLGNTDRHSIKKNLIGALLFDSGETAEATRLKRTARRRYTRRKNRICYLQEIFSNEMAKVDDSFFHRLEESFLVEEDKKHERHPIFGNIVDEVAYHEKYPTIYHLRKKLVDSTDKADLRLIYLALAHMIKFRGHFLIEGDLNPDNSDVDKLFIQLVQTYNQLFEENPINASGVDAKAILSARLSKSRRLENLIAQLPGEKKNGLFGNLIALSLGLTPNFKSNFDLAEDAKLQLSKDTYDDDLDNLLAQIGDQYADLFLAAKNLSDAILLSDILRVNTEITKAPLSASMIKRYDEHHQDLTLLKALVRQQLPEKYKEIFFDQSKNGYAGYIDGGASQEEFYKFIKPILEKMDGTEELLVKLNREDLLRKQRTFDNGSIPHQIHLGELHAILRRQEDFYPFLKDNREKIEKILTFRIPYYVGPLARGNSRFAWMTRKSEETITPWNFEEVVDKGASAQSFIERMTNFDKNLPNEKVLPKHSLLYEYFTVYNELTKVKYVTEGMRKPAFLSGEQKKAIVDLLFKTNRKVTVKQLKEDYFKKIECFDSVEISGVEDRFNASLGTYHDLLKIIKDKDFLDNEENEDILEDIVLTLTLFEDREMIEERLKTYAHLFDDKVMKQLKRRRYTGWGRLSRKLINGIRDKQSGKTILDFLKSDGFANRNFMQLIHDDSLTFKEDIQKAQVSGQGDSLHEHIANLAGSPAIKKGILQTVKVVDELVKVMGRHKPENIVIEMARENQTTQKGQKNSRERMKRIEEGIKELGSQILKEHPVENTQLQNEKLYLYYLQNGRDMYVDQELDINRLSDYDVDHIVPQSFLKDDSIDNKVLTRSDKARGKSDNVPSEEVVKKMKNYWRQLLNAKLITQRKFDNLTKAERGGLSELDKAGFIKRQLVETRQITKHVAQILDSRMNTKYDENDKLIREVKVITLKSKLVSDFRKDFQFYKVREINNYHHAHDAYLNAVVGTALIKKYPKLESEFVYGDYKVYDVRKMIAKSEQEIGKATAKYFFYSNIMNFFKTEITLANGEIRKRPLIETNGETGEIVWDKGRDFATVRKVLSMPQVNIVKKTEVQTGGFSKESILPKRNSDKLIARKKDWDPKKYGGFDSPTVAYSVLVVAKVEKGKSKKLKSVKELLGITIMERSSFEKNPIDFLEAKGYKEVKKDLIIKLPKYSLFELENGRKRMLASAGELQKGNELALPSKYVNFLYLASHYEKLKGSPEDNEQKQLFVEQHKHYLDEIIEQISEFSKRVILADANLDKVLSAYNKHRDKPIREQAENIIHLFTLTNLGAPAAFKYFDTTIDRKRYTSTKEVLDATLIHQSITGLYETRIDLSQLGGDGGGGGGSSGGLLGRDLLTKLKAQIQFSTEGPQVTWEDRPAMCLVLNLEEEYRLHEKPVPPSIDPSWLQLFPMVWAEKAGMGLANQVPPVVVELKSDASPVAVRQYPMSKEAREGIRPHIQRFLDLGILVPCQSPWNTPLLPVKKPGTNDYRPVQDLREVNKRVQDIHPTVPNPYNLLSSLPPSHTWYSVLDLKDAFFCLKLHPNSQPLFAFEWRDPEKGNTGQLTWTRLPQGFKNSPTLFNEALHRDLASFRALNPQVVMLQYVDDLLVAAPTYRDCKEGTRRLLQELSKLGYRVSAKKAQLCREEVTYLGYLLKGGKRWLTPARKATVMKIPTPTTPRQVREFLGKAGFCRLFIPGFASLAAPLYPLTRPKVPFTWTEAHQEAFGRIKEALLSAPALALPDLTKPFALYVDEKEGVARGVLTQTLGPWRRPVAYLSKKLDPVASGWPTCLKAIAAVALLLKDADKLTLGQNVLVIAPHNLESIVRQPPDRWMTNARMTHYQSLLLNERVSFAPPAILNPATLLPVESDDTPIHICSEILAEETGTRPDLRDQPLPGVPAWYTDGSSFIMDGRRQAGAAIVDNKRTVWASNLPEGTSAQKAELIALTQALRLAEGKSINIYTDSRYAFATAHVHGAIYKQRGWLTSAGKDIKNKEEILALLEAIHLPKRVAIIHCPGHQRGTDPVATGNRKADEAAKQAAQSTRILTETTKNAGKRTADGSEFEKRTADGSEFESPKKKAKVE

SEQ ID NO: 1677 - protein, 2127 aa, synthetic construct
MPAAKRVKLDGGDKKYSIGLDIGTNSVGWAVITDEYKVPSKKFKVLGNTDRHSIKKNLIGALLFDSGETAEATRLKRTARRRYTRRKNRICYLQEIFSNEMAKVDDSFFHRLEESFLVEEDKKHERHPIFGNIVDEVAYHEKYPTIYHLRKKLVDSTDKADLRLIYLALAHMIKFRGHFLIEGDLNPDNSDVDKLFIQLVQTYNQLFEENPINASGVDAKAILSARLSKSRRLENLIAQLPGEKKNGLFGNLIALSLGLTPNFKSNFDLAEDAKLQLSKDTYDDDLDNLLAQIGDQYADLFLAAKNLSDAILLSDILRVNTEITKAPLSASMIKRYDEHHQDLTLLKALVRQQLPEKYKEIFFDQSKNGYAGYIDGGASQEEFYKFIKPILEKMDGTEELLVKLNREDLLRKQRTFDNGSIPHQIHLGELHAILRRQEDFYPFLKDNREKIEKILTFRIPYYVGPLARGNSRFAWMTRKSEETITPWNFEEVVDKGASAQSFIERMTNFDKNLPNEKVLPKHSLLYEYFTVYNELTKVKYVTEGMRKPAFLSGEQKKAIVDLLFKTNRKVTVKQLKEDYFKKIECFDSVEISGVEDRFNASLGTYHDLLKIIKDKDFLDNEENEDILEDIVLTLTLFEDREMIEERLKTYAHLFDDKVMKQLKRRRYTGWGRLSRKLINGIRDKQSGKTILDFLKSDGFANRNFMQLIHDDSLTFKEDIQKAQVSGQGDSLHEHIANLAGSPAIKKGILQTVKVVDELVKVMGRHKPENIVIEMARENQTTQKGQKNSRERMKRIEEGIKELGSQILKEHPVENTQLQNEKLYLYYLQNGRDMYVDQELDINRLSDYDVDHIVPQSFLKDDSIDNKVLTRSDKARGKSDNVPSEEVVKKMKNYWRQLLNAKLITQRKFDNLTKAERGGLSELDKAGFIKRQLVETRQITKHVAQILDSRMNTKYDENDKLIREVKVITLKSKLVSDFRKDFQFYKVREINNYHHAHDAYLNAVVGTALIKKYPKLESEFVYGDYKVYDVRKMIAKSEQEIGKATAKYFFYSNIMNFFKTEITLANGEIRKRPLIETNGETGEIVWDKGRDFATVRKVLSMPQVNIVKKTEVQTGGFSKESILPKRNSDKLIARKKDWDPKKYGGFDSPTVAYSVLVVAKVEKGKSKKLKSVKELLGITIMERSSFEKNPIDFLEAKGYKEVKKDLIIKLPKYSLFELENGRKRMLASAGELQKGNELALPSKYVNFLYLASHYEKLKGSPEDNEQKQLFVEQHKHYLDEIIEQISEFSKRVILADANLDKVLSAYNKHRDKPIREQAENIIHLFTLTNLGAPAAFKYFDTTIDRKRYTSTKEVLDATLIHQSITGLYETRIDLSQLGGDGGEAAAKGGGGSSGGLLGRDLLTKLKAQIQFSTEGPQVTWEDRPAMCLVLNLEEEYRLHEKPVPPSIDPSWLQLFPMVWAEKAGMGLANQVPPVVVELKSDASPVAVRQYPMSKEAREGIRPHIQRFLDLGILVPCQSPWNTPLLPVKKPGTNDYRPVQDLREVNKRVQDIHPTVPNPYNLLSSLPPSHTWYSVLDLKDAFFCLKLHPNSQPLFAFEWRDPEKGNTGQLTWTRLPQGFKNSPTLFNEALHRDLASFRALNPQVVMLQYVDDLLVAAPTYRDCKEGTRRLLQELSKLGYRVSAKKAQLCREEVTYLGYLLKGGKRWLTPARKATVMKIPTPTTPRQVREFLGKAGFCRLFIPGFASLAAPLYPLTRPKVPFTWTEAHQEAFGRIKEALLSAPALALPDLTKPFALYVDEKEGVARGVLTQTLGPWRRPVAYLSKKLDPVASGWPTCLKAIAAVALLLKDADKLTLGQNVLVIAPHNLESIVRQPPDRWMTNARMTHYQSLLLNERVSFAPPAILNPATLLPVESDDTPIHICSEILAEETGTRPDLRDQPLPGVPAWYTDGSSFIMDGRRQAGAAIVDNKRTVWASNLPEGTSAQKAELIALTQALRLAEGKSINIYTDSRYAFATAHVHGAIYKQRGWLTSAGKDIKNKEEILALLEAIHLPKRVAIIHCPGHQRGTDPVATGNRKADEAAKQAAQSTRILTETTKNAGKRTADGSEFEKRTADGSEFESPKKKAKVE

SEQ ID NO: 1678 - protein, 2128 aa, synthetic construct
MPAAKRVKLDGGDKKYSIGLDIGTNSVGWAVITDEYKVPSKKFKVLGNTDRHSIKKNLIGALLFDSGETAEATRLKRTARRRYTRRKNRICYLQEIFSNEMAKVDDSFFHRLEESFLVEEDKKHERHPIFGNIVDEVAYHEKYPTIYHLRKKLVDSTDKADLRLIYLALAHMIKFRGHFLIEGDLNPDNSDVDKLFIQLVQTYNQLFEENPINASGVDAKAILSARLSKSRRLENLIAQLPGEKKNGLFGNLIALSLGLTPNFKSNFDLAEDAKLQLSKDTYDDDLDNLLAQIGDQYADLFLAAKNLSDAILLSDILRVNTEITKAPLSASMIKRYDEHHQDLTLLKALVRQQLPEKYKEIFFDQSKNGYAGYIDGGASQEEFYKFIKPILEKMDGTEELLVKLNREDLLRKQRTFDNGSIPHQIHLGELHAILRRQEDFYPFLKDNREKIEKILTFRIPYYVGPLARGNSRFAWMTRKSEETITPWNFEEVVDKGASAQSFIERMTNFDKNLPNEKVLPKHSLLYEYFTVYNELTKVKYVTEGMRKPAFLSGEQKKAIVDLLFKTNRKVTVKQLKEDYFKKIECFDSVEISGVEDRFNASLGTYHDLLKIIKDKDFLDNEENEDILEDIVLTLTLFEDREMIEERLKTYAHLFDDKVMKQLKRRRYTGWGRLSRKLINGIRDKQSGKTILDFLKSDGFANRNFMQLIHDDSLTFKEDIQKAQVSGQGDSLHEHIANLAGSPAIKKGILQTVKVVDELVKVMGRHKPENIVIEMARENQTTQKGQKNSRERMKRIEEGIKELGSQILKEHPVENTQLQNEKLYLYYLQNGRDMYVDQELDINRLSDYDVDHIVPQSFLKDDSIDNKVLTRSDKARGKSDNVPSEEVVKKMKNYWRQLLNAKLITQRKFDNLTKAERGGLSELDKAGFIKRQLVETRQITKHVAQILDSRMNTKYDENDKLIREVKVITLKSKLVSDFRKDFQFYKVREINNYHHAHDAYLNAVVGTALIKKYPKLESEFVYGDYKVYDVRKMIAKSEQEIGKATAKYFFYSNIMNFFKTEITLANGEIRKRPLIETNGETGEIVWDKGRDFATVRKVLSMPQVNIVKKTEVQTGGFSKESILPKRNSDKLIARKKDWDPKKYGGFDSPTVAYSVLVVAKVEKGKSKKLKSVKELLGITIMERSSFEKNPIDFLEAKGYKEVKKDLIIKLPKYSLFELENGRKRMLASAGELQKGNELALPSKYVNFLYLASHYEKLKGSPEDNEQKQLFVEQHKHYLDEIIEQISEFSKRVILADANLDKVLSAYNKHRDKPIREQAENIIHLFTLTNLGAPAAFKYFDTTIDRKRYTSTKEVLDATLIHQSITGLYETRIDLSQLGGDGGGGSGGSGGSGGSGGLLGRDLLTKLKAQIQFSTEGPQVTWEDRPAMCLVLNLEEEYRLHEKPVPPSIDPSWLQLFPMVWAEKAGMGLANQVPPVVVELKSDASPVAVRQYPMSKEAREGIRPHIQRFLDLGILVPCQSPWNTPLLPVKKPGTNDYRPVQDLREVNKRVQDIHPTVPNPYNLLSSLPPSHTWYSVLDLKDAFFCLKLHPNSQPLFAFEWRDPEKGNTGQLTWTRLPQGFKNSPTLFNEALHRDLASFRALNPQVVMLQYVDDLLVAAPTYRDCKEGTRRLLQELSKLGYRVSAKKAQLCREEVTYLGYLLKGGKRWLTPARKATVMKIPTPTTPRQVREFLGKAGFCRLFIPGFASLAAPLYPLTRPKVPFTWTEAHQEAFGRIKEALLSAPALALPDLTKPFALYVDEKEGVARGVLTQTLGPWRRPVAYLSKKLDPVASGWPTCLKAIAAVALLLKDADKLTLGQNVLVIAPHNLESIVRQPPDRWMTNARMTHYQSLLLNERVSFAPPAILNPATLLPVESDDTPIHICSEILAEETGTRPDLRDQPLPGVPAWYTDGSSFIMDGRRQAGAAIVDNKRTVWASNLPEGTSAQKAELIALTQALRLAEGKSINIYTDSRYAFATAHVHGAIYKQRGWLTSAGKDIKNKEEILALLEAIHLPKRVAIIHCPGHQRGTDPVATGNRKADEAAKQAAQSTRILTETTKNAGKRTADGSEFEKRTADGSEFESPKKKAKVE

SEQ ID NO: 1679 - protein, 2124 aa, synthetic construct
MPAAKRVKLDGGDKKYSIGLDIGTNSVGWAVITDEYKVPSKKFKVLGNTDRHSIKKNLIGALLFDSGETAEATRLKRTARRRYTRRKNRICYLQEIFSNEMAKVDDSFFHRLEESFLVEEDKKHERHPIFGNIVDEVAYHEKYPTIYHLRKKLVDSTDKADLRLIYLALAHMIKFRGHFLIEGDLNPDNSDVDKLFIQLVQTYNQLFEENPINASGVDAKAILSARLSKSRRLENLIAQLPGEKKNGLFGNLIALSLGLTPNFKSNFDLAEDAKLQLSKDTYDDDLDNLLAQIGDQYADLFLAAKNLSDAILLSDILRVNTEITKAPLSASMIKRYDEHHQDLTLLKALVRQQLPEKYKEIFFDQSKNGYAGYIDGGASQEEFYKFIKPILEKMDGTEELLVKLNREDLLRKQRTFDNGSIPHQIHLGELHAILRRQEDFYPFLKDNREKIEKILTFRIPYYVGPLARGNSRFAWMTRKSEETITPWNFEEVVDKGASAQSFIERMTNFDKNLPNEKVLPKHSLLYEYFTVYNELTKVKYVTEGMRKPAFLSGEQKKAIVDLLFKTNRKVTVKQLKEDYFKKIECFDSVEISGVEDRFNASLGTYHDLLKIIKDKDFLDNEENEDILEDIVLTLTLFEDREMIEERLKTYAHLFDDKVMKQLKRRRYTGWGRLSRKLINGIRDKQSGKTILDFLKSDGFANRNFMQLIHDDSLTFKEDIQKAQVSGQGDSLHEHIANLAGSPAIKKGILQTVKVVDELVKVMGRHKPENIVIEMARENQTTQKGQKNSRERMKRIEEGIKELGSQILKEHPVENTQLQNEKLYLYYLQNGRDMYVDQELDINRLSDYDVDHIVPQSFLKDDSIDNKVLTRSDKARGKSDNVPSEEVVKKMKNYWRQLLNAKLITQRKFDNLTKAERGGLSELDKAGFIKRQLVETRQITKHVAQILDSRMNTKYDENDKLIREVKVITLKSKLVSDFRKDFQFYKVREINNYHHAHDAYLNAVVGTALIKKYPKLESEFVYGDYKVYDVRKMIAKSEQEIGKATAKYFFYSNIMNFFKTEITLANGEIRKRPLIETNGETGEIVWDKGRDFATVRKVLSMPQVNIVKKTEVQTGGFSKESILPKRNSDKLIARKKDWDPKKYGGFDSPTVAYSVLVVAKVEKGKSKKLKSVKELLGITIMERSSFEKNPIDFLEAKGYKEVKKDLIIKLPKYSLFELENGRKRMLASAGELQKGNELALPSKYVNFLYLASHYEKLKGSPEDNEQKQLFVEQHKHYLDEIIEQISEFSKRVILADANLDKVLSAYNKHRDKPIREQAENIIHLFTLTNLGAPAAFKYFDTTIDRKRYTSTKEVLDATLIHQSITGLYETRIDLSQLGGDGGEAAAKGGSGGLLGRDLLTKLKAQIQFSTEGPQVTWEDRPAMCLVLNLEEEYRLHEKPVPPSIDPSWLQLFPMVWAEKAGMGLANQVPPVVVELKSDASPVAVRQYPMSKEAREGIRPHIQRFLDLGILVPCQSPWNTPLLPVKKPGTNDYRPVQDLREVNKRVQDIHPTVPNPYNLLSSLPPSHTWYSVLDLKDAFFCLKLHPNSQPLFAFEWRDPEKGNTGQLTWTRLPQGFKNSPTLFNEALHRDLASFRALNPQVVMLQYVDDLLVAAPTYRDCKEGTRRLLQELSKLGYRVSAKKAQLCREEVTYLGYLLKGGKRWLTPARKATVMKIPTPTTPRQVREFLGKAGFCRLFIPGFASLAAPLYPLTRPKVPFTWTEAHQEAFGRIKEALLSAPALALPDLTKPFALYVDEKEGVARGVLTQTLGPWRRPVAYLSKKLDPVASGWPTCLKAIAAVALLLKDADKLTLGQNVLVIAPHNLESIVRQPPDRWMTNARMTHYQSLLLNERVSFAPPAILNPATLLPVESDDTPIHICSEILAEETGTRPDLRDQPLPGVPAWYTDGSSFIMDGRRQAGAAIVDNKRTVWASNLPEGTSAQKAELIALTQALRLAEGKSINIYTDSRYAFATAHVHGAIYKQRGWLTSAGKDIKNKEEILALLEAIHLPKRVAIIHCPGHQRGTDPVATGNRKADEAAKQAAQSTRILTETTKNAGKRTADGSEFEKRTADGSEFESPKKKAKVE

SEQ ID NO: 1680 - protein, 2123 aa, synthetic construct
MPAAKRVKLDGGDKKYSIGLDIGTNSVGWAVITDEYKVPSKKFKVLGNTDRHSIKKNLIGALLFDSGETAEATRLKRTARRRYTRRKNRICYLQEIFSNEMAKVDDSFFHRLEESFLVEEDKKHERHPIFGNIVDEVAYHEKYPTIYHLRKKLVDSTDKADLRLIYLALAHMIKFRGHFLIEGDLNPDNSDVDKLFIQLVQTYNQLFEENPINASGVDAKAILSARLSKSRRLENLIAQLPGEKKNGLFGNLIALSLGLTPNFKSNFDLAEDAKLQLSKDTYDDDLDNLLAQIGDQYADLFLAAKNLSDAILLSDILRVNTEITKAPLSASMIKRYDEHHQDLTLLKALVRQQLPEKYKEIFFDQSKNGYAGYIDGGASQEEFYKFIKPILEKMDGTEELLVKLNREDLLRKQRTFDNGSIPHQIHLGELHAILRRQEDFYPFLKDNREKIEKILTFRIPYYVGPLARGNSRFAWMTRKSEETITPWNFEEVVDKGASAQSFIERMTNFDKNLPNEKVLPKHSLLYEYFTVYNELTKVKYVTEGMRKPAFLSGEQKKAIVDLLFKTNRKVTVKQLKEDYFKKIECFDSVEISGVEDRFNASLGTYHDLLKIIKDKDFLDNEENEDILEDIVLTLTLFEDREMIEERLKTYAHLFDDKVMKQLKRRRYTGWGRLSRKLINGIRDKQSGKTILDFLKSDGFANRNFMQLIHDDSLTFKEDIQKAQVSGQGDSLHEHIANLAGSPAIKKGILQTVKVVDELVKVMGRHKPENIVIEMARENQTTQKGQKNSRERMKRIEEGIKELGSQILKEHPVENTQLQNEKLYLYYLQNGRDMYVDQELDINRLSDYDVDHIVPQSFLKDDSIDNKVLTRSDKARGKSDNVPSEEVVKKMKNYWRQLLNAKLITQRKFDNLTKAERGGLSELDKAGFIKRQLVETRQITKHVAQILDSRMNTKYDENDKLIREVKVITLKSKLVSDFRKDFQFYKVREINNYHHAHDAYLNAVVGTALIKKYPKLESEFVYGDYKVYDVRKMIAKSEQEIGKATAKYFFYSNIMNFFKTEITLANGEIRKRPLIETNGETGEIVWDKGRDFATVRKVLSMPQVNIVKKTEVQTGGFSKESILPKRNSDKLIARKKDWDPKKYGGFDSPTVAYSVLVVAKVEKGKSKKLKSVKELLGITIMERSSFEKNPIDFLEAKGYKEVKKDLIIKLPKYSLFELENGRKRMLASAGELQKGNELALPSKYVNFLYLASHYEKLKGSPEDNEQKQLFVEQHKHYLDEIIEQISEFSKRVILADANLDKVLSAYNKHRDKPIREQAENIIHLFTLTNLGAPAAFKYFDTTIDRKRYTSTKEVLDATLIHQSITGLYETRIDLSQLGGDGGPAPAPAPGGLLGRDLLTKLKAQIQFSTEGPQVTWEDRPAMCLVLNLEEEYRLHEKPVPPSIDPSWLQLFPMVWAEKAGMGLANQVPPVVVELKSDASPVAVRQYPMSKEAREGIRPHIQRFLDLGILVPCQSPWNTPLLPVKKPGTNDYRPVQDLREVNKRVQDIHPTVPNPYNLLSSLPPSHTWYSVLDLKDAFFCLKLHPNSQPLFAFEWRDPEKGNTGQLTWTRLPQGFKNSPTLFNEALHRDLASFRALNPQVVMLQYVDDLLVAAPTYRDCKEGTRRLLQELSKLGYRVSAKKAQLCREEVTYLGYLLKGGKRWLTPARKATVMKIPTPTTPRQVREFLGKAGFCRLFIPGFASLAAPLYPLTRPKVPFTWTEAHQEAFGRIKEALLSAPALALPDLTKPFALYVDEKEGVARGVLTQTLGPWRRPVAYLSKKLDPVASGWPTCLKAIAAVALLLKDADKLTLGQNVLVIAPHNLESIVRQPPDRWMTNARMTHYQSLLLNERVSFAPPAILNPATLLPVESDDTPIHICSEILAEETGTRPDLRDQPLPGVPAWYTDGSSFIMDGRRQAGAAIVDNKRTVWASNLPEGTSAQKAELIALTQALRLAEGKSINIYTDSRYAFATAHVHGAIYKQRGWLTSAGKDIKNKEEILALLEAIHLPKRVAIIHCPGHQRGTDPVATGNRKADEAAKQAAQSTRILTETTKNAGKRTADGSEFEKRTADGSEFESPKKKAKVE

SEQ ID NO: 1681 - protein, 2131 aa, synthetic construct
MPAAKRVKLDGGDKKYSIGLDIGTNSVGWAVITDEYKVPSKKFKVLGNTDRHSIKKNLIGALLFDSGETAEATRLKRTARRRYTRRKNRICYLQEIFSNEMAKVDDSFFHRLEESFLVEEDKKHERHPIFGNIVDEVAYHEKYPTIYHLRKKLVDSTDKADLRLIYLALAHMIKFRGHFLIEGDLNPDNSDVDKLFIQLVQTYNQLFEENPINASGVDAKAILSARLSKSRRLENLIAQLPGEKKNGLFGNLIALSLGLTPNFKSNFDLAEDAKLQLSKDTYDDDLDNLLAQIGDQYADLFLAAKNLSDAILLSDILRVNTEITKAPLSASMIKRYDEHHQDLTLLKALVRQQLPEKYKEIFFDQSKNGYAGYIDGGASQEEFYKFIKPILEKMDGTEELLVKLNREDLLRKQRTFDNGSIPHQIHLGELHAILRRQEDFYPFLKDNREKIEKILTFRIPYYVGPLARGNSRFAWMTRKSEETITPWNFEEVVDKGASAQSFIERMTNFDKNLPNEKVLPKHSLLYEYFTVYNELTKVKYVTEGMRKPAFLSGEQKKAIVDLLFKTNRKVTVKQLKEDYFKKIECFDSVEISGVEDRFNASLGTYHDLLKIIKDKDFLDNEENEDILEDIVLTLTLFEDREMIEERLKTYAHLFDDKVMKQLKRRRYTGWGRLSRKLINGIRDKQSGKTILDFLKSDGFANRNFMQLIHDDSLTFKEDIQKAQVSGQGDSLHEHIANLAGSPAIKKGILQTVKVVDELVKVMGRHKPENIVIEMARENQTTQKGQKNSRERMKRIEEGIKELGSQILKEHPVENTQLQNEKLYLYYLQNGRDMYVDQELDINRLSDYDVDHIVPQSFLKDDSIDNKVLTRSDKARGKSDNVPSEEVVKKMKNYWRQLLNAKLITQRKFDNLTKAERGGLSELDKAGFIKRQLVETRQITKHVAQILDSRMNTKYDENDKLIREVKVITLKSKLVSDFRKDFQFYKVREINNYHHAHDAYLNAVVGTALIKKYPKLESEFVYGDYKVYDVRKMIAKSEQEIGKATAKYFFYSNIMNFFKTEITLANGEIRKRPLIETNGETGEIVWDKGRDFATVRKVLSMPQVNIVKKTEVQTGGFSKESILPKRNSDKLIARKKDWDPKKYGGFDSPTVAYSVLVVAKVEKGKSKKLKSVKELLGITIMERSSFEKNPIDFLEAKGYKEVKKDLIIKLPKYSLFELENGRKRMLASAGELQKGNELALPSKYVNFLYLASHYEKLKGSPEDNEQKQLFVEQHKHYLDEIIEQISEFSKRVILADANLDKVLSAYNKHRDKPIREQAENIIHLFTLTNLGAPAAFKYFDTTIDRKRYTSTKEVLDATLIHQSITGLYETRIDLSQLGGDGGGSSGSSGSSGSSGSSGGLLGRDLLTKLKAQIQFSTEGPQVTWEDRPAMCLVLNLEEEYRLHEKPVPPSIDPSWLQLFPMVWAEKAGMGLANQVPPVVVELKSDASPVAVRQYPMSKEAREGIRPHIQRFLDLGILVPCQSPWNTPLLPVKKPGTNDYRPVQDLREVNKRVQDIHPTVPNPYNLLSSLPPSHTWYSVLDLKDAFFCLKLHPNSQPLFAFEWRDPEKGNTGQLTWTRLPQGFKNSPTLFNEALHRDLASFRALNPQVVMLQYVDDLLVAAPTYRDCKEGTRRLLQELSKLGYRVSAKKAQLCREEVTYLGYLLKGGKRWLTPARKATVMKIPTPTTPRQVREFLGKAGFCRLFIPGFASLAAPLYPLTRPKVPFTWTEAHQEAFGRIKEALLSAPALALPDLTKPFALYVDEKEGVARGVLTQTLGPWRRPVAYLSKKLDPVASGWPTCLKAIAAVALLLKDADKLTLGQNVLVIAPHNLESIVRQPPDRWMTNARMTHYQSLLLNERVSFAPPAILNPATLLPVESDDTPIHICSEILAEETGTRPDLRDQPLPGVPAWYTDGSSFIMDGRRQAGAAIVDNKRTVWASNLPEGTSAQKAELIALTQALRLAEGKSINIYTDSRYAFATAHVHGAIYKQRGWLTSAGKDIKNKEEILALLEAIHLPKRVAIIHCPGHQRGTDPVATGNRKADEAAKQAAQSTRILTETTKNAGKRTADGSEFEKRTADGSEFESPKKKAKVE

SEQ ID NO: 1682 - protein, 2127 aa, synthetic construct
MPAAKRVKLDGGDKKYSIGLDIGTNSVGWAVITDEYKVPSKKFKVLGNTDRHSIKKNLIGALLFDSGETAEATRLKRTARRRYTRRKNRICYLQEIFSNEMAKVDDSFFHRLEESFLVEEDKKHERHPIFGNIVDEVAYHEKYPTIYHLRKKLVDSTDKADLRLIYLALAHMIKFRGHFLIEGDLNPDNSDVDKLFIQLVQTYNQLFEENPINASGVDAKAILSARLSKSRRLENLIAQLPGEKKNGLFGNLIALSLGLTPNFKSNFDLAEDAKLQLSKDTYDDDLDNLLAQIGDQYADLFLAAKNLSDAILLSDILRVNTEITKAPLSASMIKRYDEHHQDLTLLKALVRQQLPEKYKEIFFDQSKNGYAGYIDGGASQEEFYKFIKPILEKMDGTEELLVKLNREDLLRKQRTFDNGSIPHQIHLGELHAILRRQEDFYPFLKDNREKIEKILTFRIPYYVGPLARGNSRFAWMTRKSEETITPWNFEEVVDKGASAQSFIERMTNFDKNLPNEKVLPKHSLLYEYFTVYNELTKVKYVTEGMRKPAFLSGEQKKAIVDLLFKTNRKVTVKQLKEDYFKKIECFDSVEISGVEDRFNASLGTYHDLLKIIKDKDFLDNEENEDILEDIVLTLTLFEDREMIEERLKTYAHLFDDKVMKQLKRRRYTGWGRLSRKLINGIRDKQSGKTILDFLKSDGFANRNFMQLIHDDSLTFKEDIQKAQVSGQGDSLHEHIANLAGSPAIKKGILQTVKVVDELVKVMGRHKPENIVIEMARENQTTQKGQKNSRERMKRIEEGIKELGSQILKEHPVENTQLQNEKLYLYYLQNGRDMYVDQELDINRLSDYDVDHIVPQSFLKDDSIDNKVLTRSDKARGKSDNVPSEEVVKKMKNYWRQLLNAKLITQRKFDNLTKAERGGLSELDKAGFIKRQLVETRQITKHVAQILDSRMNTKYDENDKLIREVKVITLKSKLVSDFRKDFQFYKVREINNYHHAHDAYLNAVVGTALIKKYPKLESEFVYGDYKVYDVRKMIAKSEQEIGKATAKYFFYSNIMNFFKTEITLANGEIRKRPLIETNGETGEIVWDKGRDFATVRKVLSMPQVNIVKKTEVQTGGFSKESILPKRNSDKLIARKKDWDPKKYGGFDSPTVAYSVLVVAKVEKGKSKKLKSVKELLGITIMERSSFEKNPIDFLEAKGYKEVKKDLIIKLPKYSLFELENGRKRMLASAGELQKGNELALPSKYVNFLYLASHYEKLKGSPEDNEQKQLFVEQHKHYLDEIIEQISEFSKRVILADANLDKVLSAYNKHRDKPIREQAENIIHLFTLTNLGAPAAFKYFDTTIDRKRYTSTKEVLDATLIHQSITGLYETRIDLSQLGGDGGGGGGGSEAAAKGGLLGRDLLTKLKAQIQFSTEGPQVTWEDRPAMCLVLNLEEEYRLHEKPVPPSIDPSWLQLFPMVWAEKAGMGLANQVPPVVVELKSDASPVAVRQYPMSKEAREGIRPHIQRFLDLGILVPCQSPWNTPLLPVKKPGTNDYRPVQDLREVNKRVQDIHPTVPNPYNLLSSLPPSHTWYSVLDLKDAFFCLKLHPNSQPLFAFEWRDPEKGNTGQLTWTRLPQGFKNSPTLFNEALHRDLASFRALNPQVVMLQYVDDLLVAAPTYRDCKEGTRRLLQELSKLGYRVSAKKAQLCREEVTYLGYLLKGGKRWLTPARKATVMKIPTPTTPRQVREFLGKAGFCRLFIPGFASLAAPLYPLTRPKVPFTWTEAHQEAFGRIKEALLSAPALALPDLTKPFALYVDEKEGVARGVLTQTLGPWRRPVAYLSKKLDPVASGWPTCLKAIAAVALLLKDADKLTLGQNVLVIAPHNLESIVRQPPDRWMTNARMTHYQSLLLNERVSFAPPAILNPATLLPVESDDTPIHICSEILAEETGTRPDLRDQPLPGVPAWYTDGSSFIMDGRRQAGAAIVDNKRTVWASNLPEGTSAQKAELIALTQALRLAEGKSINIYTDSRYAFATAHVHGAIYKQRGWLTSAGKDIKNKEEILALLEAIHLPKRVAIIHCPGHQRGTDPVATGNRKADEAAKQAAQSTRILTETTKNAGKRTADGSEFEKRTADGSEFESPKKKAKVE

SEQ ID NO: 1683 - protein, 2125 aa, synthetic construct
MPAAKRVKLDGGDKKYSIGLDIGTNSVGWAVITDEYKVPSKKFKVLGNTDRHSIKKNLIGALLFDSGETAEATRLKRTARRRYTRRKNRICYLQEIFSNEMAKVDDSFFHRLEESFLVEEDKKHERHPIFGNIVDEVAYHEKYPTIYHLRKKLVDSTDKADLRLIYLALAHMIKFRGHFLIEGDLNPDNSDVDKLFIQLVQTYNQLFEENPINASGVDAKAILSARLSKSRRLENLIAQLPGEKKNGLFGNLIALSLGLTPNFKSNFDLAEDAKLQLSKDTYDDDLDNLLAQIGDQYADLFLAAKNLSDAILLSDILRVNTEITKAPLSASMIKRYDEHHQDLTLLKALVRQQLPEKYKEIFFDQSKNGYAGYIDGGASQEEFYKFIKPILEKMDGTEELLVKLNREDLLRKQRTFDNGSIPHQIHLGELHAILRRQEDFYPFLKDNREKIEKILTFRIPYYVGPLARGNSRFAWMTRKSEETITPWNFEEVVDKGASAQSFIERMTNFDKNLPNEKVLPKHSLLYEYFTVYNELTKVKYVTEGMRKPAFLSGEQKKAIVDLLFKTNRKVTVKQLKEDYFKKIECFDSVEISGVEDRFNASLGTYHDLLKIIKDKDFLDNEENEDILEDIVLTLTLFEDREMIEERLKTYAHLFDDKVMKQLKRRRYTGWGRLSRKLINGIRDKQSGKTILDFLKSDGFANRNFMQLIHDDSLTFKEDIQKAQVSGQGDSLHEHIANLAGSPAIKKGILQTVKVVDELVKVMGRHKPENIVIEMARENQTTQKGQKNSRERMKRIEEGIKELGSQILKEHPVENTQLQNEKLYLYYLQNGRDMYVDQELDINRLSDYDVDHIVPQSFLKDDSIDNKVLTRSDKARGKSDNVPSEEVVKKMKNYWRQLLNAKLITQRKFDNLTKAERGGLSELDKAGFIKRQLVETRQITKHVAQILDSRMNTKYDENDKLIREVKVITLKSKLVSDFRKDFQFYKVREINNYHHAHDAYLNAVVGTALIKKYPKLESEFVYGDYKVYDVRKMIAKSEQEIGKATAKYFFYSNIMNFFKTEITLANGEIRKRPLIETNGETGEIVWDKGRDFATVRKVLSMPQVNIVKKTEVQTGGFSKESILPKRNSDKLIARKKDWDPKKYGGFDSPTVAYSVLVVAKVEKGKSKKLKSVKELLGITIMERSSFEKNPIDFLEAKGYKEVKKDLIIKLPKYSLFELENGRKRMLASAGELQKGNELALPSKYVNFLYLASHYEKLKGSPEDNEQKQLFVEQHKHYLDEIIEQISEFSKRVILADANLDKVLSAYNKHRDKPIREQAENIIHLFTLTNLGAPAAFKYFDTTIDRKRYTSTKEVLDATLIHQSITGLYETRIDLSQLGGDGGPAPGGSGSSGGLLGRDLLTKLKAQIQFSTEGPQVTWEDRPAMCLVLNLEEEYRLHEKPVPPSIDPSWLQLFPMVWAEKAGMGLANQVPPVVVELKSDASPVAVRQYPMSKEAREGIRPHIQRFLDLGILVPCQSPWNTPLLPVKKPGTNDYRPVQDLREVNKRVQDIHPTVPNPYNLLSSLPPSHTWYSVLDLKDAFFCLKLHPNSQPLFAFEWRDPEKGNTGQLTWTRLPQGFKNSPTLFNEALHRDLASFRALNPQVVMLQYVDDLLVAAPTYRDCKEGTRRLLQELSKLGYRVSAKKAQLCREEVTYLGYLLKGGKRWLTPARKATVMKIPTPTTPRQVREFLGKAGFCRLFIPGFASLAAPLYPLTRPKVPFTWTEAHQEAFGRIKEALLSAPALALPDLTKPFALYVDEKEGVARGVLTQTLGPWRRPVAYLSKKLDPVASGWPTCLKAIAAVALLLKDADKLTLGQNVLVIAPHNLESIVRQPPDRWMTNARMTHYQSLLLNERVSFAPPAILNPATLLPVESDDTPIHICSEILAEETGTRPDLRDQPLPGVPAWYTDGSSFIMDGRRQAGAAIVDNKRTVWASNLPEGTSAQKAELIALTQALRLAEGKSINIYTDSRYAFATAHVHGAIYKQRGWLTSAGKDIKNKEEILALLEAIHLPKRVAIIHCPGHQRGTDPVATGNRKADEAAKQAAQSTRILTETTKNAGKRTADGSEFEKRTADGSEFESPKKKAKVE

SEQ ID NO: 1684 - protein, 2127 aa, synthetic construct
MPAAKRVKLDGGDKKYSIGLDIGTNSVGWAVITDEYKVPSKKFKVLGNTDRHSIKKNLIGALLFDSGETAEATRLKRTARRRYTRRKNRICYLQEIFSNEMAKVDDSFFHRLEESFLVEEDKKHERHPIFGNIVDEVAYHEKYPTIYHLRKKLVDSTDKADLRLIYLALAHMIKFRGHFLIEGDLNPDNSDVDKLFIQLVQTYNQLFEENPINASGVDAKAILSARLSKSRRLENLIAQLPGEKKNGLFGNLIALSLGLTPNFKSNFDLAEDAKLQLSKDTYDDDLDNLLAQIGDQYADLFLAAKNLSDAILLSDILRVNTEITKAPLSASMIKRYDEHHQDLTLLKALVRQQLPEKYKEIFFDQSKNGYAGYIDGGASQEEFYKFIKPILEKMDGTEELLVKLNREDLLRKQRTFDNGSIPHQIHLGELHAILRRQEDFYPFLKDNREKIEKILTFRIPYYVGPLARGNSRFAWMTRKSEETITPWNFEEVVDKGASAQSFIERMTNFDKNLPNEKVLPKHSLLYEYFTVYNELTKVKYVTEGMRKPAFLSGEQKKAIVDLLFKTNRKVTVKQLKEDYFKKIECFDSVEISGVEDRFNASLGTYHDLLKIIKDKDFLDNEENEDILEDIVLTLTLFEDREMIEERLKTYAHLFDDKVMKQLKRRRYTGWGRLSRKLINGIRDKQSGKTILDFLKSDGFANRNFMQLIHDDSLTFKEDIQKAQVSGQGDSLHEHIANLAGSPAIKKGILQTVKVVDELVKVMGRHKPENIVIEMARENQTTQKGQKNSRERMKRIEEGIKELGSQILKEHPVENTQLQNEKLYLYYLQNGRDMYVDQELDINRLSDYDVDHIVPQSFLKDDSIDNKVLTRSDKARGKSDNVPSEEVVKKMKNYWRQLLNAKLITQRKFDNLTKAERGGLSELDKAGFIKRQLVETRQITKHVAQILDSRMNTKYDENDKLIREVKVITLKSKLVSDFRKDFQFYKVREINNYHHAHDAYLNAVVGTALIKKYPKLESEFVYGDYKVYDVRKMIAKSEQEIGKATAKYFFYSNIMNFFKTEITLANGEIRKRPLIETNGETGEIVWDKGRDFATVRKVLSMPQVNIVKKTEVQTGGFSKESILPKRNSDKLIARKKDWDPKKYGGFDSPTVAYSVLVVAKVEKGKSKKLKSVKELLGITIMERSSFEKNPIDFLEAKGYKEVKKDLIIKLPKYSLFELENGRKRMLASAGELQKGNELALPSKYVNFLYLASHYEKLKGSPEDNEQKQLFVEQHKHYLDEIIEQISEFSKRVILADANLDKVLSAYNKHRDKPIREQAENIIHLFTLTNLGAPAAFKYFDTTIDRKRYTSTKEVLDATLIHQSITGLYETRIDLSQLGGDGGPAPAPAPAPAPGGLLGRDLLTKLKAQIQFSTEGPQVTWEDRPAMCLVLNLEEEYRLHEKPVPPSIDPSWLQLFPMVWAEKAGMGLANQVPPVVVELKSDASPVAVRQYPMSKEAREGIRPHIQRFLDLGILVPCQSPWNTPLLPVKKPGTNDYRPVQDLREVNKRVQDIHPTVPNPYNLLSSLPPSHTWYSVLDLKDAFFCLKLHPNSQPLFAFEWRDPEKGNTGQLTWTRLPQGFKNSPTLFNEALHRDLASFRALNPQVVMLQYVDDLLVAAPTYRDCKEGTRRLLQELSKLGYRVSAKKAQLCREEVTYLGYLLKGGKRWLTPARKATVMKIPTPTTPRQVREFLGKAGFCRLFIPGFASLAAPLYPLTRPKVPFTWTEAHQEAFGRIKEALLSAPALALPDLTKPFALYVDEKEGVARGVLTQTLGPWRRPVAYLSKKLDPVASGWPTCLKAIAAVALLLKDADKLTLGQNVLVIAPHNLESIVRQPPDRWMTNARMTHYQSLLLNERVSFAPPAILNPATLLPVESDDTPIHICSEILAEETGTRPDLRDQPLPGVPAWYTDGSSFIMDGRRQAGAAIVDNKRTVWASNLPEGTSAQKAELIALTQALRLAEGKSINIYTDSRYAFATAHVHGAIYKQRGWLTSAGKDIKNKEEILALLEAIHLPKRVAIIHCPGHQRGTDPVATGNRKADEAAKQAAQSTRILTETTKNAGKRTADGSEFEKRTADGSEFESPKKKAKVE

SEQ ID NO: 1685 - protein, 2127 aa, synthetic construct
MPAAKRVKLDGGDKKYSIGLDIGTNSVGWAVITDEYKVPSKKFKVLGNTDRHSIKKNLIGALLFDSGETAEATRLKRTARRRYTRRKNRICYLQEIFSNEMAKVDDSFFHRLEESFLVEEDKKHERHPIFGNIVDEVAYHEKYPTIYHLRKKLVDSTDKADLRLIYLALAHMIKFRGHFLIEGDLNPDNSDVDKLFIQLVQTYNQLFEENPINASGVDAKAILSARLSKSRRLENLIAQLPGEKKNGLFGNLIALSLGLTPNFKSNFDLAEDAKLQLSKDTYDDDLDNLLAQIGDQYADLFLAAKNLSDAILLSDILRVNTEITKAPLSASMIKRYDEHHQDLTLLKALVRQQLPEKYKEIFFDQSKNGYAGYIDGGASQEEFYKFIKPILEKMDGTEELLVKLNREDLLRKQRTFDNGSIPHQIHLGELHAILRRQEDFYPFLKDNREKIEKILTFRIPYYVGPLARGNSRFAWMTRKSEETITPWNFEEVVDKGASAQSFIERMTNFDKNLPNEKVLPKHSLLYEYFTVYNELTKVKYVTEGMRKPAFLSGEQKKAIVDLLFKTNRKVTVKQLKEDYFKKIECFDSVEISGVEDRFNASLGTYHDLLKIIKDKDFLDNEENEDILEDIVLTLTLFEDREMIEERLKTYAHLFDDKVMKQLKRRRYTGWGRLSRKLINGIRDKQSGKTILDFLKSDGFANRNFMQLIHDDSLTFKEDIQKAQVSGQGDSLHEHIANLAGSPAIKKGILQTVKVVDELVKVMGRHKPENIVIEMARENQTTQKGQKNSRERMKRIEEGIKELGSQILKEHPVENTQLQNEKLYLYYLQNGRDMYVDQELDINRLSDYDVDHIVPQSFLKDDSIDNKVLTRSDKARGKSDNVPSEEVVKKMKNYWRQLLNAKLITQRKFDNLTKAERGGLSELDKAGFIKRQLVETRQITKHVAQILDSRMNTKYDENDKLIREVKVITLKSKLVSDFRKDFQFYKVREINNYHHAHDAYLNAVVGTALIKKYPKLESEFVYGDYKVYDVRKMIAKSEQEIGKATAKYFFYSNIMNFFKTEITLANGEIRKRPLIETNGETGEIVWDKGRDFATVRKVLSMPQVNIVKKTEVQTGGFSKESILPKRNSDKLIARKKDWDPKKYGGFDSPTVAYSVLVVAKVEKGKSKKLKSVKELLGITIMERSSFEKNPIDFLEAKGYKEVKKDLIIKLPKYSLFELENGRKRMLASAGELQKGNELALPSKYVNFLYLASHYEKLKGSPEDNEQKQLFVEQHKHYLDEIIEQISEFSKRVILADANLDKVLSAYNKHRDKPIREQAENIIHLFTLTNLGAPAAFKYFDTTIDRKRYTSTKEVLDATLIHQSITGLYETRIDLSQLGGDGGEAAAKPAPGGGGGLLGRDLLTKLKAQIQFSTEGPQVTWEDRPAMCLVLNLEEEYRLHEKPVPPSIDPSWLQLFPMVWAEKAGMGLANQVPPVVVELKSDASPVAVRQYPMSKEAREGIRPHIQRFLDLGILVPCQSPWNTPLLPVKKPGTNDYRPVQDLREVNKRVQDIHPTVPNPYNLLSSLPPSHTWYSVLDLKDAFFCLKLHPNSQPLFAFEWRDPEKGNTGQLTWTRLPQGFKNSPTLFNEALHRDLASFRALNPQVVMLQYVDDLLVAAPTYRDCKEGTRRLLQELSKLGYRVSAKKAQLCREEVTYLGYLLKGGKRWLTPARKATVMKIPTPTTPRQVREFLGKAGFCRLFIPGFASLAAPLYPLTRPKVPFTWTEAHQEAFGRIKEALLSAPALALPDLTKPFALYVDEKEGVARGVLTQTLGPWRRPVAYLSKKLDPVASGWPTCLKAIAAVALLLKDADKLTLGQNVLVIAPHNLESIVRQPPDRWMTNARMTHYQSLLLNERVSFAPPAILNPATLLPVESDDTPIHICSEILAEETGTRPDLRDQPLPGVPAWYTDGSSFIMDGRRQAGAAIVDNKRTVWASNLPEGTSAQKAELIALTQALRLAEGKSINIYTDSRYAFATAHVHGAIYKQRGWLTSAGKDIKNKEEILALLEAIHLPKRVAIIHCPGHQRGTDPVATGNRKADEAAKQAAQSTRILTETTKNAGKRTADGSEFEKRTADGSEFESPKKKAKVE

SEQ ID NO: 1686 - protein, 2125 aa, synthetic construct
MPAAKRVKLDGGDKKYSIGLDIGTNSVGWAVITDEYKVPSKKFKVLGNTDRHSIKKNLIGALLFDSGETAEATRLKRTARRRYTRRKNRICYLQEIFSNEMAKVDDSFFHRLEESFLVEEDKKHERHPIFGNIVDEVAYHEKYPTIYHLRKKLVDSTDKADLRLIYLALAHMIKFRGHFLIEGDLNPDNSDVDKLFIQLVQTYNQLFEENPINASGVDAKAILSARLSKSRRLENLIAQLPGEKKNGLFGNLIALSLGLTPNFKSNFDLAEDAKLQLSKDTYDDDLDNLLAQIGDQYADLFLAAKNLSDAILLSDILRVNTEITKAPLSASMIKRYDEHHQDLTLLKALVRQQLPEKYKEIFFDQSKNGYAGYIDGGASQEEFYKFIKPILEKMDGTEELLVKLNREDLLRKQRTFDNGSIPHQIHLGELHAILRRQEDFYPFLKDNREKIEKILTFRIPYYVGPLARGNSRFAWMTRKSEETITPWNFEEVVDKGASAQSFIERMTNFDKNLPNEKVLPKHSLLYEYFTVYNELTKVKYVTEGMRKPAFLSGEQKKAIVDLLFKTNRKVTVKQLKEDYFKKIECFDSVEISGVEDRFNASLGTYHDLLKIIKDKDFLDNEENEDILEDIVLTLTLFEDREMIEERLKTYAHLFDDKVMKQLKRRRYTGWGRLSRKLINGIRDKQSGKTILDFLKSDGFANRNFMQLIHDDSLTFKEDIQKAQVSGQGDSLHEHIANLAGSPAIKKGILQTVKVVDELVKVMGRHKPENIVIEMARENQTTQKGQKNSRERMKRIEEGIKELGSQILKEHPVENTQLQNEKLYLYYLQNGRDMYVDQELDINRLSDYDVDHIVPQSFLKDDSIDNKVLTRSDKARGKSDNVPSEEVVKKMKNYWRQLLNAKLITQRKFDNLTKAERGGLSELDKAGFIKRQLVETRQITKHVAQILDSRMNTKYDENDKLIREVKVITLKSKLVSDFRKDFQFYKVREINNYHHAHDAYLNAVVGTALIKKYPKLESEFVYGDYKVYDVRKMIAKSEQEIGKATAKYFFYSNIMNFFKTEITLANGEIRKRPLIETNGETGEIVWDKGRDFATVRKVLSMPQVNIVKKTEVQTGGFSKESILPKRNSDKLIARKKDWDPKKYGGFDSPTVAYSVLVVAKVEKGKSKKLKSVKELLGITIMERSSFEKNPIDFLEAKGYKEVKKDLIIKLPKYSLFELENGRKRMLASAGELQKGNELALPSKYVNFLYLASHYEKLKGSPEDNEQKQLFVEQHKHYLDEIIEQISEFSKRVILADANLDKVLSAYNKHRDKPIREQAENIIHLFTLTNLGAPAAFKYFDTTIDRKRYTSTKEVLDATLIHQSITGLYETRIDLSQLGGDGGGGSGGSGGSGGLLGRDLLTKLKAQIQFSTEGPQVTWEDRPAMCLVLNLEEEYRLHEKPVPPSIDPSWLQLFPMVWAEKAGMGLANQVPPVVVELKSDASPVAVRQYPMSKEAREGIRPHIQRFLDLGILVPCQSPWNTPLLPVKKPGTNDYRPVQDLREVNKRVQDIHPTVPNPYNLLSSLPPSHTWYSVLDLKDAFFCLKLHPNSQPLFAFEWRDPEKGNTGQLTWTRLPQGFKNSPTLFNEALHRDLASFRALNPQVVMLQYVDDLLVAAPTYRDCKEGTRRLLQELSKLGYRVSAKKAQLCREEVTYLGYLLKGGKRWLTPARKATVMKIPTPTTPRQVREFLGKAGFCRLFIPGFASLAAPLYPLTRPKVPFTWTEAHQEAFGRIKEALLSAPALALPDLTKPFALYVDEKEGVARGVLTQTLGPWRRPVAYLSKKLDPVASGWPTCLKAIAAVALLLKDADKLTLGQNVLVIAPHNLESIVRQPPDRWMTNARMTHYQSLLLNERVSFAPPAILNPATLLPVESDDTPIHICSEILAEETGTRPDLRDQPLPGVPAWYTDGSSFIMDGRRQAGAAIVDNKRTVWASNLPEGTSAQKAELIALTQALRLAEGKSINIYTDSRYAFATAHVHGAIYKQRGWLTSAGKDIKNKEEILALLEAIHLPKRVAIIHCPGHQRGTDPVATGNRKADEAAKQAAQSTRILTETTKNAGKRTADGSEFEKRTADGSEFESPKKKAKVE

SEQ ID NO: 1687 - protein, 2127 aa, synthetic construct
MPAAKRVKLDGGDKKYSIGLDIGTNSVGWAVITDEYKVPSKKFKVLGNTDRHSIKKNLIGALLFDSGETAEATRLKRTARRRYTRRKNRICYLQEIFSNEMAKVDDSFFHRLEESFLVEEDKKHERHPIFGNIVDEVAYHEKYPTIYHLRKKLVDSTDKADLRLIYLALAHMIKFRGHFLIEGDLNPDNSDVDKLFIQLVQTYNQLFEENPINASGVDAKAILSARLSKSRRLENLIAQLPGEKKNGLFGNLIALSLGLTPNFKSNFDLAEDAKLQLSKDTYDDDLDNLLAQIGDQYADLFLAAKNLSDAILLSDILRVNTEITKAPLSASMIKRYDEHHQDLTLLKALVRQQLPEKYKEIFFDQSKNGYAGYIDGGASQEEFYKFIKPILEKMDGTEELLVKLNREDLLRKQRTFDNGSIPHQIHLGELHAILRRQEDFYPFLKDNREKIEKILTFRIPYYVGPLARGNSRFAWMTRKSEETITPWNFEEVVDKGASAQSFIERMTNFDKNLPNEKVLPKHSLLYEYFTVYNELTKVKYVTEGMRKPAFLSGEQKKAIVDLLFKTNRKVTVKQLKEDYFKKIECFDSVEISGVEDRFNASLGTYHDLLKIIKDKDFLDNEENEDILEDIVLTLTLFEDREMIEERLKTYAHLFDDKVMKQLKRRRYTGWGRLSRKLINGIRDKQSGKTILDFLKSDGFANRNFMQLIHDDSLTFKEDIQKAQVSGQGDSLHEHIANLAGSPAIKKGILQTVKVVDELVKVMGRHKPENIVIEMARENQTTQKGQKNSRERMKRIEEGIKELGSQILKEHPVENTQLQNEKLYLYYLQNGRDMYVDQELDINRLSDYDVDHIVPQSFLKDDSIDNKVLTRSDKARGKSDNVPSEEVVKKMKNYWRQLLNAKLITQRKFDNLTKAERGGLSELDKAGFIKRQLVETRQITKHVAQILDSRMNTKYDENDKLIREVKVITLKSKLVSDFRKDFQFYKVREINNYHHAHDAYLNAVVGTALIKKYPKLESEFVYGDYKVYDVRKMIAKSEQEIGKATAKYFFYSNIMNFFKTEITLANGEIRKRPLIETNGETGEIVWDKGRDFATVRKVLSMPQVNIVKKTEVQTGGFSKESILPKRNSDKLIARKKDWDPKKYGGFDSPTVAYSVLVVAKVEKGKSKKLKSVKELLGITIMERSSFEKNPIDFLEAKGYKEVKKDLIIKLPKYSLFELENGRKRMLASAGELQKGNELALPSKYVNFLYLASHYEKLKGSPEDNEQKQLFVEQHKHYLDEIIEQISEFSKRVILADANLDKVLSAYNKHRDKPIREQAENIIHLFTLTNLGAPAAFKYFDTTIDRKRYTSTKEVLDATLIHQSITGLYETRIDLSQLGGDGGEAAAKPAPGSSGGLLGRDLLTKLKAQIQFSTEGPQVTWEDRPAMCLVLNLEEEYRLHEKPVPPSIDPSWLQLFPMVWAEKAGMGLANQVPPVVVELKSDASPVAVRQYPMSKEAREGIRPHIQRFLDLGILVPCQSPWNTPLLPVKKPGTNDYRPVQDLREVNKRVQDIHPTVPNPYNLLSSLPPSHTWYSVLDLKDAFFCLKLHPNSQPLFAFEWRDPEKGNTGQLTWTRLPQGFKNSPTLFNEALHRDLASFRALNPQVVMLQYVDDLLVAAPTYRDCKEGTRRLLQELSKLGYRVSAKKAQLCREEVTYLGYLLKGGKRWLTPARKATVMKIPTPTTPRQVREFLGKAGFCRLFIPGFASLAAPLYPLTRPKVPFTWTEAHQEAFGRIKEALLSAPALALPDLTKPFALYVDEKEGVARGVLTQTLGPWRRPVAYLSKKLDPVASGWPTCLKAIAAVALLLKDADKLTLGQNVLVIAPHNLESIVRQPPDRWMTNARMTHYQSLLLNERVSFAPPAILNPATLLPVESDDTPIHICSEILAEETGTRPDLRDQPLPGVPAWYTDGSSFIMDGRRQAGAAIVDNKRTVWASNLPEGTSAQKAELIALTQALRLAEGKSINIYTDSRYAFATAHVHGAIYKQRGWLTSAGKDIKNKEEILALLEAIHLPKRVAIIHCPGHQRGTDPVATGNRKADEAAKQAAQSTRILTETTKNAGKRTADGSEFEKRTADGSEFESPKKKAKVE

SEQ ID NO: 1688 - protein, 2127 aa, synthetic construct
MPAAKRVKLDGGDKKYSIGLDIGTNSVGWAVITDEYKVPSKKFKVLGNTDRHSIKKNLIGALLFDSGETAEATRLKRTARRRYTRRKNRICYLQEIFSNEMAKVDDSFFHRLEESFLVEEDKKHERHPIFGNIVDEVAYHEKYPTIYHLRKKLVDSTDKADLRLIYLALAHMIKFRGHFLIEGDLNPDNSDVDKLFIQLVQTYNQLFEENPINASGVDAKAILSARLSKSRRLENLIAQLPGEKKNGLFGNLIALSLGLTPNFKSNFDLAEDAKLQLSKDTYDDDLDNLLAQIGDQYADLFLAAKNLSDAILLSDILRVNTEITKAPLSASMIKRYDEHHQDLTLLKALVRQQLPEKYKEIFFDQSKNGYAGYIDGGASQEEFYKFIKPILEKMDGTEELLVKLNREDLLRKQRTFDNGSIPHQIHLGELHAILRRQEDFYPFLKDNREKIEKILTFRIPYYVGPLARGNSRFAWMTRKSEETITPWNFEEVVDKGASAQSFIERMTNFDKNLPNEKVLPKHSLLYEYFTVYNELTKVKYVTEGMRKPAFLSGEQKKAIVDLLFKTNRKVTVKQLKEDYFKKIECFDSVEISGVEDRFNASLGTYHDLLKIIKDKDFLDNEENEDILEDIVLTLTLFEDREMIEERLKTYAHLFDDKVMKQLKRRRYTGWGRLSRKLINGIRDKQSGKTILDFLKSDGFANRNFMQLIHDDSLTFKEDIQKAQVSGQGDSLHEHIANLAGSPAIKKGILQTVKVVDELVKVMGRHKPENIVIEMARENQTTQKGQKNSRERMKRIEEGIKELGSQILKEHPVENTQLQNEKLYLYYLQNGRDMYVDQELDINRLSDYDVDHIVPQSFLKDDSIDNKVLTRSDKARGKSDNVPSEEVVKKMKNYWRQLLNAKLITQRKFDNLTKAERGGLSELDKAGFIKRQLVETRQITKHVAQILDSRMNTKYDENDKLIREVKVITLKSKLVSDFRKDFQFYKVREINNYHHAHDAYLNAVVGTALIKKYPKLESEFVYGDYKVYDVRKMIAKSEQEIGKATAKYFFYSNIMNFFKTEITLANGEIRKRPLIETNGETGEIVWDKGRDFATVRKVLSMPQVNIVKKTEVQTGGFSKESILPKRNSDKLIARKKDWDPKKYGGFDSPTVAYSVLVVAKVEKGKSKKLKSVKELLGITIMERSSFEKNPIDFLEAKGYKEVKKDLIIKLPKYSLFELENGRKRMLASAGELQKGNELALPSKYVNFLYLASHYEKLKGSPEDNEQKQLFVEQHKHYLDEIIEQISEFSKRVILADANLDKVLSAYNKHRDKPIREQAENIIHLFTLTNLGAPAAFKYFDTTIDRKRYTSTKEVLDATLIHQSITGLYETRIDLSQLGGDGGGGGEAAAKGSSGGLLGRDLLTKLKAQIQFSTEGPQVTWEDRPAMCLVLNLEEEYRLHEKPVPPSIDPSWLQLFPMVWAEKAGMGLANQVPPVVVELKSDASPVAVRQYPMSKEAREGIRPHIQRFLDLGILVPCQSPWNTPLLPVKKPGTNDYRPVQDLREVNKRVQDIHPTVPNPYNLLSSLPPSHTWYSVLDLKDAFFCLKLHPNSQPLFAFEWRDPEKGNTGQLTWTRLPQGFKNSPTLFNEALHRDLASFRALNPQVVMLQYVDDLLVAAPTYRDCKEGTRRLLQELSKLGYRVSAKKAQLCREEVTYLGYLLKGGKRWLTPARKATVMKIPTPTTPRQVREFLGKAGFCRLFIPGFASLAAPLYPLTRPKVPFTWTEAHQEAFGRIKEALLSAPALALPDLTKPFALYVDEKEGVARGVLTQTLGPWRRPVAYLSKKLDPVASGWPTCLKAIAAVALLLKDADKLTLGQNVLVIAPHNLESIVRQPPDRWMTNARMTHYQSLLLNERVSFAPPAILNPATLLPVESDDTPIHICSEILAEETGTRPDLRDQPLPGVPAWYTDGSSFIMDGRRQAGAAIVDNKRTVWASNLPEGTSAQKAELIALTQALRLAEGKSINIYTDSRYAFATAHVHGAIYKQRGWLTSAGKDIKNKEEILALLEAIHLPKRVAIIHCPGHQRGTDPVATGNRKADEAAKQAAQSTRILTETTKNAGKRTADGSEFEKRTADGSEFESPKKKAKVE

SEQ ID NO: 1689 - protein, 2121 aa, synthetic construct
MPAAKRVKLDGGDKKYSIGLDIGTNSVGWAVITDEYKVPSKKFKVLGNTDRHSIKKNLIGALLFDSGETAEATRLKRTARRRYTRRKNRICYLQEIFSNEMAKVDDSFFHRLEESFLVEEDKKHERHPIFGNIVDEVAYHEKYPTIYHLRKKLVDSTDKADLRLIYLALAHMIKFRGHFLIEGDLNPDNSDVDKLFIQLVQTYNQLFEENPINASGVDAKAILSARLSKSRRLENLIAQLPGEKKNGLFGNLIALSLGLTPNFKSNFDLAEDAKLQLSKDTYDDDLDNLLAQIGDQYADLFLAAKNLSDAILLSDILRVNTEITKAPLSASMIKRYDEHHQDLTLLKALVRQQLPEKYKEIFFDQSKNGYAGYIDGGASQEEFYKFIKPILEKMDGTEELLVKLNREDLLRKQRTFDNGSIPHQIHLGELHAILRRQEDFYPFLKDNREKIEKILTFRIPYYVGPLARGNSRFAWMTRKSEETITPWNFEEVVDKGASAQSFIERMTNFDKNLPNEKVLPKHSLLYEYFTVYNELTKVKYVTEGMRKPAFLSGEQKKAIVDLLFKTNRKVTVKQLKEDYFKKIECFDSVEISGVEDRFNASLGTYHDLLKIIKDKDFLDNEENEDILEDIVLTLTLFEDREMIEERLKTYAHLFDDKVMKQLKRRRYTGWGRLSRKLINGIRDKQSGKTILDFLKSDGFANRNFMQLIHDDSLTFKEDIQKAQVSGQGDSLHEHIANLAGSPAIKKGILQTVKVVDELVKVMGRHKPENIVIEMARENQTTQKGQKNSRERMKRIEEGIKELGSQILKEHPVENTQLQNEKLYLYYLQNGRDMYVDQELDINRLSDYDVDHIVPQSFLKDDSIDNKVLTRSDKARGKSDNVPSEEVVKKMKNYWRQLLNAKLITQRKFDNLTKAERGGLSELDKAGFIKRQLVETRQITKHVAQILDSRMNTKYDENDKLIREVKVITLKSKLVSDFRKDFQFYKVREINNYHHAHDAYLNAVVGTALIKKYPKLESEFVYGDYKVYDVRKMIAKSEQEIGKATAKYFFYSNIMNFFKTEITLANGEIRKRPLIETNGETGEIVWDKGRDFATVRKVLSMPQVNIVKKTEVQTGGFSKESILPKRNSDKLIARKKDWDPKKYGGFDSPTVAYSVLVVAKVEKGKSKKLKSVKELLGITIMERSSFEKNPIDFLEAKGYKEVKKDLIIKLPKYSLFELENGRKRMLASAGELQKGNELALPSKYVNFLYLASHYEKLKGSPEDNEQKQLFVEQHKHYLDEIIEQISEFSKRVILADANLDKVLSAYNKHRDKPIREQAENIIHLFTLTNLGAPAAFKYFDTTIDRKRYTSTKEVLDATLIHQSITGLYETRIDLSQLGGDGGEAAAKGGLLGRDLLTKLKAQIQFSTEGPQVTWEDRPAMCLVLNLEEEYRLHEKPVPPSIDPSWLQLFPMVWAEKAGMGLANQVPPVVVELKSDASPVAVRQYPMSKEAREGIRPHIQRFLDLGILVPCQSPWNTPLLPVKKPGTNDYRPVQDLREVNKRVQDIHPTVPNPYNLLSSLPPSHTWYSVLDLKDAFFCLKLHPNSQPLFAFEWRDPEKGNTGQLTWTRLPQGFKNSPTLFNEALHRDLASFRALNPQVVMLQYVDDLLVAAPTYRDCKEGTRRLLQELSKLGYRVSAKKAQLCREEVTYLGYLLKGGKRWLTPARKATVMKIPTPTTPRQVREFLGKAGFCRLFIPGFASLAAPLYPLTRPKVPFTWTEAHQEAFGRIKEALLSAPALALPDLTKPFALYVDEKEGVARGVLTQTLGPWRRPVAYLSKKLDPVASGWPTCLKAIAAVALLLKDADKLTLGQNVLVIAPHNLESIVRQPPDRWMTNARMTHYQSLLLNERVSFAPPAILNPATLLPVESDDTPIHICSEILAEETGTRPDLRDQPLPGVPAWYTDGSSFIMDGRRQAGAAIVDNKRTVWASNLPEGTSAQKAELIALTQALRLAEGKSINIYTDSRYAFATAHVHGAIYKQRGWLTSAGKDIKNKEEILALLEAIHLPKRVAIIHCPGHQRGTDPVATGNRKADEAAKQAAQSTRILTETTKNAGKRTADGSEFEKRTADGSEFESPKKKAKVE

SEQ ID NO: 1690 - protein, 2127 aa, synthetic construct
MPAAKRVKLDGGDKKYSIGLDIGTNSVGWAVITDEYKVPSKKFKVLGNTDRHSIKKNLIGALLFDSGETAEATRLKRTARRRYTRRKNRICYLQEIFSNEMAKVDDSFFHRLEESFLVEEDKKHERHPIFGNIVDEVAYHEKYPTIYHLRKKLVDSTDKADLRLIYLALAHMIKFRGHFLIEGDLNPDNSDVDKLFIQLVQTYNQLFEENPINASGVDAKAILSARLSKSRRLENLIAQLPGEKKNGLFGNLIALSLGLTPNFKSNFDLAEDAKLQLSKDTYDDDLDNLLAQIGDQYADLFLAAKNLSDAILLSDILRVNTEITKAPLSASMIKRYDEHHQDLTLLKALVRQQLPEKYKEIFFDQSKNGYAGYIDGGASQEEFYKFIKPILEKMDGTEELLVKLNREDLLRKQRTFDNGSIPHQIHLGELHAILRRQEDFYPFLKDNREKIEKILTFRIPYYVGPLARGNSRFAWMTRKSEETITPWNFEEVVDKGASAQSFIERMTNFDKNLPNEKVLPKHSLLYEYFTVYNELTKVKYVTEGMRKPAFLSGEQKKAIVDLLFKTNRKVTVKQLKEDYFKKIECFDSVEISGVEDRFNASLGTYHDLLKIIKDKDFLDNEENEDILEDIVLTLTLFEDREMIEERLKTYAHLFDDKVMKQLKRRRYTGWGRLSRKLINGIRDKQSGKTILDFLKSDGFANRNFMQLIHDDSLTFKEDIQKAQVSGQGDSLHEHIANLAGSPAIKKGILQTVKVVDELVKVMGRHKPENIVIEMARENQTTQKGQKNSRERMKRIEEGIKELGSQILKEHPVENTQLQNEKLYLYYLQNGRDMYVDQELDINRLSDYDVDHIVPQSFLKDDSIDNKVLTRSDKARGKSDNVPSEEVVKKMKNYWRQLLNAKLITQRKFDNLTKAERGGLSELDKAGFIKRQLVETRQITKHVAQILDSRMNTKYDENDKLIREVKVITLKSKLVSDFRKDFQFYKVREINNYHHAHDAYLNAVVGTALIKKYPKLESEFVYGDYKVYDVRKMIAKSEQEIGKATAKYFFYSNIMNFFKTEITLANGEIRKRPLIETNGETGEIVWDKGRDFATVRKVLSMPQVNIVKKTEVQTGGFSKESILPKRNSDKLIARKKDWDPKKYGGFDSPTVAYSVLVVAKVEKGKSKKLKSVKELLGITIMERSSFEKNPIDFLEAKGYKEVKKDLIIKLPKYSLFELENGRKRMLASAGELQKGNELALPSKYVNFLYLASHYEKLKGSPEDNEQKQLFVEQHKHYLDEIIEQISEFSKRVILADANLDKVLSAYNKHRDKPIREQAENIIHLFTLTNLGAPAAFKYFDTTIDRKRYTSTKEVLDATLIHQSITGLYETRIDLSQLGGDGGEAAAKGSSGGSGGLLGRDLLTKLKAQIQFSTEGPQVTWEDRPAMCLVLNLEEEYRLHEKPVPPSIDPSWLQLFPMVWAEKAGMGLANQVPPVVVELKSDASPVAVRQYPMSKEAREGIRPHIQRFLDLGILVPCQSPWNTPLLPVKKPGTNDYRPVQDLREVNKRVQDIHPTVPNPYNLLSSLPPSHTWYSVLDLKDAFFCLKLHPNSQPLFAFEWRDPEKGNTGQLTWTRLPQGFKNSPTLFNEALHRDLASFRALNPQVVMLQYVDDLLVAAPTYRDCKEGTRRLLQELSKLGYRVSAKKAQLCREEVTYLGYLLKGGKRWLTPARKATVMKIPTPTTPRQVREFLGKAGFCRLFIPGFASLAAPLYPLTRPKVPFTWTEAHQEAFGRIKEALLSAPALALPDLTKPFALYVDEKEGVARGVLTQTLGPWRRPVAYLSKKLDPVASGWPTCLKAIAAVALLLKDADKLTLGQNVLVIAPHNLESIVRQPPDRWMTNARMTHYQSLLLNERVSFAPPAILNPATLLPVESDDTPIHICSEILAEETGTRPDLRDQPLPGVPAWYTDGSSFIMDGRRQAGAAIVDNKRTVWASNLPEGTSAQKAELIALTQALRLAEGKSINIYTDSRYAFATAHVHGAIYKQRGWLTSAGKDIKNKEEILALLEAIHLPKRVAIIHCPGHQRGTDPVATGNRKADEAAKQAAQSTRILTETTKNAGKRTADGSEFEKRTADGSEFESPKKKAKVE

SEQ ID NO: 1691 - protein, 2125 aa, synthetic construct
MPAAKRVKLDGGDKKYSIGLDIGTNSVGWAVITDEYKVPSKKFKVLGNTDRHSIKKNLIGALLFDSGETAEATRLKRTARRRYTRRKNRICYLQEIFSNEMAKVDDSFFHRLEESFLVEEDKKHERHPIFGNIVDEVAYHEKYPTIYHLRKKLVDSTDKADLRLIYLALAHMIKFRGHFLIEGDLNPDNSDVDKLFIQLVQTYNQLFEENPINASGVDAKAILSARLSKSRRLENLIAQLPGEKKNGLFGNLIALSLGLTPNFKSNFDLAEDAKLQLSKDTYDDDLDNLLAQIGDQYADLFLAAKNLSDAILLSDILRVNTEITKAPLSASMIKRYDEHHQDLTLLKALVRQQLPEKYKEIFFDQSKNGYAGYIDGGASQEEFYKFIKPILEKMDGTEELLVKLNREDLLRKQRTFDNGSIPHQIHLGELHAILRRQEDFYPFLKDNREKIEKILTFRIPYYVGPLARGNSRFAWMTRKSEETITPWNFEEVVDKGASAQSFIERMTNFDKNLPNEKVLPKHSLLYEYFTVYNELTKVKYVTEGMRKPAFLSGEQKKAIVDLLFKTNRKVTVKQLKEDYFKKIECFDSVEISGVEDRFNASLGTYHDLLKIIKDKDFLDNEENEDILEDIVLTLTLFEDREMIEERLKTYAHLFDDKVMKQLKRRRYTGWGRLSRKLINGIRDKQSGKTILDFLKSDGFANRNFMQLIHDDSLTFKEDIQKAQVSGQGDSLHEHIANLAGSPAIKKGILQTVKVVDELVKVMGRHKPENIVIEMARENQTTQKGQKNSRERMKRIEEGIKELGSQILKEHPVENTQLQNEKLYLYYLQNGRDMYVDQELDINRLSDYDVDHIVPQSFLKDDSIDNKVLTRSDKARGKSDNVPSEEVVKKMKNYWRQLLNAKLITQRKFDNLTKAERGGLSELDKAGFIKRQLVETRQITKHVAQILDSRMNTKYDENDKLIREVKVITLKSKLVSDFRKDFQFYKVREINNYHHAHDAYLNAVVGTALIKKYPKLESEFVYGDYKVYDVRKMIAKSEQEIGKATAKYFFYSNIMNFFKTEITLANGEIRKRPLIETNGETGEIVWDKGRDFATVRKVLSMPQVNIVKKTEVQTGGFSKESILPKRNSDKLIARKKDWDPKKYGGFDSPTVAYSVLVVAKVEKGKSKKLKSVKELLGITIMERSSFEKNPIDFLEAKGYKEVKKDLIIKLPKYSLFELENGRKRMLASAGELQKGNELALPSKYVNFLYLASHYEKLKGSPEDNEQKQLFVEQHKHYLDEIIEQISEFSKRVILADANLDKVLSAYNKHRDKPIREQAENIIHLFTLTNLGAPAAFKYFDTTIDRKRYTSTKEVLDATLIHQSITGLYETRIDLSQLGGDGGPAPGGGGSSGGLLGRDLLTKLKAQIQFSTEGPQVTWEDRPAMCLVLNLEEEYRLHEKPVPPSIDPSWLQLFPMVWAEKAGMGLANQVPPVVVELKSDASPVAVRQYPMSKEAREGIRPHIQRFLDLGILVPCQSPWNTPLLPVKKPGTNDYRPVQDLREVNKRVQDIHPTVPNPYNLLSSLPPSHTWYSVLDLKDAFFCLKLHPNSQPLFAFEWRDPEKGNTGQLTWTRLPQGFKNSPTLFNEALHRDLASFRALNPQVVMLQYVDDLLVAAPTYRDCKEGTRRLLQELSKLGYRVSAKKAQLCREEVTYLGYLLKGGKRWLTPARKATVMKIPTPTTPRQVREFLGKAGFCRLFIPGFASLAAPLYPLTRPKVPFTWTEAHQEAFGRIKEALLSAPALALPDLTKPFALYVDEKEGVARGVLTQTLGPWRRPVAYLSKKLDPVASGWPTCLKAIAAVALLLKDADKLTLGQNVLVIAPHNLESIVRQPPDRWMTNARMTHYQSLLLNERVSFAPPAILNPATLLPVESDDTPIHICSEILAEETGTRPDLRDQPLPGVPAWYTDGSSFIMDGRRQAGAAIVDNKRTVWASNLPEGTSAQKAELIALTQALRLAEGKSINIYTDSRYAFATAHVHGAIYKQRGWLTSAGKDIKNKEEILALLEAIHLPKRVAIIHCPGHQRGTDPVATGNRKADEAAKQAAQSTRILTETTKNAGKRTADGSEFEKRTADGSEFESPKKKAKVE

SEQ ID NO: 1692 - protein, 2119 aa, synthetic construct
MPAAKRVKLDGGDKKYSIGLDIGTNSVGWAVITDEYKVPSKKFKVLGNTDRHSIKKNLIGALLFDSGETAEATRLKRTARRRYTRRKNRICYLQEIFSNEMAKVDDSFFHRLEESFLVEEDKKHERHPIFGNIVDEVAYHEKYPTIYHLRKKLVDSTDKADLRLIYLALAHMIKFRGHFLIEGDLNPDNSDVDKLFIQLVQTYNQLFEENPINASGVDAKAILSARLSKSRRLENLIAQLPGEKKNGLFGNLIALSLGLTPNFKSNFDLAEDAKLQLSKDTYDDDLDNLLAQIGDQYADLFLAAKNLSDAILLSDILRVNTEITKAPLSASMIKRYDEHHQDLTLLKALVRQQLPEKYKEIFFDQSKNGYAGYIDGGASQEEFYKFIKPILEKMDGTEELLVKLNREDLLRKQRTFDNGSIPHQIHLGELHAILRRQEDFYPFLKDNREKIEKILTFRIPYYVGPLARGNSRFAWMTRKSEETITPWNFEEVVDKGASAQSFIERMTNFDKNLPNEKVLPKHSLLYEYFTVYNELTKVKYVTEGMRKPAFLSGEQKKAIVDLLFKTNRKVTVKQLKEDYFKKIECFDSVEISGVEDRFNASLGTYHDLLKIIKDKDFLDNEENEDILEDIVLTLTLFEDREMIEERLKTYAHLFDDKVMKQLKRRRYTGWGRLSRKLINGIRDKQSGKTILDFLKSDGFANRNFMQLIHDDSLTFKEDIQKAQVSGQGDSLHEHIANLAGSPAIKKGILQTVKVVDELVKVMGRHKPENIVIEMARENQTTQKGQKNSRERMKRIEEGIKELGSQILKEHPVENTQLQNEKLYLYYLQNGRDMYVDQELDINRLSDYDVDHIVPQSFLKDDSIDNKVLTRSDKARGKSDNVPSEEVVKKMKNYWRQLLNAKLITQRKFDNLTKAERGGLSELDKAGFIKRQLVETRQITKHVAQILDSRMNTKYDENDKLIREVKVITLKSKLVSDFRKDFQFYKVREINNYHHAHDAYLNAVVGTALIKKYPKLESEFVYGDYKVYDVRKMIAKSEQEIGKATAKYFFYSNIMNFFKTEITLANGEIRKRPLIETNGETGEIVWDKGRDFATVRKVLSMPQVNIVKKTEVQTGGFSKESILPKRNSDKLIARKKDWDPKKYGGFDSPTVAYSVLVVAKVEKGKSKKLKSVKELLGITIMERSSFEKNPIDFLEAKGYKEVKKDLIIKLPKYSLFELENGRKRMLASAGELQKGNELALPSKYVNFLYLASHYEKLKGSPEDNEQKQLFVEQHKHYLDEIIEQISEFSKRVILADANLDKVLSAYNKHRDKPIREQAENIIHLFTLTNLGAPAAFKYFDTTIDRKRYTSTKEVLDATLIHQSITGLYETRIDLSQLGGDGGPAPGGLLGRDLLTKLKAQIQFSTEGPQVTWEDRPAMCLVLNLEEEYRLHEKPVPPSIDPSWLQLFPMVWAEKAGMGLANQVPPVVVELKSDASPVAVRQYPMSKEAREGIRPHIQRFLDLGILVPCQSPWNTPLLPVKKPGTNDYRPVQDLREVNKRVQDIHPTVPNPYNLLSSLPPSHTWYSVLDLKDAFFCLKLHPNSQPLFAFEWRDPEKGNTGQLTWTRLPQGFKNSPTLFNEALHRDLASFRALNPQVVMLQYVDDLLVAAPTYRDCKEGTRRLLQELSKLGYRVSAKKAQLCREEVTYLGYLLKGGKRWLTPARKATVMKIPTPTTPRQVREFLGKAGFCRLFIPGFASLAAPLYPLTRPKVPFTWTEAHQEAFGRIKEALLSAPALALPDLTKPFALYVDEKEGVARGVLTQTLGPWRRPVAYLSKKLDPVASGWPTCLKAIAAVALLLKDADKLTLGQNVLVIAPHNLESIVRQPPDRWMTNARMTHYQSLLLNERVSFAPPAILNPATLLPVESDDTPIHICSEILAEETGTRPDLRDQPLPGVPAWYTDGSSFIMDGRRQAGAAIVDNKRTVWASNLPEGTSAQKAELIALTQALRLAEGKSINIYTDSRYAFATAHVHGAIYKQRGWLTSAGKDIKNKEEILALLEAIHLPKRVAIIHCPGHQRGTDPVATGNRKADEAAKQAAQSTRILTETTKNAGKRTADGSEFEKRTADGSEFESPKKKAKVE

SEQ ID NO: 1693 - protein, 2128 aa, synthetic construct
MPAAKRVKLDGGDKKYSIGLDIGTNSVGWAVITDEYKVPSKKFKVLGNTDRHSIKKNLIGALLFDSGETAEATRLKRTARRRYTRRKNRICYLQEIFSNEMAKVDDSFFHRLEESFLVEEDKKHERHPIFGNIVDEVAYHEKYPTIYHLRKKLVDSTDKADLRLIYLALAHMIKFRGHFLIEGDLNPDNSDVDKLFIQLVQTYNQLFEENPINASGVDAKAILSARLSKSRRLENLIAQLPGEKKNGLFGNLIALSLGLTPNFKSNFDLAEDAKLQLSKDTYDDDLDNLLAQIGDQYADLFLAAKNLSDAILLSDILRVNTEITKAPLSASMIKRYDEHHQDLTLLKALVRQQLPEKYKEIFFDQSKNGYAGYIDGGASQEEFYKFIKPILEKMDGTEELLVKLNREDLLRKQRTFDNGSIPHQIHLGELHAILRRQEDFYPFLKDNREKIEKILTFRIPYYVGPLARGNSRFAWMTRKSEETITPWNFEEVVDKGASAQSFIERMTNFDKNLPNEKVLPKHSLLYEYFTVYNELTKVKYVTEGMRKPAFLSGEQKKAIVDLLFKTNRKVTVKQLKEDYFKKIECFDSVEISGVEDRFNASLGTYHDLLKIIKDKDFLDNEENEDILEDIVLTLTLFEDREMIEERLKTYAHLFDDKVMKQLKRRRYTGWGRLSRKLINGIRDKQSGKTILDFLKSDGFANRNFMQLIHDDSLTFKEDIQKAQVSGQGDSLHEHIANLAGSPAIKKGILQTVKVVDELVKVMGRHKPENIVIEMARENQTTQKGQKNSRERMKRIEEGIKELGSQILKEHPVENTQLQNEKLYLYYLQNGRDMYVDQELDINRLSDYDVDHIVPQSFLKDDSIDNKVLTRSDKARGKSDNVPSEEVVKKMKNYWRQLLNAKLITQRKFDNLTKAERGGLSELDKAGFIKRQLVETRQITKHVAQILDSRMNTKYDENDKLIREVKVITLKSKLVSDFRKDFQFYKVREINNYHHAHDAYLNAVVGTALIKKYPKLESEFVYGDYKVYDVRKMIAKSEQEIGKATAKYFFYSNIMNFFKTEITLANGEIRKRPLIETNGETGEIVWDKGRDFATVRKVLSMPQVNIVKKTEVQTGGFSKESILPKRNSDKLIARKKDWDPKKYGGFDSPTVAYSVLVVAKVEKGKSKKLKSVKELLGITIMERSSFEKNPIDFLEAKGYKEVKKDLIIKLPKYSLFELENGRKRMLASAGELQKGNELALPSKYVNFLYLASHYEKLKGSPEDNEQKQLFVEQHKHYLDEIIEQISEFSKRVILADANLDKVLSAYNKHRDKPIREQAENIIHLFTLTNLGAPAAFKYFDTTIDRKRYTSTKEVLDATLIHQSITGLYETRIDLSQLGGDGGGSAGSAAGSGEFGGLLGRDLLTKLKAQIQFSTEGPQVTWEDRPAMCLVLNLEEEYRLHEKPVPPSIDPSWLQLFPMVWAEKAGMGLANQVPPVVVELKSDASPVAVRQYPMSKEAREGIRPHIQRFLDLGILVPCQSPWNTPLLPVKKPGTNDYRPVQDLREVNKRVQDIHPTVPNPYNLLSSLPPSHTWYSVLDLKDAFFCLKLHPNSQPLFAFEWRDPEKGNTGQLTWTRLPQGFKNSPTLFNEALHRDLASFRALNPQVVMLQYVDDLLVAAPTYRDCKEGTRRLLQELSKLGYRVSAKKAQLCREEVTYLGYLLKGGKRWLTPARKATVMKIPTPTTPRQVREFLGKAGFCRLFIPGFASLAAPLYPLTRPKVPFTWTEAHQEAFGRIKEALLSAPALALPDLTKPFALYVDEKEGVARGVLTQTLGPWRRPVAYLSKKLDPVASGWPTCLKAIAAVALLLKDADKLTLGQNVLVIAPHNLESIVRQPPDRWMTNARMTHYQSLLLNERVSFAPPAILNPATLLPVESDDTPIHICSEILAEETGTRPDLRDQPLPGVPAWYTDGSSFIMDGRRQAGAAIVDNKRTVWASNLPEGTSAQKAELIALTQALRLAEGKSINIYTDSRYAFATAHVHGAIYKQRGWLTSAGKDIKNKEEILALLEAIHLPKRVAIIHCPGHQRGTDPVATGNRKADEAAKQAAQSTRILTETTKNAGKRTADGSEFEKRTADGSEFESPKKKAKVE

SEQ ID NO: 1694 - protein, 2125 aa, synthetic construct
MPAAKRVKLDGGDKKYSIGLDIGTNSVGWAVITDEYKVPSKKFKVLGNTDRHSIKKNLIGALLFDSGETAEATRLKRTARRRYTRRKNRICYLQEIFSNEMAKVDDSFFHRLEESFLVEEDKKHERHPIFGNIVDEVAYHEKYPTIYHLRKKLVDSTDKADLRLIYLALAHMIKFRGHFLIEGDLNPDNSDVDKLFIQLVQTYNQLFEENPINASGVDAKAILSARLSKSRRLENLIAQLPGEKKNGLFGNLIALSLGLTPNFKSNFDLAEDAKLQLSKDTYDDDLDNLLAQIGDQYADLFLAAKNLSDAILLSDILRVNTEITKAPLSASMIKRYDEHHQDLTLLKALVRQQLPEKYKEIFFDQSKNGYAGYIDGGASQEEFYKFIKPILEKMDGTEELLVKLNREDLLRKQRTFDNGSIPHQIHLGELHAILRRQEDFYPFLKDNREKIEKILTFRIPYYVGPLARGNSRFAWMTRKSEETITPWNFEEVVDKGASAQSFIERMTNFDKNLPNEKVLPKHSLLYEYFTVYNELTKVKYVTEGMRKPAFLSGEQKKAIVDLLFKTNRKVTVKQLKEDYFKKIECFDSVEISGVEDRFNASLGTYHDLLKIIKDKDFLDNEENEDILEDIVLTLTLFEDREMIEERLKTYAHLFDDKVMKQLKRRRYTGWGRLSRKLINGIRDKQSGKTILDFLKSDGFANRNFMQLIHDDSLTFKEDIQKAQVSGQGDSLHEHIANLAGSPAIKKGILQTVKVVDELVKVMGRHKPENIVIEMARENQTTQKGQKNSRERMKRIEEGIKELGSQILKEHPVENTQLQNEKLYLYYLQNGRDMYVDQELDINRLSDYDVDHIVPQSFLKDDSIDNKVLTRSDKARGKSDNVPSEEVVKKMKNYWRQLLNAKLITQRKFDNLTKAERGGLSELDKAGFIKRQLVETRQITKHVAQILDSRMNTKYDENDKLIREVKVITLKSKLVSDFRKDFQFYKVREINNYHHAHDAYLNAVVGTALIKKYPKLESEFVYGDYKVYDVRKMIAKSEQEIGKATAKYFFYSNIMNFFKTEITLANGEIRKRPLIETNGETGEIVWDKGRDFATVRKVLSMPQVNIVKKTEVQTGGFSKESILPKRNSDKLIARKKDWDPKKYGGFDSPTVAYSVLVVAKVEKGKSKKLKSVKELLGITIMERSSFEKNPIDFLEAKGYKEVKKDLIIKLPKYSLFELENGRKRMLASAGELQKGNELALPSKYVNFLYLASHYEKLKGSPEDNEQKQLFVEQHKHYLDEIIEQISEFSKRVILADANLDKVLSAYNKHRDKPIREQAENIIHLFTLTNLGAPAAFKYFDTTIDRKRYTSTKEVLDATLIHQSITGLYETRIDLSQLGGDGGGSSPAPGGGGGLLGRDLLTKLKAQIQFSTEGPQVTWEDRPAMCLVLNLEEEYRLHEKPVPPSIDPSWLQLFPMVWAEKAGMGLANQVPPVVVELKSDASPVAVRQYPMSKEAREGIRPHIQRFLDLGILVPCQSPWNTPLLPVKKPGTNDYRPVQDLREVNKRVQDIHPTVPNPYNLLSSLPPSHTWYSVLDLKDAFFCLKLHPNSQPLFAFEWRDPEKGNTGQLTWTRLPQGFKNSPTLFNEALHRDLASFRALNPQVVMLQYVDDLLVAAPTYRDCKEGTRRLLQELSKLGYRVSAKKAQLCREEVTYLGYLLKGGKRWLTPARKATVMKIPTPTTPRQVREFLGKAGFCRLFIPGFASLAAPLYPLTRPKVPFTWTEAHQEAFGRIKEALLSAPALALPDLTKPFALYVDEKEGVARGVLTQTLGPWRRPVAYLSKKLDPVASGWPTCLKAIAAVALLLKDADKLTLGQNVLVIAPHNLESIVRQPPDRWMTNARMTHYQSLLLNERVSFAPPAILNPATLLPVESDDTPIHICSEILAEETGTRPDLRDQPLPGVPAWYTDGSSFIMDGRRQAGAAIVDNKRTVWASNLPEGTSAQKAELIALTQALRLAEGKSINIYTDSRYAFATAHVHGAIYKQRGWLTSAGKDIKNKEEILALLEAIHLPKRVAIIHCPGHQRGTDPVATGNRKADEAAKQAAQSTRILTETTKNAGKRTADGSEFEKRTADGSEFESPKKKAKVE

SEQ ID NO: 1695 - protein, 2122 aa, synthetic construct
MPAAKRVKLDGGDKKYSIGLDIGTNSVGWAVITDEYKVPSKKFKVLGNTDRHSIKKNLIGALLFDSGETAEATRLKRTARRRYTRRKNRICYLQEIFSNEMAKVDDSFFHRLEESFLVEEDKKHERHPIFGNIVDEVAYHEKYPTIYHLRKKLVDSTDKADLRLIYLALAHMIKFRGHFLIEGDLNPDNSDVDKLFIQLVQTYNQLFEENPINASGVDAKAILSARLSKSRRLENLIAQLPGEKKNGLFGNLIALSLGLTPNFKSNFDLAEDAKLQLSKDTYDDDLDNLLAQIGDQYADLFLAAKNLSDAILLSDILRVNTEITKAPLSASMIKRYDEHHQDLTLLKALVRQQLPEKYKEIFFDQSKNGYAGYIDGGASQEEFYKFIKPILEKMDGTEELLVKLNREDLLRKQRTFDNGSIPHQIHLGELHAILRRQEDFYPFLKDNREKIEKILTFRIPYYVGPLARGNSRFAWMTRKSEETITPWNFEEVVDKGASAQSFIERMTNFDKNLPNEKVLPKHSLLYEYFTVYNELTKVKYVTEGMRKPAFLSGEQKKAIVDLLFKTNRKVTVKQLKEDYFKKIECFDSVEISGVEDRFNASLGTYHDLLKIIKDKDFLDNEENEDILEDIVLTLTLFEDREMIEERLKTYAHLFDDKVMKQLKRRRYTGWGRLSRKLINGIRDKQSGKTILDFLKSDGFANRNFMQLIHDDSLTFKEDIQKAQVSGQGDSLHEHIANLAGSPAIKKGILQTVKVVDELVKVMGRHKPENIVIEMARENQTTQKGQKNSRERMKRIEEGIKELGSQILKEHPVENTQLQNEKLYLYYLQNGRDMYVDQELDINRLSDYDVDHIVPQSFLKDDSIDNKVLTRSDKARGKSDNVPSEEVVKKMKNYWRQLLNAKLITQRKFDNLTKAERGGLSELDKAGFIKRQLVETRQITKHVAQILDSRMNTKYDENDKLIREVKVITLKSKLVSDFRKDFQFYKVREINNYHHAHDAYLNAVVGTALIKKYPKLESEFVYGDYKVYDVRKMIAKSEQEIGKATAKYFFYSNIMNFFKTEITLANGEIRKRPLIETNGETGEIVWDKGRDFATVRKVLSMPQVNIVKKTEVQTGGFSKESILPKRNSDKLIARKKDWDPKKYGGFDSPTVAYSVLVVAKVEKGKSKKLKSVKELLGITIMERSSFEKNPIDFLEAKGYKEVKKDLIIKLPKYSLFELENGRKRMLASAGELQKGNELALPSKYVNFLYLASHYEKLKGSPEDNEQKQLFVEQHKHYLDEIIEQISEFSKRVILADANLDKVLSAYNKHRDKPIREQAENIIHLFTLTNLGAPAAFKYFDTTIDRKRYTSTKEVLDATLIHQSITGLYETRIDLSQLGGDGGPAPGSSGGLLGRDLLTKLKAQIQFSTEGPQVTWEDRPAMCLVLNLEEEYRLHEKPVPPSIDPSWLQLFPMVWAEKAGMGLANQVPPVVVELKSDASPVAVRQYPMSKEAREGIRPHIQRFLDLGILVPCQSPWNTPLLPVKKPGTNDYRPVQDLREVNKRVQDIHPTVPNPYNLLSSLPPSHTWYSVLDLKDAFFCLKLHPNSQPLFAFEWRDPEKGNTGQLTWTRLPQGFKNSPTLFNEALHRDLASFRALNPQVVMLQYVDDLLVAAPTYRDCKEGTRRLLQELSKLGYRVSAKKAQLCREEVTYLGYLLKGGKRWLTPARKATVMKIPTPTTPRQVREFLGKAGFCRLFIPGFASLAAPLYPLTRPKVPFTWTEAHQEAFGRIKEALLSAPALALPDLTKPFALYVDEKEGVARGVLTQTLGPWRRPVAYLSKKLDPVASGWPTCLKAIAAVALLLKDADKLTLGQNVLVIAPHNLESIVRQPPDRWMTNARMTHYQSLLLNERVSFAPPAILNPATLLPVESDDTPIHICSEILAEETGTRPDLRDQPLPGVPAWYTDGSSFIMDGRRQAGAAIVDNKRTVWASNLPEGTSAQKAELIALTQALRLAEGKSINIYTDSRYAFATAHVHGAIYKQRGWLTSAGKDIKNKEEILALLEAIHLPKRVAIIHCPGHQRGTDPVATGNRKADEAAKQAAQSTRILTETTKNAGKRTADGSEFEKRTADGSEFESPKKKAKVE

SEQ ID NO: 1696 - protein, 2125 aa, synthetic construct
MPAAKRVKLDGGDKKYSIGLDIGTNSVGWAVITDEYKVPSKKFKVLGNTDRHSIKKNLIGALLFDSGETAEATRLKRTARRRYTRRKNRICYLQEIFSNEMAKVDDSFFHRLEESFLVEEDKKHERHPIFGNIVDEVAYHEKYPTIYHLRKKLVDSTDKADLRLIYLALAHMIKFRGHFLIEGDLNPDNSDVDKLFIQLVQTYNQLFEENPINASGVDAKAILSARLSKSRRLENLIAQLPGEKKNGLFGNLIALSLGLTPNFKSNFDLAEDAKLQLSKDTYDDDLDNLLAQIGDQYADLFLAAKNLSDAILLSDILRVNTEITKAPLSASMIKRYDEHHQDLTLLKALVRQQLPEKYKEIFFDQSKNGYAGYIDGGASQEEFYKFIKPILEKMDGTEELLVKLNREDLLRKQRTFDNGSIPHQIHLGELHAILRRQEDFYPFLKDNREKIEKILTFRIPYYVGPLARGNSRFAWMTRKSEETITPWNFEEVVDKGASAQSFIERMTNFDKNLPNEKVLPKHSLLYEYFTVYNELTKVKYVTEGMRKPAFLSGEQKKAIVDLLFKTNRKVTVKQLKEDYFKKIECFDSVEISGVEDRFNASLGTYHDLLKIIKDKDFLDNEENEDILEDIVLTLTLFEDREMIEERLKTYAHLFDDKVMKQLKRRRYTGWGRLSRKLINGIRDKQSGKTILDFLKSDGFANRNFMQLIHDDSLTFKEDIQKAQVSGQGDSLHEHIANLAGSPAIKKGILQTVKVVDELVKVMGRHKPENIVIEMARENQTTQKGQKNSRERMKRIEEGIKELGSQILKEHPVENTQLQNEKLYLYYLQNGRDMYVDQELDINRLSDYDVDHIVPQSFLKDDSIDNKVLTRSDKARGKSDNVPSEEVVKKMKNYWRQLLNAKLITQRKFDNLTKAERGGLSELDKAGFIKRQLVETRQITKHVAQILDSRMNTKYDENDKLIREVKVITLKSKLVSDFRKDFQFYKVREINNYHHAHDAYLNAVVGTALIKKYPKLESEFVYGDYKVYDVRKMIAKSEQEIGKATAKYFFYSNIMNFFKTEITLANGEIRKRPLIETNGETGEIVWDKGRDFATVRKVLSMPQVNIVKKTEVQTGGFSKESILPKRNSDKLIARKKDWDPKKYGGFDSPTVAYSVLVVAKVEKGKSKKLKSVKELLGITIMERSSFEKNPIDFLEAKGYKEVKKDLIIKLPKYSLFELENGRKRMLASAGELQKGNELALPSKYVNFLYLASHYEKLKGSPEDNEQKQLFVEQHKHYLDEIIEQISEFSKRVILADANLDKVLSAYNKHRDKPIREQAENIIHLFTLTNLGAPAAFKYFDTTIDRKRYTSTKEVLDATLIHQSITGLYETRIDLSQLGGDGGPAPAPAPAPGGLLGRDLLTKLKAQIQFSTEGPQVTWEDRPAMCLVLNLEEEYRLHEKPVPPSIDPSWLQLFPMVWAEKAGMGLANQVPPVVVELKSDASPVAVRQYPMSKEAREGIRPHIQRFLDLGILVPCQSPWNTPLLPVKKPGTNDYRPVQDLREVNKRVQDIHPTVPNPYNLLSSLPPSHTWYSVLDLKDAFFCLKLHPNSQPLFAFEWRDPEKGNTGQLTWTRLPQGFKNSPTLFNEALHRDLASFRALNPQVVMLQYVDDLLVAAPTYRDCKEGTRRLLQELSKLGYRVSAKKAQLCREEVTYLGYLLKGGKRWLTPARKATVMKIPTPTTPRQVREFLGKAGFCRLFIPGFASLAAPLYPLTRPKVPFTWTEAHQEAFGRIKEALLSAPALALPDLTKPFALYVDEKEGVARGVLTQTLGPWRRPVAYLSKKLDPVASGWPTCLKAIAAVALLLKDADKLTLGQNVLVIAPHNLESIVRQPPDRWMTNARMTHYQSLLLNERVSFAPPAILNPATLLPVESDDTPIHICSEILAEETGTRPDLRDQPLPGVPAWYTDGSSFIMDGRRQAGAAIVDNKRTVWASNLPEGTSAQKAELIALTQALRLAEGKSINIYTDSRYAFATAHVHGAIYKQRGWLTSAGKDIKNKEEILALLEAIHLPKRVAIIHCPGHQRGTDPVATGNRKADEAAKQAAQSTRILTETTKNAGKRTADGSEFEKRTADGSEFESPKKKAKVE

SEQ ID NO: 1697 - protein, 2119 aa, synthetic construct
MPAAKRVKLDGGDKKYSIGLDIGTNSVGWAVITDEYKVPSKKFKVLGNTDRHSIKKNLIGALLFDSGETAEATRLKRTARRRYTRRKNRICYLQEIFSNEMAKVDDSFFHRLEESFLVEEDKKHERHPIFGNIVDEVAYHEKYPTIYHLRKKLVDSTDKADLRLIYLALAHMIKFRGHFLIEGDLNPDNSDVDKLFIQLVQTYNQLFEENPINASGVDAKAILSARLSKSRRLENLIAQLPGEKKNGLFGNLIALSLGLTPNFKSNFDLAEDAKLQLSKDTYDDDLDNLLAQIGDQYADLFLAAKNLSDAILLSDILRVNTEITKAPLSASMIKRYDEHHQDLTLLKALVRQQLPEKYKEIFFDQSKNGYAGYIDGGASQEEFYKFIKPILEKMDGTEELLVKLNREDLLRKQRTFDNGSIPHQIHLGELHAILRRQEDFYPFLKDNREKIEKILTFRIPYYVGPLARGNSRFAWMTRKSEETITPWNFEEVVDKGASAQSFIERMTNFDKNLPNEKVLPKHSLLYEYFTVYNELTKVKYVTEGMRKPAFLSGEQKKAIVDLLFKTNRKVTVKQLKEDYFKKIECFDSVEISGVEDRFNASLGTYHDLLKIIKDKDFLDNEENEDILEDIVLTLTLFEDREMIEERLKTYAHLFDDKVMKQLKRRRYTGWGRLSRKLINGIRDKQSGKTILDFLKSDGFANRNFMQLIHDDSLTFKEDIQKAQVSGQGDSLHEHIANLAGSPAIKKGILQTVKVVDELVKVMGRHKPENIVIEMARENQTTQKGQKNSRERMKRIEEGIKELGSQILKEHPVENTQLQNEKLYLYYLQNGRDMYVDQELDINRLSDYDVDHIVPQSFLKDDSIDNKVLTRSDKARGKSDNVPSEEVVKKMKNYWRQLLNAKLITQRKFDNLTKAERGGLSELDKAGFIKRQLVETRQITKHVAQILDSRMNTKYDENDKLIREVKVITLKSKLVSDFRKDFQFYKVREINNYHHAHDAYLNAVVGTALIKKYPKLESEFVYGDYKVYDVRKMIAKSEQEIGKATAKYFFYSNIMNFFKTEITLANGEIRKRPLIETNGETGEIVWDKGRDFATVRKVLSMPQVNIVKKTEVQTGGFSKESILPKRNSDKLIARKKDWDPKKYGGFDSPTVAYSVLVVAKVEKGKSKKLKSVKELLGITIMERSSFEKNPIDFLEAKGYKEVKKDLIIKLPKYSLFELENGRKRMLASAGELQKGNELALPSKYVNFLYLASHYEKLKGSPEDNEQKQLFVEQHKHYLDEIIEQISEFSKRVILADANLDKVLSAYNKHRDKPIREQAENIIHLFTLTNLGAPAAFKYFDTTIDRKRYTSTKEVLDATLIHQSITGLYETRIDLSQLGGDGGGSSGGLLGRDLLTKLKAQIQFSTEGPQVTWEDRPAMCLVLNLEEEYRLHEKPVPPSIDPSWLQLFPMVWAEKAGMGLANQVPPVVVELKSDASPVAVRQYPMSKEAREGIRPHIQRFLDLGILVPCQSPWNTPLLPVKKPGTNDYRPVQDLREVNKRVQDIHPTVPNPYNLLSSLPPSHTWYSVLDLKDAFFCLKLHPNSQPLFAFEWRDPEKGNTGQLTWTRLPQGFKNSPTLFNEALHRDLASFRALNPQVVMLQYVDDLLVAAPTYRDCKEGTRRLLQELSKLGYRVSAKKAQLCREEVTYLGYLLKGGKRWLTPARKATVMKIPTPTTPRQVREFLGKAGFCRLFIPGFASLAAPLYPLTRPKVPFTWTEAHQEAFGRIKEALLSAPALALPDLTKPFALYVDEKEGVARGVLTQTLGPWRRPVAYLSKKLDPVASGWPTCLKAIAAVALLLKDADKLTLGQNVLVIAPHNLESIVRQPPDRWMTNARMTHYQSLLLNERVSFAPPAILNPATLLPVESDDTPIHICSEILAEETGTRPDLRDQPLPGVPAWYTDGSSFIMDGRRQAGAAIVDNKRTVWASNLPEGTSAQKAELIALTQALRLAEGKSINIYTDSRYAFATAHVHGAIYKQRGWLTSAGKDIKNKEEILALLEAIHLPKRVAIIHCPGHQRGTDPVATGNRKADEAAKQAAQSTRILTETTKNAGKRTADGSEFEKRTADGSEFESPKKKAKVE

SEQ ID NO: 1698 - protein, 2122 aa, synthetic construct
MPAAKRVKLDGGDKKYSIGLDIGTNSVGWAVITDEYKVPSKKFKVLGNTDRHSIKKNLIGALLFDSGETAEATRLKRTARRRYTRRKNRICYLQEIFSNEMAKVDDSFFHRLEESFLVEEDKKHERHPIFGNIVDEVAYHEKYPTIYHLRKKLVDSTDKADLRLIYLALAHMIKFRGHFLIEGDLNPDNSDVDKLFIQLVQTYNQLFEENPINASGVDAKAILSARLSKSRRLENLIAQLPGEKKNGLFGNLIALSLGLTPNFKSNFDLAEDAKLQLSKDTYDDDLDNLLAQIGDQYADLFLAAKNLSDAILLSDILRVNTEITKAPLSASMIKRYDEHHQDLTLLKALVRQQLPEKYKEIFFDQSKNGYAGYIDGGASQEEFYKFIKPILEKMDGTEELLVKLNREDLLRKQRTFDNGSIPHQIHLGELHAILRRQEDFYPFLKDNREKIEKILTFRIPYYVGPLARGNSRFAWMTRKSEETITPWNFEEVVDKGASAQSFIERMTNFDKNLPNEKVLPKHSLLYEYFTVYNELTKVKYVTEGMRKPAFLSGEQKKAIVDLLFKTNRKVTVKQLKEDYFKKIECFDSVEISGVEDRFNASLGTYHDLLKIIKDKDFLDNEENEDILEDIVLTLTLFEDREMIEERLKTYAHLFDDKVMKQLKRRRYTGWGRLSRKLINGIRDKQSGKTILDFLKSDGFANRNFMQLIHDDSLTFKEDIQKAQVSGQGDSLHEHIANLAGSPAIKKGILQTVKVVDELVKVMGRHKPENIVIEMARENQTTQKGQKNSRERMKRIEEGIKELGSQILKEHPVENTQLQNEKLYLYYLQNGRDMYVDQELDINRLSDYDVDHIVPQSFLKDDSIDNKVLTRSDKARGKSDNVPSEEVVKKMKNYWRQLLNAKLITQRKFDNLTKAERGGLSELDKAGFIKRQLVETRQITKHVAQILDSRMNTKYDENDKLIREVKVITLKSKLVSDFRKDFQFYKVREINNYHHAHDAYLNAVVGTALIKKYPKLESEFVYGDYKVYDVRKMIAKSEQEIGKATAKYFFYSNIMNFFKTEITLANGEIRKRPLIETNGETGEIVWDKGRDFATVRKVLSMPQVNIVKKTEVQTGGFSKESILPKRNSDKLIARKKDWDPKKYGGFDSPTVAYSVLVVAKVEKGKSKKLKSVKELLGITIMERSSFEKNPIDFLEAKGYKEVKKDLIIKLPKYSLFELENGRKRMLASAGELQKGNELALPSKYVNFLYLASHYEKLKGSPEDNEQKQLFVEQHKHYLDEIIEQISEFSKRVILADANLDKVLSAYNKHRDKPIREQAENIIHLFTLTNLGAPAAFKYFDTTIDRKRYTSTKEVLDATLIHQSITGLYETRIDLSQLGGDGGGSSGGGGGLLGRDLLTKLKAQIQFSTEGPQVTWEDRPAMCLVLNLEEEYRLHEKPVPPSIDPSWLQLFPMVWAEKAGMGLANQVPPVVVELKSDASPVAVRQYPMSKEAREGIRPHIQRFLDLGILVPCQSPWNTPLLPVKKPGTNDYRPVQDLREVNKRVQDIHPTVPNPYNLLSSLPPSHTWYSVLDLKDAFFCLKLHPNSQPLFAFEWRDPEKGNTGQLTWTRLPQGFKNSPTLFNEALHRDLASFRALNPQVVMLQYVDDLLVAAPTYRDCKEGTRRLLQELSKLGYRVSAKKAQLCREEVTYLGYLLKGGKRWLTPARKATVMKIPTPTTPRQVREFLGKAGFCRLFIPGFASLAAPLYPLTRPKVPFTWTEAHQEAFGRIKEALLSAPALALPDLTKPFALYVDEKEGVARGVLTQTLGPWRRPVAYLSKKLDPVASGWPTCLKAIAAVALLLKDADKLTLGQNVLVIAPHNLESIVRQPPDRWMTNARMTHYQSLLLNERVSFAPPAILNPATLLPVESDDTPIHICSEILAEETGTRPDLRDQPLPGVPAWYTDGSSFIMDGRRQAGAAIVDNKRTVWASNLPEGTSAQKAELIALTQALRLAEGKSINIYTDSRYAFATAHVHGAIYKQRGWLTSAGKDIKNKEEILALLEAIHLPKRVAIIHCPGHQRGTDPVATGNRKADEAAKQAAQSTRILTETTKNAGKRTADGSEFEKRTADGSEFESPKKKAKVE

SEQ ID NO: 1699 - protein, 2127 aa, synthetic construct
MPAAKRVKLDGGDKKYSIGLDIGTNSVGWAVITDEYKVPSKKFKVLGNTDRHSIKKNLIGALLFDSGETAEATRLKRTARRRYTRRKNRICYLQEIFSNEMAKVDDSFFHRLEESFLVEEDKKHERHPIFGNIVDEVAYHEKYPTIYHLRKKLVDSTDKADLRLIYLALAHMIKFRGHFLIEGDLNPDNSDVDKLFIQLVQTYNQLFEENPINASGVDAKAILSARLSKSRRLENLIAQLPGEKKNGLFGNLIALSLGLTPNFKSNFDLAEDAKLQLSKDTYDDDLDNLLAQIGDQYADLFLAAKNLSDAILLSDILRVNTEITKAPLSASMIKRYDEHHQDLTLLKALVRQQLPEKYKEIFFDQSKNGYAGYIDGGASQEEFYKFIKPILEKMDGTEELLVKLNREDLLRKQRTFDNGSIPHQIHLGELHAILRRQEDFYPFLKDNREKIEKILTFRIPYYVGPLARGNSRFAWMTRKSEETITPWNFEEVVDKGASAQSFIERMTNFDKNLPNEKVLPKHSLLYEYFTVYNELTKVKYVTEGMRKPAFLSGEQKKAIVDLLFKTNRKVTVKQLKEDYFKKIECFDSVEISGVEDRFNASLGTYHDLLKIIKDKDFLDNEENEDILEDIVLTLTLFEDREMIEERLKTYAHLFDDKVMKQLKRRRYTGWGRLSRKLINGIRDKQSGKTILDFLKSDGFANRNFMQLIHDDSLTFKEDIQKAQVSGQGDSLHEHIANLAGSPAIKKGILQTVKVVDELVKVMGRHKPENIVIEMARENQTTQKGQKNSRERMKRIEEGIKELGSQILKEHPVENTQLQNEKLYLYYLQNGRDMYVDQELDINRLSDYDVDHIVPQSFLKDDSIDNKVLTRSDKARGKSDNVPSEEVVKKMKNYWRQLLNAKLITQRKFDNLTKAERGGLSELDKAGFIKRQLVETRQITKHVAQILDSRMNTKYDENDKLIREVKVITLKSKLVSDFRKDFQFYKVREINNYHHAHDAYLNAVVGTALIKKYPKLESEFVYGDYKVYDVRKMIAKSEQEIGKATAKYFFYSNIMNFFKTEITLANGEIRKRPLIETNGETGEIVWDKGRDFATVRKVLSMPQVNIVKKTEVQTGGFSKESILPKRNSDKLIARKKDWDPKKYGGFDSPTVAYSVLVVAKVEKGKSKKLKSVKELLGITIMERSSFEKNPIDFLEAKGYKEVKKDLIIKLPKYSLFELENGRKRMLASAGELQKGNELALPSKYVNFLYLASHYEKLKGSPEDNEQKQLFVEQHKHYLDEIIEQISEFSKRVILADANLDKVLSAYNKHRDKPIREQAENIIHLFTLTNLGAPAAFKYFDTTIDRKRYTSTKEVLDATLIHQSITGLYETRIDLSQLGGDGGPAPEAAAKGSSGGLLGRDLLTKLKAQIQFSTEGPQVTWEDRPAMCLVLNLEEEYRLHEKPVPPSIDPSWLQLFPMVWAEKAGMGLANQVPPVVVELKSDASPVAVRQYPMSKEAREGIRPHIQRFLDLGILVPCQSPWNTPLLPVKKPGTNDYRPVQDLREVNKRVQDIHPTVPNPYNLLSSLPPSHTWYSVLDLKDAFFCLKLHPNSQPLFAFEWRDPEKGNTGQLTWTRLPQGFKNSPTLFNEALHRDLASFRALNPQVVMLQYVDDLLVAAPTYRDCKEGTRRLLQELSKLGYRVSAKKAQLCREEVTYLGYLLKGGKRWLTPARKATVMKIPTPTTPRQVREFLGKAGFCRLFIPGFASLAAPLYPLTRPKVPFTWTEAHQEAFGRIKEALLSAPALALPDLTKPFALYVDEKEGVARGVLTQTLGPWRRPVAYLSKKLDPVASGWPTCLKAIAAVALLLKDADKLTLGQNVLVIAPHNLESIVRQPPDRWMTNARMTHYQSLLLNERVSFAPPAILNPATLLPVESDDTPIHICSEILAEETGTRPDLRDQPLPGVPAWYTDGSSFIMDGRRQAGAAIVDNKRTVWASNLPEGTSAQKAELIALTQALRLAEGKSINIYTDSRYAFATAHVHGAIYKQRGWLTSAGKDIKNKEEILALLEAIHLPKRVAIIHCPGHQRGTDPVATGNRKADEAAKQAAQSTRILTETTKNAGKRTADGSEFEKRTADGSEFESPKKKAKVE

SEQ ID NO: 1700 - protein, 2127 aa, synthetic construct
MPAAKRVKLDGGDKKYSIGLDIGTNSVGWAVITDEYKVPSKKFKVLGNTDRHSIKKNLIGALLFDSGETAEATRLKRTARRRYTRRKNRICYLQEIFSNEMAKVDDSFFHRLEESFLVEEDKKHERHPIFGNIVDEVAYHEKYPTIYHLRKKLVDSTDKADLRLIYLALAHMIKFRGHFLIEGDLNPDNSDVDKLFIQLVQTYNQLFEENPINASGVDAKAILSARLSKSRRLENLIAQLPGEKKNGLFGNLIALSLGLTPNFKSNFDLAEDAKLQLSKDTYDDDLDNLLAQIGDQYADLFLAAKNLSDAILLSDILRVNTEITKAPLSASMIKRYDEHHQDLTLLKALVRQQLPEKYKEIFFDQSKNGYAGYIDGGASQEEFYKFIKPILEKMDGTEELLVKLNREDLLRKQRTFDNGSIPHQIHLGELHAILRRQEDFYPFLKDNREKIEKILTFRIPYYVGPLARGNSRFAWMTRKSEETITPWNFEEVVDKGASAQSFIERMTNFDKNLPNEKVLPKHSLLYEYFTVYNELTKVKYVTEGMRKPAFLSGEQKKAIVDLLFKTNRKVTVKQLKEDYFKKIECFDSVEISGVEDRFNASLGTYHDLLKIIKDKDFLDNEENEDILEDIVLTLTLFEDREMIEERLKTYAHLFDDKVMKQLKRRRYTGWGRLSRKLINGIRDKQSGKTILDFLKSDGFANRNFMQLIHDDSLTFKEDIQKAQVSGQGDSLHEHIANLAGSPAIKKGILQTVKVVDELVKVMGRHKPENIVIEMARENQTTQKGQKNSRERMKRIEEGIKELGSQILKEHPVENTQLQNEKLYLYYLQNGRDMYVDQELDINRLSDYDVDHIVPQSFLKDDSIDNKVLTRSDKARGKSDNVPSEEVVKKMKNYWRQLLNAKLITQRKFDNLTKAERGGLSELDKAGFIKRQLVETRQITKHVAQILDSRMNTKYDENDKLIREVKVITLKSKLVSDFRKDFQFYKVREINNYHHAHDAYLNAVVGTALIKKYPKLESEFVYGDYKVYDVRKMIAKSEQEIGKATAKYFFYSNIMNFFKTEITLANGEIRKRPLIETNGETGEIVWDKGRDFATVRKVLSMPQVNIVKKTEVQTGGFSKESILPKRNSDKLIARKKDWDPKKYGGFDSPTVAYSVLVVAKVEKGKSKKLKSVKELLGITIMERSSFEKNPIDFLEAKGYKEVKKDLIIKLPKYSLFELENGRKRMLASAGELQKGNELALPSKYVNFLYLASHYEKLKGSPEDNEQKQLFVEQHKHYLDEIIEQISEFSKRVILADANLDKVLSAYNKHRDKPIREQAENIIHLFTLTNLGAPAAFKYFDTTIDRKRYTSTKEVLDATLIHQSITGLYETRIDLSQLGGDGGEAAAKGSSGGGGGLLGRDLLTKLKAQIQFSTEGPQVTWEDRPAMCLVLNLEEEYRLHEKPVPPSIDPSWLQLFPMVWAEKAGMGLANQVPPVVVELKSDASPVAVRQYPMSKEAREGIRPHIQRFLDLGILVPCQSPWNTPLLPVKKPGTNDYRPVQDLREVNKRVQDIHPTVPNPYNLLSSLPPSHTWYSVLDLKDAFFCLKLHPNSQPLFAFEWRDPEKGNTGQLTWTRLPQGFKNSPTLFNEALHRDLASFRALNPQVVMLQYVDDLLVAAPTYRDCKEGTRRLLQELSKLGYRVSAKKAQLCREEVTYLGYLLKGGKRWLTPARKATVMKIPTPTTPRQVREFLGKAGFCRLFIPGFASLAAPLYPLTRPKVPFTWTEAHQEAFGRIKEALLSAPALALPDLTKPFALYVDEKEGVARGVLTQTLGPWRRPVAYLSKKLDPVASGWPTCLKAIAAVALLLKDADKLTLGQNVLVIAPHNLESIVRQPPDRWMTNARMTHYQSLLLNERVSFAPPAILNPATLLPVESDDTPIHICSEILAEETGTRPDLRDQPLPGVPAWYTDGSSFIMDGRRQAGAAIVDNKRTVWASNLPEGTSAQKAELIALTQALRLAEGKSINIYTDSRYAFATAHVHGAIYKQRGWLTSAGKDIKNKEEILALLEAIHLPKRVAIIHCPGHQRGTDPVATGNRKADEAAKQAAQSTRILTETTKNAGKRTADGSEFEKRTADGSEFESPKKKAKVE

SEQ ID NO: 1701 - protein, 2129 aa, synthetic construct
MPAAKRVKLDGGDKKYSIGLDIGTNSVGWAVITDEYKVPSKKFKVLGNTDRHSIKKNLIGALLFDSGETAEATRLKRTARRRYTRRKNRICYLQEIFSNEMAKVDDSFFHRLEESFLVEEDKKHERHPIFGNIVDEVAYHEKYPTIYHLRKKLVDSTDKADLRLIYLALAHMIKFRGHFLIEGDLNPDNSDVDKLFIQLVQTYNQLFEENPINASGVDAKAILSARLSKSRRLENLIAQLPGEKKNGLFGNLIALSLGLTPNFKSNFDLAEDAKLQLSKDTYDDDLDNLLAQIGDQYADLFLAAKNLSDAILLSDILRVNTEITKAPLSASMIKRYDEHHQDLTLLKALVRQQLPEKYKEIFFDQSKNGYAGYIDGGASQEEFYKFIKPILEKMDGTEELLVKLNREDLLRKQRTFDNGSIPHQIHLGELHAILRRQEDFYPFLKDNREKIEKILTFRIPYYVGPLARGNSRFAWMTRKSEETITPWNFEEVVDKGASAQSFIERMTNFDKNLPNEKVLPKHSLLYEYFTVYNELTKVKYVTEGMRKPAFLSGEQKKAIVDLLFKTNRKVTVKQLKEDYFKKIECFDSVEISGVEDRFNASLGTYHDLLKIIKDKDFLDNEENEDILEDIVLTLTLFEDREMIEERLKTYAHLFDDKVMKQLKRRRYTGWGRLSRKLINGIRDKQSGKTILDFLKSDGFANRNFMQLIHDDSLTFKEDIQKAQVSGQGDSLHEHIANLAGSPAIKKGILQTVKVVDELVKVMGRHKPENIVIEMARENQTTQKGQKNSRERMKRIEEGIKELGSQILKEHPVENTQLQNEKLYLYYLQNGRDMYVDQELDINRLSDYDVDHIVPQSFLKDDSIDNKVLTRSDKARGKSDNVPSEEVVKKMKNYWRQLLNAKLITQRKFDNLTKAERGGLSELDKAGFIKRQLVETRQITKHVAQILDSRMNTKYDENDKLIREVKVITLKSKLVSDFRKDFQFYKVREINNYHHAHDAYLNAVVGTALIKKYPKLESEFVYGDYKVYDVRKMIAKSEQEIGKATAKYFFYSNIMNFFKTEITLANGEIRKRPLIETNGETGEIVWDKGRDFATVRKVLSMPQVNIVKKTEVQTGGFSKESILPKRNSDKLIARKKDWDPKKYGGFDSPTVAYSVLVVAKVEKGKSKKLKSVKELLGITIMERSSFEKNPIDFLEAKGYKEVKKDLIIKLPKYSLFELENGRKRMLASAGELQKGNELALPSKYVNFLYLASHYEKLKGSPEDNEQKQLFVEQHKHYLDEIIEQISEFSKRVILADANLDKVLSAYNKHRDKPIREQAENIIHLFTLTNLGAPAAFKYFDTTIDRKRYTSTKEVLDATLIHQSITGLYETRIDLSQLGGDGGPAPAPAPAPAPAPGGLLGRDLLTKLKAQIQFSTEGPQVTWEDRPAMCLVLNLEEEYRLHEKPVPPSIDPSWLQLFPMVWAEKAGMGLANQVPPVVVELKSDASPVAVRQYPMSKEAREGIRPHIQRFLDLGILVPCQSPWNTPLLPVKKPGTNDYRPVQDLREVNKRVQDIHPTVPNPYNLLSSLPPSHTWYSVLDLKDAFFCLKLHPNSQPLFAFEWRDPEKGNTGQLTWTRLPQGFKNSPTLFNEALHRDLASFRALNPQVVMLQYVDDLLVAAPTYRDCKEGTRRLLQELSKLGYRVSAKKAQLCREEVTYLGYLLKGGKRWLTPARKATVMKIPTPTTPRQVREFLGKAGFCRLFIPGFASLAAPLYPLTRPKVPFTWTEAHQEAFGRIKEALLSAPALALPDLTKPFALYVDEKEGVARGVLTQTLGPWRRPVAYLSKKLDPVASGWPTCLKAIAAVALLLKDADKLTLGQNVLVIAPHNLESIVRQPPDRWMTNARMTHYQSLLLNERVSFAPPAILNPATLLPVESDDTPIHICSEILAEETGTRPDLRDQPLPGVPAWYTDGSSFIMDGRRQAGAAIVDNKRTVWASNLPEGTSAQKAELIALTQALRLAEGKSINIYTDSRYAFATAHVHGAIYKQRGWLTSAGKDIKNKEEILALLEAIHLPKRVAIIHCPGHQRGTDPVATGNRKADEAAKQAAQSTRILTETTKNAGKRTADGSEFEKRTADGSEFESPKKKAKVE

SEQ ID NO: 1702 - protein, 2127 aa, synthetic construct
MPAAKRVKLDGGDKKYSIGLDIGTNSVGWAVITDEYKVPSKKFKVLGNTDRHSIKKNLIGALLFDSGETAEATRLKRTARRRYTRRKNRICYLQEIFSNEMAKVDDSFFHRLEESFLVEEDKKHERHPIFGNIVDEVAYHEKYPTIYHLRKKLVDSTDKADLRLIYLALAHMIKFRGHFLIEGDLNPDNSDVDKLFIQLVQTYNQLFEENPINASGVDAKAILSARLSKSRRLENLIAQLPGEKKNGLFGNLIALSLGLTPNFKSNFDLAEDAKLQLSKDTYDDDLDNLLAQIGDQYADLFLAAKNLSDAILLSDILRVNTEITKAPLSASMIKRYDEHHQDLTLLKALVRQQLPEKYKEIFFDQSKNGYAGYIDGGASQEEFYKFIKPILEKMDGTEELLVKLNREDLLRKQRTFDNGSIPHQIHLGELHAILRRQEDFYPFLKDNREKIEKILTFRIPYYVGPLARGNSRFAWMTRKSEETITPWNFEEVVDKGASAQSFIERMTNFDKNLPNEKVLPKHSLLYEYFTVYNELTKVKYVTEGMRKPAFLSGEQKKAIVDLLFKTNRKVTVKQLKEDYFKKIECFDSVEISGVEDRFNASLGTYHDLLKIIKDKDFLDNEENEDILEDIVLTLTLFEDREMIEERLKTYAHLFDDKVMKQLKRRRYTGWGRLSRKLINGIRDKQSGKTILDFLKSDGFANRNFMQLIHDDSLTFKEDIQKAQVSGQGDSLHEHIANLAGSPAIKKGILQTVKVVDELVKVMGRHKPENIVIEMARENQTTQKGQKNSRERMKRIEEGIKELGSQILKEHPVENTQLQNEKLYLYYLQNGRDMYVDQELDINRLSDYDVDHIVPQSFLKDDSIDNKVLTRSDKARGKSDNVPSEEVVKKMKNYWRQLLNAKLITQRKFDNLTKAERGGLSELDKAGFIKRQLVETRQITKHVAQILDSRMNTKYDENDKLIREVKVITLKSKLVSDFRKDFQFYKVREINNYHHAHDAYLNAVVGTALIKKYPKLESEFVYGDYKVYDVRKMIAKSEQEIGKATAKYFFYSNIMNFFKTEITLANGEIRKRPLIETNGETGEIVWDKGRDFATVRKVLSMPQVNIVKKTEVQTGGFSKESILPKRNSDKLIARKKDWDPKKYGGFDSPTVAYSVLVVAKVEKGKSKKLKSVKELLGITIMERSSFEKNPIDFLEAKGYKEVKKDLIIKLPKYSLFELENGRKRMLASAGELQKGNELALPSKYVNFLYLASHYEKLKGSPEDNEQKQLFVEQHKHYLDEIIEQISEFSKRVILADANLDKVLSAYNKHRDKPIREQAENIIHLFTLTNLGAPAAFKYFDTTIDRKRYTSTKEVLDATLIHQSITGLYETRIDLSQLGGDGGGGGEAAAKGGSGGLLGRDLLTKLKAQIQFSTEGPQVTWEDRPAMCLVLNLEEEYRLHEKPVPPSIDPSWLQLFPMVWAEKAGMGLANQVPPVVVELKSDASPVAVRQYPMSKEAREGIRPHIQRFLDLGILVPCQSPWNTPLLPVKKPGTNDYRPVQDLREVNKRVQDIHPTVPNPYNLLSSLPPSHTWYSVLDLKDAFFCLKLHPNSQPLFAFEWRDPEKGNTGQLTWTRLPQGFKNSPTLFNEALHRDLASFRALNPQVVMLQYVDDLLVAAPTYRDCKEGTRRLLQELSKLGYRVSAKKAQLCREEVTYLGYLLKGGKRWLTPARKATVMKIPTPTTPRQVREFLGKAGFCRLFIPGFASLAAPLYPLTRPKVPFTWTEAHQEAFGRIKEALLSAPALALPDLTKPFALYVDEKEGVARGVLTQTLGPWRRPVAYLSKKLDPVASGWPTCLKAIAAVALLLKDADKLTLGQNVLVIAPHNLESIVRQPPDRWMTNARMTHYQSLLLNERVSFAPPAILNPATLLPVESDDTPIHICSEILAEETGTRPDLRDQPLPGVPAWYTDGSSFIMDGRRQAGAAIVDNKRTVWASNLPEGTSAQKAELIALTQALRLAEGKSINIYTDSRYAFATAHVHGAIYKQRGWLTSAGKDIKNKEEILALLEAIHLPKRVAIIHCPGHQRGTDPVATGNRKADEAAKQAAQSTRILTETTKNAGKRTADGSEFEKRTADGSEFESPKKKAKVE

SEQ ID NO: 1703 - protein, 2122 aa, synthetic construct
MPAAKRVKLDGGDKKYSIGLDIGTNSVGWAVITDEYKVPSKKFKVLGNTDRHSIKKNLIGALLFDSGETAEATRLKRTARRRYTRRKNRICYLQEIFSNEMAKVDDSFFHRLEESFLVEEDKKHERHPIFGNIVDEVAYHEKYPTIYHLRKKLVDSTDKADLRLIYLALAHMIKFRGHFLIEGDLNPDNSDVDKLFIQLVQTYNQLFEENPINASGVDAKAILSARLSKSRRLENLIAQLPGEKKNGLFGNLIALSLGLTPNFKSNFDLAEDAKLQLSKDTYDDDLDNLLAQIGDQYADLFLAAKNLSDAILLSDILRVNTEITKAPLSASMIKRYDEHHQDLTLLKALVRQQLPEKYKEIFFDQSKNGYAGYIDGGASQEEFYKFIKPILEKMDGTEELLVKLNREDLLRKQRTFDNGSIPHQIHLGELHAILRRQEDFYPFLKDNREKIEKILTFRIPYYVGPLARGNSRFAWMTRKSEETITPWNFEEVVDKGASAQSFIERMTNFDKNLPNEKVLPKHSLLYEYFTVYNELTKVKYVTEGMRKPAFLSGEQKKAIVDLLFKTNRKVTVKQLKEDYFKKIECFDSVEISGVEDRFNASLGTYHDLLKIIKDKDFLDNEENEDILEDIVLTLTLFEDREMIEERLKTYAHLFDDKVMKQLKRRRYTGWGRLSRKLINGIRDKQSGKTILDFLKSDGFANRNFMQLIHDDSLTFKEDIQKAQVSGQGDSLHEHIANLAGSPAIKKGILQTVKVVDELVKVMGRHKPENIVIEMARENQTTQKGQKNSRERMKRIEEGIKELGSQILKEHPVENTQLQNEKLYLYYLQNGRDMYVDQELDINRLSDYDVDHIVPQSFLKDDSIDNKVLTRSDKARGKSDNVPSEEVVKKMKNYWRQLLNAKLITQRKFDNLTKAERGGLSELDKAGFIKRQLVETRQITKHVAQILDSRMNTKYDENDKLIREVKVITLKSKLVSDFRKDFQFYKVREINNYHHAHDAYLNAVVGTALIKKYPKLESEFVYGDYKVYDVRKMIAKSEQEIGKATAKYFFYSNIMNFFKTEITLANGEIRKRPLIETNGETGEIVWDKGRDFATVRKVLSMPQVNIVKKTEVQTGGFSKESILPKRNSDKLIARKKDWDPKKYGGFDSPTVAYSVLVVAKVEKGKSKKLKSVKELLGITIMERSSFEKNPIDFLEAKGYKEVKKDLIIKLPKYSLFELENGRKRMLASAGELQKGNELALPSKYVNFLYLASHYEKLKGSPEDNEQKQLFVEQHKHYLDEIIEQISEFSKRVILADANLDKVLSAYNKHRDKPIREQAENIIHLFTLTNLGAPAAFKYFDTTIDRKRYTSTKEVLDATLIHQSITGLYETRIDLSQLGGDGGGGSPAPGGLLGRDLLTKLKAQIQFSTEGPQVTWEDRPAMCLVLNLEEEYRLHEKPVPPSIDPSWLQLFPMVWAEKAGMGLANQVPPVVVELKSDASPVAVRQYPMSKEAREGIRPHIQRFLDLGILVPCQSPWNTPLLPVKKPGTNDYRPVQDLREVNKRVQDIHPTVPNPYNLLSSLPPSHTWYSVLDLKDAFFCLKLHPNSQPLFAFEWRDPEKGNTGQLTWTRLPQGFKNSPTLFNEALHRDLASFRALNPQVVMLQYVDDLLVAAPTYRDCKEGTRRLLQELSKLGYRVSAKKAQLCREEVTYLGYLLKGGKRWLTPARKATVMKIPTPTTPRQVREFLGKAGFCRLFIPGFASLAAPLYPLTRPKVPFTWTEAHQEAFGRIKEALLSAPALALPDLTKPFALYVDEKEGVARGVLTQTLGPWRRPVAYLSKKLDPVASGWPTCLKAIAAVALLLKDADKLTLGQNVLVIAPHNLESIVRQPPDRWMTNARMTHYQSLLLNERVSFAPPAILNPATLLPVESDDTPIHICSEILAEETGTRPDLRDQPLPGVPAWYTDGSSFIMDGRRQAGAAIVDNKRTVWASNLPEGTSAQKAELIALTQALRLAEGKSINIYTDSRYAFATAHVHGAIYKQRGWLTSAGKDIKNKEEILALLEAIHLPKRVAIIHCPGHQRGTDPVATGNRKADEAAKQAAQSTRILTETTKNAGKRTADGSEFEKRTADGSEFESPKKKAKVE

SEQ ID NO: 1704 - protein, 2127 aa, synthetic construct
MPAAKRVKLDGGDKKYSIGLDIGTNSVGWAVITDEYKVPSKKFKVLGNTDRHSIKKNLIGALLFDSGETAEATRLKRTARRRYTRRKNRICYLQEIFSNEMAKVDDSFFHRLEESFLVEEDKKHERHPIFGNIVDEVAYHEKYPTIYHLRKKLVDSTDKADLRLIYLALAHMIKFRGHFLIEGDLNPDNSDVDKLFIQLVQTYNQLFEENPINASGVDAKAILSARLSKSRRLENLIAQLPGEKKNGLFGNLIALSLGLTPNFKSNFDLAEDAKLQLSKDTYDDDLDNLLAQIGDQYADLFLAAKNLSDAILLSDILRVNTEITKAPLSASMIKRYDEHHQDLTLLKALVRQQLPEKYKEIFFDQSKNGYAGYIDGGASQEEFYKFIKPILEKMDGTEELLVKLNREDLLRKQRTFDNGSIPHQIHLGELHAILRRQEDFYPFLKDNREKIEKILTFRIPYYVGPLARGNSRFAWMTRKSEETITPWNFEEVVDKGASAQSFIERMTNFDKNLPNEKVLPKHSLLYEYFTVYNELTKVKYVTEGMRKPAFLSGEQKKAIVDLLFKTNRKVTVKQLKEDYFKKIECFDSVEISGVEDRFNASLGTYHDLLKIIKDKDFLDNEENEDILEDIVLTLTLFEDREMIEERLKTYAHLFDDKVMKQLKRRRYTGWGRLSRKLINGIRDKQSGKTILDFLKSDGFANRNFMQLIHDDSLTFKEDIQKAQVSGQGDSLHEHIANLAGSPAIKKGILQTVKVVDELVKVMGRHKPENIVIEMARENQTTQKGQKNSRERMKRIEEGIKELGSQILKEHPVENTQLQNEKLYLYYLQNGRDMYVDQELDINRLSDYDVDHIVPQSFLKDDSIDNKVLTRSDKARGKSDNVPSEEVVKKMKNYWRQLLNAKLITQRKFDNLTKAERGGLSELDKAGFIKRQLVETRQITKHVAQILDSRMNTKYDENDKLIREVKVITLKSKLVSDFRKDFQFYKVREINNYHHAHDAYLNAVVGTALIKKYPKLESEFVYGDYKVYDVRKMIAKSEQEIGKATAKYFFYSNIMNFFKTEITLANGEIRKRPLIETNGETGEIVWDKGRDFATVRKVLSMPQVNIVKKTEVQTGGFSKESILPKRNSDKLIARKKDWDPKKYGGFDSPTVAYSVLVVAKVEKGKSKKLKSVKELLGITIMERSSFEKNPIDFLEAKGYKEVKKDLIIKLPKYSLFELENGRKRMLASAGELQKGNELALPSKYVNFLYLASHYEKLKGSPEDNEQKQLFVEQHKHYLDEIIEQISEFSKRVILADANLDKVLSAYNKHRDKPIREQAENIIHLFTLTNLGAPAAFKYFDTTIDRKRYTSTKEVLDATLIHQSITGLYETRIDLSQLGGDGGGGSEAAAKPAPGGLLGRDLLTKLKAQIQFSTEGPQVTWEDRPAMCLVLNLEEEYRLHEKPVPPSIDPSWLQLFPMVWAEKAGMGLANQVPPVVVELKSDASPVAVRQYPMSKEAREGIRPHIQRFLDLGILVPCQSPWNTPLLPVKKPGTNDYRPVQDLREVNKRVQDIHPTVPNPYNLLSSLPPSHTWYSVLDLKDAFFCLKLHPNSQPLFAFEWRDPEKGNTGQLTWTRLPQGFKNSPTLFNEALHRDLASFRALNPQVVMLQYVDDLLVAAPTYRDCKEGTRRLLQELSKLGYRVSAKKAQLCREEVTYLGYLLKGGKRWLTPARKATVMKIPTPTTPRQVREFLGKAGFCRLFIPGFASLAAPLYPLTRPKVPFTWTEAHQEAFGRIKEALLSAPALALPDLTKPFALYVDEKEGVARGVLTQTLGPWRRPVAYLSKKLDPVASGWPTCLKAIAAVALLLKDADKLTLGQNVLVIAPHNLESIVRQPPDRWMTNARMTHYQSLLLNERVSFAPPAILNPATLLPVESDDTPIHICSEILAEETGTRPDLRDQPLPGVPAWYTDGSSFIMDGRRQAGAAIVDNKRTVWASNLPEGTSAQKAELIALTQALRLAEGKSINIYTDSRYAFATAHVHGAIYKQRGWLTSAGKDIKNKEEILALLEAIHLPKRVAIIHCPGHQRGTDPVATGNRKADEAAKQAAQSTRILTETTKNAGKRTADGSEFEKRTADGSEFESPKKKAKVE

SEQ ID NO: 1705 - protein, 2121 aa, synthetic construct
MPAAKRVKLDGGDKKYSIGLDIGTNSVGWAVITDEYKVPSKKFKVLGNTDRHSIKKNLIGALLFDSGETAEATRLKRTARRRYTRRKNRICYLQEIFSNEMAKVDDSFFHRLEESFLVEEDKKHERHPIFGNIVDEVAYHEKYPTIYHLRKKLVDSTDKADLRLIYLALAHMIKFRGHFLIEGDLNPDNSDVDKLFIQLVQTYNQLFEENPINASGVDAKAILSARLSKSRRLENLIAQLPGEKKNGLFGNLIALSLGLTPNFKSNFDLAEDAKLQLSKDTYDDDLDNLLAQIGDQYADLFLAAKNLSDAILLSDILRVNTEITKAPLSASMIKRYDEHHQDLTLLKALVRQQLPEKYKEIFFDQSKNGYAGYIDGGASQEEFYKFIKPILEKMDGTEELLVKLNREDLLRKQRTFDNGSIPHQIHLGELHAILRRQEDFYPFLKDNREKIEKILTFRIPYYVGPLARGNSRFAWMTRKSEETITPWNFEEVVDKGASAQSFIERMTNFDKNLPNEKVLPKHSLLYEYFTVYNELTKVKYVTEGMRKPAFLSGEQKKAIVDLLFKTNRKVTVKQLKEDYFKKIECFDSVEISGVEDRFNASLGTYHDLLKIIKDKDFLDNEENEDILEDIVLTLTLFEDREMIEERLKTYAHLFDDKVMKQLKRRRYTGWGRLSRKLINGIRDKQSGKTILDFLKSDGFANRNFMQLIHDDSLTFKEDIQKAQVSGQGDSLHEHIANLAGSPAIKKGILQTVKVVDELVKVMGRHKPENIVIEMARENQTTQKGQKNSRERMKRIEEGIKELGSQILKEHPVENTQLQNEKLYLYYLQNGRDMYVDQELDINRLSDYDVDHIVPQSFLKDDSIDNKVLTRSDKARGKSDNVPSEEVVKKMKNYWRQLLNAKLITQRKFDNLTKAERGGLSELDKAGFIKRQLVETRQITKHVAQILDSRMNTKYDENDKLIREVKVITLKSKLVSDFRKDFQFYKVREINNYHHAHDAYLNAVVGTALIKKYPKLESEFVYGDYKVYDVRKMIAKSEQEIGKATAKYFFYSNIMNFFKTEITLANGEIRKRPLIETNGETGEIVWDKGRDFATVRKVLSMPQVNIVKKTEVQTGGFSKESILPKRNSDKLIARKKDWDPKKYGGFDSPTVAYSVLVVAKVEKGKSKKLKSVKELLGITIMERSSFEKNPIDFLEAKGYKEVKKDLIIKLPKYSLFELENGRKRMLASAGELQKGNELALPSKYVNFLYLASHYEKLKGSPEDNEQKQLFVEQHKHYLDEIIEQISEFSKRVILADANLDKVLSAYNKHRDKPIREQAENIIHLFTLTNLGAPAAFKYFDTTIDRKRYTSTKEVLDATLIHQSITGLYETRIDLSQLGGDGGGGGGSGGLLGRDLLTKLKAQIQFSTEGPQVTWEDRPAMCLVLNLEEEYRLHEKPVPPSIDPSWLQLFPMVWAEKAGMGLANQVPPVVVELKSDASPVAVRQYPMSKEAREGIRPHIQRFLDLGILVPCQSPWNTPLLPVKKPGTNDYRPVQDLREVNKRVQDIHPTVPNPYNLLSSLPPSHTWYSVLDLKDAFFCLKLHPNSQPLFAFEWRDPEKGNTGQLTWTRLPQGFKNSPTLFNEALHRDLASFRALNPQVVMLQYVDDLLVAAPTYRDCKEGTRRLLQELSKLGYRVSAKKAQLCREEVTYLGYLLKGGKRWLTPARKATVMKIPTPTTPRQVREFLGKAGFCRLFIPGFASLAAPLYPLTRPKVPFTWTEAHQEAFGRIKEALLSAPALALPDLTKPFALYVDEKEGVARGVLTQTLGPWRRPVAYLSKKLDPVASGWPTCLKAIAAVALLLKDADKLTLGQNVLVIAPHNLESIVRQPPDRWMTNARMTHYQSLLLNERVSFAPPAILNPATLLPVESDDTPIHICSEILAEETGTRPDLRDQPLPGVPAWYTDGSSFIMDGRRQAGAAIVDNKRTVWASNLPEGTSAQKAELIALTQALRLAEGKSINIYTDSRYAFATAHVHGAIYKQRGWLTSAGKDIKNKEEILALLEAIHLPKRVAIIHCPGHQRGTDPVATGNRKADEAAKQAAQSTRILTETTKNAGKRTADGSEFEKRTADGSEFESPKKKAKVE

SEQ ID NO: 1706 - protein, 2146 aa, synthetic construct
MPAAKRVKLDGGDKKYSIGLDIGTNSVGWAVITDEYKVPSKKFKVLGNTDRHSIKKNLIGALLFDSGETAEATRLKRTARRRYTRRKNRICYLQEIFSNEMAKVDDSFFHRLEESFLVEEDKKHERHPIFGNIVDEVAYHEKYPTIYHLRKKLVDSTDKADLRLIYLALAHMIKFRGHFLIEGDLNPDNSDVDKLFIQLVQTYNQLFEENPINASGVDAKAILSARLSKSRRLENLIAQLPGEKKNGLFGNLIALSLGLTPNFKSNFDLAEDAKLQLSKDTYDDDLDNLLAQIGDQYADLFLAAKNLSDAILLSDILRVNTEITKAPLSASMIKRYDEHHQDLTLLKALVRQQLPEKYKEIFFDQSKNGYAGYIDGGASQEEFYKFIKPILEKMDGTEELLVKLNREDLLRKQRTFDNGSIPHQIHLGELHAILRRQEDFYPFLKDNREKIEKILTFRIPYYVGPLARGNSRFAWMTRKSEETITPWNFEEVVDKGASAQSFIERMTNFDKNLPNEKVLPKHSLLYEYFTVYNELTKVKYVTEGMRKPAFLSGEQKKAIVDLLFKTNRKVTVKQLKEDYFKKIECFDSVEISGVEDRFNASLGTYHDLLKIIKDKDFLDNEENEDILEDIVLTLTLFEDREMIEERLKTYAHLFDDKVMKQLKRRRYTGWGRLSRKLINGIRDKQSGKTILDFLKSDGFANRNFMQLIHDDSLTFKEDIQKAQVSGQGDSLHEHIANLAGSPAIKKGILQTVKVVDELVKVMGRHKPENIVIEMARENQTTQKGQKNSRERMKRIEEGIKELGSQILKEHPVENTQLQNEKLYLYYLQNGRDMYVDQELDINRLSDYDVDHIVPQSFLKDDSIDNKVLTRSDKARGKSDNVPSEEVVKKMKNYWRQLLNAKLITQRKFDNLTKAERGGLSELDKAGFIKRQLVETRQITKHVAQILDSRMNTKYDENDKLIREVKVITLKSKLVSDFRKDFQFYKVREINNYHHAHDAYLNAVVGTALIKKYPKLESEFVYGDYKVYDVRKMIAKSEQEIGKATAKYFFYSNIMNFFKTEITLANGEIRKRPLIETNGETGEIVWDKGRDFATVRKVLSMPQVNIVKKTEVQTGGFSKESILPKRNSDKLIARKKDWDPKKYGGFDSPTVAYSVLVVAKVEKGKSKKLKSVKELLGITIMERSSFEKNPIDFLEAKGYKEVKKDLIIKLPKYSLFELENGRKRMLASAGELQKGNELALPSKYVNFLYLASHYEKLKGSPEDNEQKQLFVEQHKHYLDEIIEQISEFSKRVILADANLDKVLSAYNKHRDKPIREQAENIIHLFTLTNLGAPAAFKYFDTTIDRKRYTSTKEVLDATLIHQSITGLYETRIDLSQLGGDGGEAAAKEAAAKEAAAKEAAAKEAAAKEAAAKGGLLGRDLLTKLKAQIQFSTEGPQVTWEDRPAMCLVLNLEEEYRLHEKPVPPSIDPSWLQLFPMVWAEKAGMGLANQVPPVVVELKSDASPVAVRQYPMSKEAREGIRPHIQRFLDLGILVPCQSPWNTPLLPVKKPGTNDYRPVQDLREVNKRVQDIHPTVPNPYNLLSSLPPSHTWYSVLDLKDAFFCLKLHPNSQPLFAFEWRDPEKGNTGQLTWTRLPQGFKNSPTLFNEALHRDLASFRALNPQVVMLQYVDDLLVAAPTYRDCKEGTRRLLQELSKLGYRVSAKKAQLCREEVTYLGYLLKGGKRWLTPARKATVMKIPTPTTPRQVREFLGKAGFCRLFIPGFASLAAPLYPLTRPKVPFTWTEAHQEAFGRIKEALLSAPALALPDLTKPFALYVDEKEGVARGVLTQTLGPWRRPVAYLSKKLDPVASGWPTCLKAIAAVALLLKDADKLTLGQNVLVIAPHNLESIVRQPPDRWMTNARMTHYQSLLLNERVSFAPPAILNPATLLPVESDDTPIHICSEILAEETGTRPDLRDQPLPGVPAWYTDGSSFIMDGRRQAGAAIVDNKRTVWASNLPEGTSAQKAELIALTQALRLAEGKSINIYTDSRYAFATAHVHGAIYKQRGWLTSAGKDIKNKEEILALLEAIHLPKRVAIIHCPGHQRGTDPVATGNRKADEAAKQAAQSTRILTETTKNAGKRTADGSEFEKRTADGSEFESPKKKAKVE

SEQ ID NO: 1707 - protein, 2122 aa, synthetic construct
MPAAKRVKLDGGDKKYSIGLDIGTNSVGWAVITDEYKVPSKKFKVLGNTDRHSIKKNLIGALLFDSGETAEATRLKRTARRRYTRRKNRICYLQEIFSNEMAKVDDSFFHRLEESFLVEEDKKHERHPIFGNIVDEVAYHEKYPTIYHLRKKLVDSTDKADLRLIYLALAHMIKFRGHFLIEGDLNPDNSDVDKLFIQLVQTYNQLFEENPINASGVDAKAILSARLSKSRRLENLIAQLPGEKKNGLFGNLIALSLGLTPNFKSNFDLAEDAKLQLSKDTYDDDLDNLLAQIGDQYADLFLAAKNLSDAILLSDILRVNTEITKAPLSASMIKRYDEHHQDLTLLKALVRQQLPEKYKEIFFDQSKNGYAGYIDGGASQEEFYKFIKPILEKMDGTEELLVKLNREDLLRKQRTFDNGSIPHQIHLGELHAILRRQEDFYPFLKDNREKIEKILTFRIPYYVGPLARGNSRFAWMTRKSEETITPWNFEEVVDKGASAQSFIERMTNFDKNLPNEKVLPKHSLLYEYFTVYNELTKVKYVTEGMRKPAFLSGEQKKAIVDLLFKTNRKVTVKQLKEDYFKKIECFDSVEISGVEDRFNASLGTYHDLLKIIKDKDFLDNEENEDILEDIVLTLTLFEDREMIEERLKTYAHLFDDKVMKQLKRRRYTGWGRLSRKLINGIRDKQSGKTILDFLKSDGFANRNFMQLIHDDSLTFKEDIQKAQVSGQGDSLHEHIANLAGSPAIKKGILQTVKVVDELVKVMGRHKPENIVIEMARENQTTQKGQKNSRERMKRIEEGIKELGSQILKEHPVENTQLQNEKLYLYYLQNGRDMYVDQELDINRLSDYDVDHIVPQSFLKDDSIDNKVLTRSDKARGKSDNVPSEEVVKKMKNYWRQLLNAKLITQRKFDNLTKAERGGLSELDKAGFIKRQLVETRQITKHVAQILDSRMNTKYDENDKLIREVKVITLKSKLVSDFRKDFQFYKVREINNYHHAHDAYLNAVVGTALIKKYPKLESEFVYGDYKVYDVRKMIAKSEQEIGKATAKYFFYSNIMNFFKTEITLANGEIRKRPLIETNGETGEIVWDKGRDFATVRKVLSMPQVNIVKKTEVQTGGFSKESILPKRNSDKLIARKKDWDPKKYGGFDSPTVAYSVLVVAKVEKGKSKKLKSVKELLGITIMERSSFEKNPIDFLEAKGYKEVKKDLIIKLPKYSLFELENGRKRMLASAGELQKGNELALPSKYVNFLYLASHYEKLKGSPEDNEQKQLFVEQHKHYLDEIIEQISEFSKRVILADANLDKVLSAYNKHRDKPIREQAENIIHLFTLTNLGAPAAFKYFDTTIDRKRYTSTKEVLDATLIHQSITGLYETRIDLSQLGGDGGGGGGGGGGLLGRDLLTKLKAQIQFSTEGPQVTWEDRPAMCLVLNLEEEYRLHEKPVPPSIDPSWLQLFPMVWAEKAGMGLANQVPPVVVELKSDASPVAVRQYPMSKEAREGIRPHIQRFLDLGILVPCQSPWNTPLLPVKKPGTNDYRPVQDLREVNKRVQDIHPTVPNPYNLLSSLPPSHTWYSVLDLKDAFFCLKLHPNSQPLFAFEWRDPEKGNTGQLTWTRLPQGFKNSPTLFNEALHRDLASFRALNPQVVMLQYVDDLLVAAPTYRDCKEGTRRLLQELSKLGYRVSAKKAQLCREEVTYLGYLLKGGKRWLTPARKATVMKIPTPTTPRQVREFLGKAGFCRLFIPGFASLAAPLYPLTRPKVPFTWTEAHQEAFGRIKEALLSAPALALPDLTKPFALYVDEKEGVARGVLTQTLGPWRRPVAYLSKKLDPVASGWPTCLKAIAAVALLLKDADKLTLGQNVLVIAPHNLESIVRQPPDRWMTNARMTHYQSLLLNERVSFAPPAILNPATLLPVESDDTPIHICSEILAEETGTRPDLRDQPLPGVPAWYTDGSSFIMDGRRQAGAAIVDNKRTVWASNLPEGTSAQKAELIALTQALRLAEGKSINIYTDSRYAFATAHVHGAIYKQRGWLTSAGKDIKNKEEILALLEAIHLPKRVAIIHCPGHQRGTDPVATGNRKADEAAKQAAQSTRILTETTKNAGKRTADGSEFEKRTADGSEFESPKKKAKVE

SEQ ID NO: 1708 - protein, 2127 aa, synthetic construct
MPAAKRVKLDGGDKKYSIGLDIGTNSVGWAVITDEYKVPSKKFKVLGNTDRHSIKKNLIGALLFDSGETAEATRLKRTARRRYTRRKNRICYLQEIFSNEMAKVDDSFFHRLEESFLVEEDKKHERHPIFGNIVDEVAYHEKYPTIYHLRKKLVDSTDKADLRLIYLALAHMIKFRGHFLIEGDLNPDNSDVDKLFIQLVQTYNQLFEENPINASGVDAKAILSARLSKSRRLENLIAQLPGEKKNGLFGNLIALSLGLTPNFKSNFDLAEDAKLQLSKDTYDDDLDNLLAQIGDQYADLFLAAKNLSDAILLSDILRVNTEITKAPLSASMIKRYDEHHQDLTLLKALVRQQLPEKYKEIFFDQSKNGYAGYIDGGASQEEFYKFIKPILEKMDGTEELLVKLNREDLLRKQRTFDNGSIPHQIHLGELHAILRRQEDFYPFLKDNREKIEKILTFRIPYYVGPLARGNSRFAWMTRKSEETITPWNFEEVVDKGASAQSFIERMTNFDKNLPNEKVLPKHSLLYEYFTVYNELTKVKYVTEGMRKPAFLSGEQKKAIVDLLFKTNRKVTVKQLKEDYFKKIECFDSVEISGVEDRFNASLGTYHDLLKIIKDKDFLDNEENEDILEDIVLTLTLFEDREMIEERLKTYAHLFDDKVMKQLKRRRYTGWGRLSRKLINGIRDKQSGKTILDFLKSDGFANRNFMQLIHDDSLTFKEDIQKAQVSGQGDSLHEHIANLAGSPAIKKGILQTVKVVDELVKVMGRHKPENIVIEMARENQTTQKGQKNSRERMKRIEEGIKELGSQILKEHPVENTQLQNEKLYLYYLQNGRDMYVDQELDINRLSDYDVDHIVPQSFLKDDSIDNKVLTRSDKARGKSDNVPSEEVVKKMKNYWRQLLNAKLITQRKFDNLTKAERGGLSELDKAGFIKRQLVETRQITKHVAQILDSRMNTKYDENDKLIREVKVITLKSKLVSDFRKDFQFYKVREINNYHHAHDAYLNAVVGTALIKKYPKLESEFVYGDYKVYDVRKMIAKSEQEIGKATAKYFFYSNIMNFFKTEITLANGEIRKRPLIETNGETGEIVWDKGRDFATVRKVLSMPQVNIVKKTEVQTGGFSKESILPKRNSDKLIARKKDWDPKKYGGFDSPTVAYSVLVVAKVEKGKSKKLKSVKELLGITIMERSSFEKNPIDFLEAKGYKEVKKDLIIKLPKYSLFELENGRKRMLASAGELQKGNELALPSKYVNFLYLASHYEKLKGSPEDNEQKQLFVEQHKHYLDEIIEQISEFSKRVILADANLDKVLSAYNKHRDKPIREQAENIIHLFTLTNLGAPAAFKYFDTTIDRKRYTSTKEVLDATLIHQSITGLYETRIDLSQLGGDGGGSSGGGEAAAKGGLLGRDLLTKLKAQIQFSTEGPQVTWEDRPAMCLVLNLEEEYRLHEKPVPPSIDPSWLQLFPMVWAEKAGMGLANQVPPVVVELKSDASPVAVRQYPMSKEAREGIRPHIQRFLDLGILVPCQSPWNTPLLPVKKPGTNDYRPVQDLREVNKRVQDIHPTVPNPYNLLSSLPPSHTWYSVLDLKDAFFCLKLHPNSQPLFAFEWRDPEKGNTGQLTWTRLPQGFKNSPTLFNEALHRDLASFRALNPQVVMLQYVDDLLVAAPTYRDCKEGTRRLLQELSKLGYRVSAKKAQLCREEVTYLGYLLKGGKRWLTPARKATVMKIPTPTTPRQVREFLGKAGFCRLFIPGFASLAAPLYPLTRPKVPFTWTEAHQEAFGRIKEALLSAPALALPDLTKPFALYVDEKEGVARGVLTQTLGPWRRPVAYLSKKLDPVASGWPTCLKAIAAVALLLKDADKLTLGQNVLVIAPHNLESIVRQPPDRWMTNARMTHYQSLLLNERVSFAPPAILNPATLLPVESDDTPIHICSEILAEETGTRPDLRDQPLPGVPAWYTDGSSFIMDGRRQAGAAIVDNKRTVWASNLPEGTSAQKAELIALTQALRLAEGKSINIYTDSRYAFATAHVHGAIYKQRGWLTSAGKDIKNKEEILALLEAIHLPKRVAIIHCPGHQRGTDPVATGNRKADEAAKQAAQSTRILTETTKNAGKRTADGSEFEKRTADGSEFESPKKKAKVE

SEQ ID NO: 1709 - protein, 2124 aa, synthetic construct
MPAAKRVKLDGGDKKYSIGLDIGTNSVGWAVITDEYKVPSKKFKVLGNTDRHSIKKNLIGALLFDSGETAEATRLKRTARRRYTRRKNRICYLQEIFSNEMAKVDDSFFHRLEESFLVEEDKKHERHPIFGNIVDEVAYHEKYPTIYHLRKKLVDSTDKADLRLIYLALAHMIKFRGHFLIEGDLNPDNSDVDKLFIQLVQTYNQLFEENPINASGVDAKAILSARLSKSRRLENLIAQLPGEKKNGLFGNLIALSLGLTPNFKSNFDLAEDAKLQLSKDTYDDDLDNLLAQIGDQYADLFLAAKNLSDAILLSDILRVNTEITKAPLSASMIKRYDEHHQDLTLLKALVRQQLPEKYKEIFFDQSKNGYAGYIDGGASQEEFYKFIKPILEKMDGTEELLVKLNREDLLRKQRTFDNGSIPHQIHLGELHAILRRQEDFYPFLKDNREKIEKILTFRIPYYVGPLARGNSRFAWMTRKSEETITPWNFEEVVDKGASAQSFIERMTNFDKNLPNEKVLPKHSLLYEYFTVYNELTKVKYVTEGMRKPAFLSGEQKKAIVDLLFKTNRKVTVKQLKEDYFKKIECFDSVEISGVEDRFNASLGTYHDLLKIIKDKDFLDNEENEDILEDIVLTLTLFEDREMIEERLKTYAHLFDDKVMKQLKRRRYTGWGRLSRKLINGIRDKQSGKTILDFLKSDGFANRNFMQLIHDDSLTFKEDIQKAQVSGQGDSLHEHIANLAGSPAIKKGILQTVKVVDELVKVMGRHKPENIVIEMARENQTTQKGQKNSRERMKRIEEGIKELGSQILKEHPVENTQLQNEKLYLYYLQNGRDMYVDQELDINRLSDYDVDHIVPQSFLKDDSIDNKVLTRSDKARGKSDNVPSEEVVKKMKNYWRQLLNAKLITQRKFDNLTKAERGGLSELDKAGFIKRQLVETRQITKHVAQILDSRMNTKYDENDKLIREVKVITLKSKLVSDFRKDFQFYKVREINNYHHAHDAYLNAVVGTALIKKYPKLESEFVYGDYKVYDVRKMIAKSEQEIGKATAKYFFYSNIMNFFKTEITLANGEIRKRPLIETNGETGEIVWDKGRDFATVRKVLSMPQVNIVKKTEVQTGGFSKESILPKRNSDKLIARKKDWDPKKYGGFDSPTVAYSVLVVAKVEKGKSKKLKSVKELLGITIMERSSFEKNPIDFLEAKGYKEVKKDLIIKLPKYSLFELENGRKRMLASAGELQKGNELALPSKYVNFLYLASHYEKLKGSPEDNEQKQLFVEQHKHYLDEIIEQISEFSKRVILADANLDKVLSAYNKHRDKPIREQAENIIHLFTLTNLGAPAAFKYFDTTIDRKRYTSTKEVLDATLIHQSITGLYETRIDLSQLGGDGGGSSEAAAKGGLLGRDLLTKLKAQIQFSTEGPQVTWEDRPAMCLVLNLEEEYRLHEKPVPPSIDPSWLQLFPMVWAEKAGMGLANQVPPVVVELKSDASPVAVRQYPMSKEAREGIRPHIQRFLDLGILVPCQSPWNTPLLPVKKPGTNDYRPVQDLREVNKRVQDIHPTVPNPYNLLSSLPPSHTWYSVLDLKDAFFCLKLHPNSQPLFAFEWRDPEKGNTGQLTWTRLPQGFKNSPTLFNEALHRDLASFRALNPQVVMLQYVDDLLVAAPTYRDCKEGTRRLLQELSKLGYRVSAKKAQLCREEVTYLGYLLKGGKRWLTPARKATVMKIPTPTTPRQVREFLGKAGFCRLFIPGFASLAAPLYPLTRPKVPFTWTEAHQEAFGRIKEALLSAPALALPDLTKPFALYVDEKEGVARGVLTQTLGPWRRPVAYLSKKLDPVASGWPTCLKAIAAVALLLKDADKLTLGQNVLVIAPHNLESIVRQPPDRWMTNARMTHYQSLLLNERVSFAPPAILNPATLLPVESDDTPIHICSEILAEETGTRPDLRDQPLPGVPAWYTDGSSFIMDGRRQAGAAIVDNKRTVWASNLPEGTSAQKAELIALTQALRLAEGKSINIYTDSRYAFATAHVHGAIYKQRGWLTSAGKDIKNKEEILALLEAIHLPKRVAIIHCPGHQRGTDPVATGNRKADEAAKQAAQSTRILTETTKNAGKRTADGSEFEKRTADGSEFESPKKKAKVE

SEQ ID NO: 1710 - protein, 2125 aa, synthetic construct
MPAAKRVKLDGGDKKYSIGLDIGTNSVGWAVITDEYKVPSKKFKVLGNTDRHSIKKNLIGALLFDSGETAEATRLKRTARRRYTRRKNRICYLQEIFSNEMAKVDDSFFHRLEESFLVEEDKKHERHPIFGNIVDEVAYHEKYPTIYHLRKKLVDSTDKADLRLIYLALAHMIKFRGHFLIEGDLNPDNSDVDKLFIQLVQTYNQLFEENPINASGVDAKAILSARLSKSRRLENLIAQLPGEKKNGLFGNLIALSLGLTPNFKSNFDLAEDAKLQLSKDTYDDDLDNLLAQIGDQYADLFLAAKNLSDAILLSDILRVNTEITKAPLSASMIKRYDEHHQDLTLLKALVRQQLPEKYKEIFFDQSKNGYAGYIDGGASQEEFYKFIKPILEKMDGTEELLVKLNREDLLRKQRTFDNGSIPHQIHLGELHAILRRQEDFYPFLKDNREKIEKILTFRIPYYVGPLARGNSRFAWMTRKSEETITPWNFEEVVDKGASAQSFIERMTNFDKNLPNEKVLPKHSLLYEYFTVYNELTKVKYVTEGMRKPAFLSGEQKKAIVDLLFKTNRKVTVKQLKEDYFKKIECFDSVEISGVEDRFNASLGTYHDLLKIIKDKDFLDNEENEDILEDIVLTLTLFEDREMIEERLKTYAHLFDDKVMKQLKRRRYTGWGRLSRKLINGIRDKQSGKTILDFLKSDGFANRNFMQLIHDDSLTFKEDIQKAQVSGQGDSLHEHIANLAGSPAIKKGILQTVKVVDELVKVMGRHKPENIVIEMARENQTTQKGQKNSRERMKRIEEGIKELGSQILKEHPVENTQLQNEKLYLYYLQNGRDMYVDQELDINRLSDYDVDHIVPQSFLKDDSIDNKVLTRSDKARGKSDNVPSEEVVKKMKNYWRQLLNAKLITQRKFDNLTKAERGGLSELDKAGFIKRQLVETRQITKHVAQILDSRMNTKYDENDKLIREVKVITLKSKLVSDFRKDFQFYKVREINNYHHAHDAYLNAVVGTALIKKYPKLESEFVYGDYKVYDVRKMIAKSEQEIGKATAKYFFYSNIMNFFKTEITLANGEIRKRPLIETNGETGEIVWDKGRDFATVRKVLSMPQVNIVKKTEVQTGGFSKESILPKRNSDKLIARKKDWDPKKYGGFDSPTVAYSVLVVAKVEKGKSKKLKSVKELLGITIMERSSFEKNPIDFLEAKGYKEVKKDLIIKLPKYSLFELENGRKRMLASAGELQKGNELALPSKYVNFLYLASHYEKLKGSPEDNEQKQLFVEQHKHYLDEIIEQISEFSKRVILADANLDKVLSAYNKHRDKPIREQAENIIHLFTLTNLGAPAAFKYFDTTIDRKRYTSTKEVLDATLIHQSITGLYETRIDLSQLGGDGGGGGPAPGGSGGLLGRDLLTKLKAQIQFSTEGPQVTWEDRPAMCLVLNLEEEYRLHEKPVPPSIDPSWLQLFPMVWAEKAGMGLANQVPPVVVELKSDASPVAVRQYPMSKEAREGIRPHIQRFLDLGILVPCQSPWNTPLLPVKKPGTNDYRPVQDLREVNKRVQDIHPTVPNPYNLLSSLPPSHTWYSVLDLKDAFFCLKLHPNSQPLFAFEWRDPEKGNTGQLTWTRLPQGFKNSPTLFNEALHRDLASFRALNPQVVMLQYVDDLLVAAPTYRDCKEGTRRLLQELSKLGYRVSAKKAQLCREEVTYLGYLLKGGKRWLTPARKATVMKIPTPTTPRQVREFLGKAGFCRLFIPGFASLAAPLYPLTRPKVPFTWTEAHQEAFGRIKEALLSAPALALPDLTKPFALYVDEKEGVARGVLTQTLGPWRRPVAYLSKKLDPVASGWPTCLKAIAAVALLLKDADKLTLGQNVLVIAPHNLESIVRQPPDRWMTNARMTHYQSLLLNERVSFAPPAILNPATLLPVESDDTPIHICSEILAEETGTRPDLRDQPLPGVPAWYTDGSSFIMDGRRQAGAAIVDNKRTVWASNLPEGTSAQKAELIALTQALRLAEGKSINIYTDSRYAFATAHVHGAIYKQRGWLTSAGKDIKNKEEILALLEAIHLPKRVAIIHCPGHQRGTDPVATGNRKADEAAKQAAQSTRILTETTKNAGKRTADGSEFEKRTADGSEFESPKKKAKVE

SEQ ID NO: 1711 - protein, 2127 aa, synthetic construct
MPAAKRVKLDGGDKKYSIGLDIGTNSVGWAVITDEYKVPSKKFKVLGNTDRHSIKKNLIGALLFDSGETAEATRLKRTARRRYTRRKNRICYLQEIFSNEMAKVDDSFFHRLEESFLVEEDKKHERHPIFGNIVDEVAYHEKYPTIYHLRKKLVDSTDKADLRLIYLALAHMIKFRGHFLIEGDLNPDNSDVDKLFIQLVQTYNQLFEENPINASGVDAKAILSARLSKSRRLENLIAQLPGEKKNGLFGNLIALSLGLTPNFKSNFDLAEDAKLQLSKDTYDDDLDNLLAQIGDQYADLFLAAKNLSDAILLSDILRVNTEITKAPLSASMIKRYDEHHQDLTLLKALVRQQLPEKYKEIFFDQSKNGYAGYIDGGASQEEFYKFIKPILEKMDGTEELLVKLNREDLLRKQRTFDNGSIPHQIHLGELHAILRRQEDFYPFLKDNREKIEKILTFRIPYYVGPLARGNSRFAWMTRKSEETITPWNFEEVVDKGASAQSFIERMTNFDKNLPNEKVLPKHSLLYEYFTVYNELTKVKYVTEGMRKPAFLSGEQKKAIVDLLFKTNRKVTVKQLKEDYFKKIECFDSVEISGVEDRFNASLGTYHDLLKIIKDKDFLDNEENEDILEDIVLTLTLFEDREMIEERLKTYAHLFDDKVMKQLKRRRYTGWGRLSRKLINGIRDKQSGKTILDFLKSDGFANRNFMQLIHDDSLTFKEDIQKAQVSGQGDSLHEHIANLAGSPAIKKGILQTVKVVDELVKVMGRHKPENIVIEMARENQTTQKGQKNSRERMKRIEEGIKELGSQILKEHPVENTQLQNEKLYLYYLQNGRDMYVDQELDINRLSDYDVDHIVPQSFLKDDSIDNKVLTRSDKARGKSDNVPSEEVVKKMKNYWRQLLNAKLITQRKFDNLTKAERGGLSELDKAGFIKRQLVETRQITKHVAQILDSRMNTKYDENDKLIREVKVITLKSKLVSDFRKDFQFYKVREINNYHHAHDAYLNAVVGTALIKKYPKLESEFVYGDYKVYDVRKMIAKSEQEIGKATAKYFFYSNIMNFFKTEITLANGEIRKRPLIETNGETGEIVWDKGRDFATVRKVLSMPQVNIVKKTEVQTGGFSKESILPKRNSDKLIARKKDWDPKKYGGFDSPTVAYSVLVVAKVEKGKSKKLKSVKELLGITIMERSSFEKNPIDFLEAKGYKEVKKDLIIKLPKYSLFELENGRKRMLASAGELQKGNELALPSKYVNFLYLASHYEKLKGSPEDNEQKQLFVEQHKHYLDEIIEQISEFSKRVILADANLDKVLSAYNKHRDKPIREQAENIIHLFTLTNLGAPAAFKYFDTTIDRKRYTSTKEVLDATLIHQSITGLYETRIDLSQLGGDGGGSSEAAAKPAPGGLLGRDLLTKLKAQIQFSTEGPQVTWEDRPAMCLVLNLEEEYRLHEKPVPPSIDPSWLQLFPMVWAEKAGMGLANQVPPVVVELKSDASPVAVRQYPMSKEAREGIRPHIQRFLDLGILVPCQSPWNTPLLPVKKPGTNDYRPVQDLREVNKRVQDIHPTVPNPYNLLSSLPPSHTWYSVLDLKDAFFCLKLHPNSQPLFAFEWRDPEKGNTGQLTWTRLPQGFKNSPTLFNEALHRDLASFRALNPQVVMLQYVDDLLVAAPTYRDCKEGTRRLLQELSKLGYRVSAKKAQLCREEVTYLGYLLKGGKRWLTPARKATVMKIPTPTTPRQVREFLGKAGFCRLFIPGFASLAAPLYPLTRPKVPFTWTEAHQEAFGRIKEALLSAPALALPDLTKPFALYVDEKEGVARGVLTQTLGPWRRPVAYLSKKLDPVASGWPTCLKAIAAVALLLKDADKLTLGQNVLVIAPHNLESIVRQPPDRWMTNARMTHYQSLLLNERVSFAPPAILNPATLLPVESDDTPIHICSEILAEETGTRPDLRDQPLPGVPAWYTDGSSFIMDGRRQAGAAIVDNKRTVWASNLPEGTSAQKAELIALTQALRLAEGKSINIYTDSRYAFATAHVHGAIYKQRGWLTSAGKDIKNKEEILALLEAIHLPKRVAIIHCPGHQRGTDPVATGNRKADEAAKQAAQSTRILTETTKNAGKRTADGSEFEKRTADGSEFESPKKKAKVE

SEQ ID NO: 1712 - protein, 2131 aa, synthetic construct
MPAAKRVKLDGGDKKYSIGLDIGTNSVGWAVITDEYKVPSKKFKVLGNTDRHSIKKNLIGALLFDSGETAEATRLKRTARRRYTRRKNRICYLQEIFSNEMAKVDDSFFHRLEESFLVEEDKKHERHPIFGNIVDEVAYHEKYPTIYHLRKKLVDSTDKADLRLIYLALAHMIKFRGHFLIEGDLNPDNSDVDKLFIQLVQTYNQLFEENPINASGVDAKAILSARLSKSRRLENLIAQLPGEKKNGLFGNLIALSLGLTPNFKSNFDLAEDAKLQLSKDTYDDDLDNLLAQIGDQYADLFLAAKNLSDAILLSDILRVNTEITKAPLSASMIKRYDEHHQDLTLLKALVRQQLPEKYKEIFFDQSKNGYAGYIDGGASQEEFYKFIKPILEKMDGTEELLVKLNREDLLRKQRTFDNGSIPHQIHLGELHAILRRQEDFYPFLKDNREKIEKILTFRIPYYVGPLARGNSRFAWMTRKSEETITPWNFEEVVDKGASAQSFIERMTNFDKNLPNEKVLPKHSLLYEYFTVYNELTKVKYVTEGMRKPAFLSGEQKKAIVDLLFKTNRKVTVKQLKEDYFKKIECFDSVEISGVEDRFNASLGTYHDLLKIIKDKDFLDNEENEDILEDIVLTLTLFEDREMIEERLKTYAHLFDDKVMKQLKRRRYTGWGRLSRKLINGIRDKQSGKTILDFLKSDGFANRNFMQLIHDDSLTFKEDIQKAQVSGQGDSLHEHIANLAGSPAIKKGILQTVKVVDELVKVMGRHKPENIVIEMARENQTTQKGQKNSRERMKRIEEGIKELGSQILKEHPVENTQLQNEKLYLYYLQNGRDMYVDQELDINRLSDYDVDHIVPQSFLKDDSIDNKVLTRSDKARGKSDNVPSEEVVKKMKNYWRQLLNAKLITQRKFDNLTKAERGGLSELDKAGFIKRQLVETRQITKHVAQILDSRMNTKYDENDKLIREVKVITLKSKLVSDFRKDFQFYKVREINNYHHAHDAYLNAVVGTALIKKYPKLESEFVYGDYKVYDVRKMIAKSEQEIGKATAKYFFYSNIMNFFKTEITLANGEIRKRPLIETNGETGEIVWDKGRDFATVRKVLSMPQVNIVKKTEVQTGGFSKESILPKRNSDKLIARKKDWDPKKYGGFDSPTVAYSVLVVAKVEKGKSKKLKSVKELLGITIMERSSFEKNPIDFLEAKGYKEVKKDLIIKLPKYSLFELENGRKRMLASAGELQKGNELALPSKYVNFLYLASHYEKLKGSPEDNEQKQLFVEQHKHYLDEIIEQISEFSKRVILADANLDKVLSAYNKHRDKPIREQAENIIHLFTLTNLGAPAAFKYFDTTIDRKRYTSTKEVLDATLIHQSITGLYETRIDLSQLGGDGGEAAAKGGGGSEAAAKGGLLGRDLLTKLKAQIQFSTEGPQVTWEDRPAMCLVLNLEEEYRLHEKPVPPSIDPSWLQLFPMVWAEKAGMGLANQVPPVVVELKSDASPVAVRQYPMSKEAREGIRPHIQRFLDLGILVPCQSPWNTPLLPVKKPGTNDYRPVQDLREVNKRVQDIHPTVPNPYNLLSSLPPSHTWYSVLDLKDAFFCLKLHPNSQPLFAFEWRDPEKGNTGQLTWTRLPQGFKNSPTLFNEALHRDLASFRALNPQVVMLQYVDDLLVAAPTYRDCKEGTRRLLQELSKLGYRVSAKKAQLCREEVTYLGYLLKGGKRWLTPARKATVMKIPTPTTPRQVREFLGKAGFCRLFIPGFASLAAPLYPLTRPKVPFTWTEAHQEAFGRIKEALLSAPALALPDLTKPFALYVDEKEGVARGVLTQTLGPWRRPVAYLSKKLDPVASGWPTCLKAIAAVALLLKDADKLTLGQNVLVIAPHNLESIVRQPPDRWMTNARMTHYQSLLLNERVSFAPPAILNPATLLPVESDDTPIHICSEILAEETGTRPDLRDQPLPGVPAWYTDGSSFIMDGRRQAGAAIVDNKRTVWASNLPEGTSAQKAELIALTQALRLAEGKSINIYTDSRYAFATAHVHGAIYKQRGWLTSAGKDIKNKEEILALLEAIHLPKRVAIIHCPGHQRGTDPVATGNRKADEAAKQAAQSTRILTETTKNAGKRTADGSEFEKRTADGSEFESPKKKAKVE

SEQ ID NO: 1713 - protein, 2127 aa, synthetic construct
MPAAKRVKLDGGDKKYSIGLDIGTNSVGWAVITDEYKVPSKKFKVLGNTDRHSIKKNLIGALLFDSGETAEATRLKRTARRRYTRRKNRICYLQEIFSNEMAKVDDSFFHRLEESFLVEEDKKHERHPIFGNIVDEVAYHEKYPTIYHLRKKLVDSTDKADLRLIYLALAHMIKFRGHFLIEGDLNPDNSDVDKLFIQLVQTYNQLFEENPINASGVDAKAILSARLSKSRRLENLIAQLPGEKKNGLFGNLIALSLGLTPNFKSNFDLAEDAKLQLSKDTYDDDLDNLLAQIGDQYADLFLAAKNLSDAILLSDILRVNTEITKAPLSASMIKRYDEHHQDLTLLKALVRQQLPEKYKEIFFDQSKNGYAGYIDGGASQEEFYKFIKPILEKMDGTEELLVKLNREDLLRKQRTFDNGSIPHQIHLGELHAILRRQEDFYPFLKDNREKIEKILTFRIPYYVGPLARGNSRFAWMTRKSEETITPWNFEEVVDKGASAQSFIERMTNFDKNLPNEKVLPKHSLLYEYFTVYNELTKVKYVTEGMRKPAFLSGEQKKAIVDLLFKTNRKVTVKQLKEDYFKKIECFDSVEISGVEDRFNASLGTYHDLLKIIKDKDFLDNEENEDILEDIVLTLTLFEDREMIEERLKTYAHLFDDKVMKQLKRRRYTGWGRLSRKLINGIRDKQSGKTILDFLKSDGFANRNFMQLIHDDSLTFKEDIQKAQVSGQGDSLHEHIANLAGSPAIKKGILQTVKVVDELVKVMGRHKPENIVIEMARENQTTQKGQKNSRERMKRIEEGIKELGSQILKEHPVENTQLQNEKLYLYYLQNGRDMYVDQELDINRLSDYDVDHIVPQSFLKDDSIDNKVLTRSDKARGKSDNVPSEEVVKKMKNYWRQLLNAKLITQRKFDNLTKAERGGLSELDKAGFIKRQLVETRQITKHVAQILDSRMNTKYDENDKLIREVKVITLKSKLVSDFRKDFQFYKVREINNYHHAHDAYLNAVVGTALIKKYPKLESEFVYGDYKVYDVRKMIAKSEQEIGKATAKYFFYSNIMNFFKTEITLANGEIRKRPLIETNGETGEIVWDKGRDFATVRKVLSMPQVNIVKKTEVQTGGFSKESILPKRNSDKLIARKKDWDPKKYGGFDSPTVAYSVLVVAKVEKGKSKKLKSVKELLGITIMERSSFEKNPIDFLEAKGYKEVKKDLIIKLPKYSLFELENGRKRMLASAGELQKGNELALPSKYVNFLYLASHYEKLKGSPEDNEQKQLFVEQHKHYLDEIIEQISEFSKRVILADANLDKVLSAYNKHRDKPIREQAENIIHLFTLTNLGAPAAFKYFDTTIDRKRYTSTKEVLDATLIHQSITGLYETRIDLSQLGGDGGGSSGGSEAAAKGGLLGRDLLTKLKAQIQFSTEGPQVTWEDRPAMCLVLNLEEEYRLHEKPVPPSIDPSWLQLFPMVWAEKAGMGLANQVPPVVVELKSDASPVAVRQYPMSKEAREGIRPHIQRFLDLGILVPCQSPWNTPLLPVKKPGTNDYRPVQDLREVNKRVQDIHPTVPNPYNLLSSLPPSHTWYSVLDLKDAFFCLKLHPNSQPLFAFEWRDPEKGNTGQLTWTRLPQGFKNSPTLFNEALHRDLASFRALNPQVVMLQYVDDLLVAAPTYRDCKEGTRRLLQELSKLGYRVSAKKAQLCREEVTYLGYLLKGGKRWLTPARKATVMKIPTPTTPRQVREFLGKAGFCRLFIPGFASLAAPLYPLTRPKVPFTWTEAHQEAFGRIKEALLSAPALALPDLTKPFALYVDEKEGVARGVLTQTLGPWRRPVAYLSKKLDPVASGWPTCLKAIAAVALLLKDADKLTLGQNVLVIAPHNLESIVRQPPDRWMTNARMTHYQSLLLNERVSFAPPAILNPATLLPVESDDTPIHICSEILAEETGTRPDLRDQPLPGVPAWYTDGSSFIMDGRRQAGAAIVDNKRTVWASNLPEGTSAQKAELIALTQALRLAEGKSINIYTDSRYAFATAHVHGAIYKQRGWLTSAGKDIKNKEEILALLEAIHLPKRVAIIHCPGHQRGTDPVATGNRKADEAAKQAAQSTRILTETTKNAGKRTADGSEFEKRTADGSEFESPKKKAKVE

SEQ ID NO: 1714 - protein, 2125 aa, synthetic construct
MPAAKRVKLDGGDKKYSIGLDIGTNSVGWAVITDEYKVPSKKFKVLGNTDRHSIKKNLIGALLFDSGETAEATRLKRTARRRYTRRKNRICYLQEIFSNEMAKVDDSFFHRLEESFLVEEDKKHERHPIFGNIVDEVAYHEKYPTIYHLRKKLVDSTDKADLRLIYLALAHMIKFRGHFLIEGDLNPDNSDVDKLFIQLVQTYNQLFEENPINASGVDAKAILSARLSKSRRLENLIAQLPGEKKNGLFGNLIALSLGLTPNFKSNFDLAEDAKLQLSKDTYDDDLDNLLAQIGDQYADLFLAAKNLSDAILLSDILRVNTEITKAPLSASMIKRYDEHHQDLTLLKALVRQQLPEKYKEIFFDQSKNGYAGYIDGGASQEEFYKFIKPILEKMDGTEELLVKLNREDLLRKQRTFDNGSIPHQIHLGELHAILRRQEDFYPFLKDNREKIEKILTFRIPYYVGPLARGNSRFAWMTRKSEETITPWNFEEVVDKGASAQSFIERMTNFDKNLPNEKVLPKHSLLYEYFTVYNELTKVKYVTEGMRKPAFLSGEQKKAIVDLLFKTNRKVTVKQLKEDYFKKIECFDSVEISGVEDRFNASLGTYHDLLKIIKDKDFLDNEENEDILEDIVLTLTLFEDREMIEERLKTYAHLFDDKVMKQLKRRRYTGWGRLSRKLINGIRDKQSGKTILDFLKSDGFANRNFMQLIHDDSLTFKEDIQKAQVSGQGDSLHEHIANLAGSPAIKKGILQTVKVVDELVKVMGRHKPENIVIEMARENQTTQKGQKNSRERMKRIEEGIKELGSQILKEHPVENTQLQNEKLYLYYLQNGRDMYVDQELDINRLSDYDVDHIVPQSFLKDDSIDNKVLTRSDKARGKSDNVPSEEVVKKMKNYWRQLLNAKLITQRKFDNLTKAERGGLSELDKAGFIKRQLVETRQITKHVAQILDSRMNTKYDENDKLIREVKVITLKSKLVSDFRKDFQFYKVREINNYHHAHDAYLNAVVGTALIKKYPKLESEFVYGDYKVYDVRKMIAKSEQEIGKATAKYFFYSNIMNFFKTEITLANGEIRKRPLIETNGETGEIVWDKGRDFATVRKVLSMPQVNIVKKTEVQTGGFSKESILPKRNSDKLIARKKDWDPKKYGGFDSPTVAYSVLVVAKVEKGKSKKLKSVKELLGITIMERSSFEKNPIDFLEAKGYKEVKKDLIIKLPKYSLFELENGRKRMLASAGELQKGNELALPSKYVNFLYLASHYEKLKGSPEDNEQKQLFVEQHKHYLDEIIEQISEFSKRVILADANLDKVLSAYNKHRDKPIREQAENIIHLFTLTNLGAPAAFKYFDTTIDRKRYTSTKEVLDATLIHQSITGLYETRIDLSQLGGDGGGSSGSSGSSGGLLGRDLLTKLKAQIQFSTEGPQVTWEDRPAMCLVLNLEEEYRLHEKPVPPSIDPSWLQLFPMVWAEKAGMGLANQVPPVVVELKSDASPVAVRQYPMSKEAREGIRPHIQRFLDLGILVPCQSPWNTPLLPVKKPGTNDYRPVQDLREVNKRVQDIHPTVPNPYNLLSSLPPSHTWYSVLDLKDAFFCLKLHPNSQPLFAFEWRDPEKGNTGQLTWTRLPQGFKNSPTLFNEALHRDLASFRALNPQVVMLQYVDDLLVAAPTYRDCKEGTRRLLQELSKLGYRVSAKKAQLCREEVTYLGYLLKGGKRWLTPARKATVMKIPTPTTPRQVREFLGKAGFCRLFIPGFASLAAPLYPLTRPKVPFTWTEAHQEAFGRIKEALLSAPALALPDLTKPFALYVDEKEGVARGVLTQTLGPWRRPVAYLSKKLDPVASGWPTCLKAIAAVALLLKDADKLTLGQNVLVIAPHNLESIVRQPPDRWMTNARMTHYQSLLLNERVSFAPPAILNPATLLPVESDDTPIHICSEILAEETGTRPDLRDQPLPGVPAWYTDGSSFIMDGRRQAGAAIVDNKRTVWASNLPEGTSAQKAELIALTQALRLAEGKSINIYTDSRYAFATAHVHGAIYKQRGWLTSAGKDIKNKEEILALLEAIHLPKRVAIIHCPGHQRGTDPVATGNRKADEAAKQAAQSTRILTETTKNAGKRTADGSEFEKRTADGSEFESPKKKAKVE

SEQ ID NO: 1715 - protein, 2127 aa, synthetic construct
MPAAKRVKLDGGDKKYSIGLDIGTNSVGWAVITDEYKVPSKKFKVLGNTDRHSIKKNLIGALLFDSGETAEATRLKRTARRRYTRRKNRICYLQEIFSNEMAKVDDSFFHRLEESFLVEEDKKHERHPIFGNIVDEVAYHEKYPTIYHLRKKLVDSTDKADLRLIYLALAHMIKFRGHFLIEGDLNPDNSDVDKLFIQLVQTYNQLFEENPINASGVDAKAILSARLSKSRRLENLIAQLPGEKKNGLFGNLIALSLGLTPNFKSNFDLAEDAKLQLSKDTYDDDLDNLLAQIGDQYADLFLAAKNLSDAILLSDILRVNTEITKAPLSASMIKRYDEHHQDLTLLKALVRQQLPEKYKEIFFDQSKNGYAGYIDGGASQEEFYKFIKPILEKMDGTEELLVKLNREDLLRKQRTFDNGSIPHQIHLGELHAILRRQEDFYPFLKDNREKIEKILTFRIPYYVGPLARGNSRFAWMTRKSEETITPWNFEEVVDKGASAQSFIERMTNFDKNLPNEKVLPKHSLLYEYFTVYNELTKVKYVTEGMRKPAFLSGEQKKAIVDLLFKTNRKVTVKQLKEDYFKKIECFDSVEISGVEDRFNASLGTYHDLLKIIKDKDFLDNEENEDILEDIVLTLTLFEDREMIEERLKTYAHLFDDKVMKQLKRRRYTGWGRLSRKLINGIRDKQSGKTILDFLKSDGFANRNFMQLIHDDSLTFKEDIQKAQVSGQGDSLHEHIANLAGSPAIKKGILQTVKVVDELVKVMGRHKPENIVIEMARENQTTQKGQKNSRERMKRIEEGIKELGSQILKEHPVENTQLQNEKLYLYYLQNGRDMYVDQELDINRLSDYDVDHIVPQSFLKDDSIDNKVLTRSDKARGKSDNVPSEEVVKKMKNYWRQLLNAKLITQRKFDNLTKAERGGLSELDKAGFIKRQLVETRQITKHVAQILDSRMNTKYDENDKLIREVKVITLKSKLVSDFRKDFQFYKVREINNYHHAHDAYLNAVVGTALIKKYPKLESEFVYGDYKVYDVRKMIAKSEQEIGKATAKYFFYSNIMNFFKTEITLANGEIRKRPLIETNGETGEIVWDKGRDFATVRKVLSMPQVNIVKKTEVQTGGFSKESILPKRNSDKLIARKKDWDPKKYGGFDSPTVAYSVLVVAKVEKGKSKKLKSVKELLGITIMERSSFEKNPIDFLEAKGYKEVKKDLIIKLPKYSLFELENGRKRMLASAGELQKGNELALPSKYVNFLYLASHYEKLKGSPEDNEQKQLFVEQHKHYLDEIIEQISEFSKRVILADANLDKVLSAYNKHRDKPIREQAENIIHLFTLTNLGAPAAFKYFDTTIDRKRYTSTKEVLDATLIHQSITGLYETRIDLSQLGGDGGEAAAKGGSGSSGGLLGRDLLTKLKAQIQFSTEGPQVTWEDRPAMCLVLNLEEEYRLHEKPVPPSIDPSWLQLFPMVWAEKAGMGLANQVPPVVVELKSDASPVAVRQYPMSKEAREGIRPHIQRFLDLGILVPCQSPWNTPLLPVKKPGTNDYRPVQDLREVNKRVQDIHPTVPNPYNLLSSLPPSHTWYSVLDLKDAFFCLKLHPNSQPLFAFEWRDPEKGNTGQLTWTRLPQGFKNSPTLFNEALHRDLASFRALNPQVVMLQYVDDLLVAAPTYRDCKEGTRRLLQELSKLGYRVSAKKAQLCREEVTYLGYLLKGGKRWLTPARKATVMKIPTPTTPRQVREFLGKAGFCRLFIPGFASLAAPLYPLTRPKVPFTWTEAHQEAFGRIKEALLSAPALALPDLTKPFALYVDEKEGVARGVLTQTLGPWRRPVAYLSKKLDPVASGWPTCLKAIAAVALLLKDADKLTLGQNVLVIAPHNLESIVRQPPDRWMTNARMTHYQSLLLNERVSFAPPAILNPATLLPVESDDTPIHICSEILAEETGTRPDLRDQPLPGVPAWYTDGSSFIMDGRRQAGAAIVDNKRTVWASNLPEGTSAQKAELIALTQALRLAEGKSINIYTDSRYAFATAHVHGAIYKQRGWLTSAGKDIKNKEEILALLEAIHLPKRVAIIHCPGHQRGTDPVATGNRKADEAAKQAAQSTRILTETTKNAGKRTADGSEFEKRTADGSEFESPKKKAKVE

SEQ ID NO: 1716 - protein, 2127 aa, synthetic construct
MPAAKRVKLDGGDKKYSIGLDIGTNSVGWAVITDEYKVPSKKFKVLGNTDRHSIKKNLIGALLFDSGETAEATRLKRTARRRYTRRKNRICYLQEIFSNEMAKVDDSFFHRLEESFLVEEDKKHERHPIFGNIVDEVAYHEKYPTIYHLRKKLVDSTDKADLRLIYLALAHMIKFRGHFLIEGDLNPDNSDVDKLFIQLVQTYNQLFEENPINASGVDAKAILSARLSKSRRLENLIAQLPGEKKNGLFGNLIALSLGLTPNFKSNFDLAEDAKLQLSKDTYDDDLDNLLAQIGDQYADLFLAAKNLSDAILLSDILRVNTEITKAPLSASMIKRYDEHHQDLTLLKALVRQQLPEKYKEIFFDQSKNGYAGYIDGGASQEEFYKFIKPILEKMDGTEELLVKLNREDLLRKQRTFDNGSIPHQIHLGELHAILRRQEDFYPFLKDNREKIEKILTFRIPYYVGPLARGNSRFAWMTRKSEETITPWNFEEVVDKGASAQSFIERMTNFDKNLPNEKVLPKHSLLYEYFTVYNELTKVKYVTEGMRKPAFLSGEQKKAIVDLLFKTNRKVTVKQLKEDYFKKIECFDSVEISGVEDRFNASLGTYHDLLKIIKDKDFLDNEENEDILEDIVLTLTLFEDREMIEERLKTYAHLFDDKVMKQLKRRRYTGWGRLSRKLINGIRDKQSGKTILDFLKSDGFANRNFMQLIHDDSLTFKEDIQKAQVSGQGDSLHEHIANLAGSPAIKKGILQTVKVVDELVKVMGRHKPENIVIEMARENQTTQKGQKNSRERMKRIEEGIKELGSQILKEHPVENTQLQNEKLYLYYLQNGRDMYVDQELDINRLSDYDVDHIVPQSFLKDDSIDNKVLTRSDKARGKSDNVPSEEVVKKMKNYWRQLLNAKLITQRKFDNLTKAERGGLSELDKAGFIKRQLVETRQITKHVAQILDSRMNTKYDENDKLIREVKVITLKSKLVSDFRKDFQFYKVREINNYHHAHDAYLNAVVGTALIKKYPKLESEFVYGDYKVYDVRKMIAKSEQEIGKATAKYFFYSNIMNFFKTEITLANGEIRKRPLIETNGETGEIVWDKGRDFATVRKVLSMPQVNIVKKTEVQTGGFSKESILPKRNSDKLIARKKDWDPKKYGGFDSPTVAYSVLVVAKVEKGKSKKLKSVKELLGITIMERSSFEKNPIDFLEAKGYKEVKKDLIIKLPKYSLFELENGRKRMLASAGELQKGNELALPSKYVNFLYLASHYEKLKGSPEDNEQKQLFVEQHKHYLDEIIEQISEFSKRVILADANLDKVLSAYNKHRDKPIREQAENIIHLFTLTNLGAPAAFKYFDTTIDRKRYTSTKEVLDATLIHQSITGLYETRIDLSQLGGDGGGGSGSSEAAAKGGLLGRDLLTKLKAQIQFSTEGPQVTWEDRPAMCLVLNLEEEYRLHEKPVPPSIDPSWLQLFPMVWAEKAGMGLANQVPPVVVELKSDASPVAVRQYPMSKEAREGIRPHIQRFLDLGILVPCQSPWNTPLLPVKKPGTNDYRPVQDLREVNKRVQDIHPTVPNPYNLLSSLPPSHTWYSVLDLKDAFFCLKLHPNSQPLFAFEWRDPEKGNTGQLTWTRLPQGFKNSPTLFNEALHRDLASFRALNPQVVMLQYVDDLLVAAPTYRDCKEGTRRLLQELSKLGYRVSAKKAQLCREEVTYLGYLLKGGKRWLTPARKATVMKIPTPTTPRQVREFLGKAGFCRLFIPGFASLAAPLYPLTRPKVPFTWTEAHQEAFGRIKEALLSAPALALPDLTKPFALYVDEKEGVARGVLTQTLGPWRRPVAYLSKKLDPVASGWPTCLKAIAAVALLLKDADKLTLGQNVLVIAPHNLESIVRQPPDRWMTNARMTHYQSLLLNERVSFAPPAILNPATLLPVESDDTPIHICSEILAEETGTRPDLRDQPLPGVPAWYTDGSSFIMDGRRQAGAAIVDNKRTVWASNLPEGTSAQKAELIALTQALRLAEGKSINIYTDSRYAFATAHVHGAIYKQRGWLTSAGKDIKNKEEILALLEAIHLPKRVAIIHCPGHQRGTDPVATGNRKADEAAKQAAQSTRILTETTKNAGKRTADGSEFEKRTADGSEFESPKKKAKVE

SEQ ID NO: 1717 - protein, 2127 aa, synthetic construct
MPAAKRVKLDGGDKKYSIGLDIGTNSVGWAVITDEYKVPSKKFKVLGNTDRHSIKKNLIGALLFDSGETAEATRLKRTARRRYTRRKNRICYLQEIFSNEMAKVDDSFFHRLEESFLVEEDKKHERHPIFGNIVDEVAYHEKYPTIYHLRKKLVDSTDKADLRLIYLALAHMIKFRGHFLIEGDLNPDNSDVDKLFIQLVQTYNQLFEENPINASGVDAKAILSARLSKSRRLENLIAQLPGEKKNGLFGNLIALSLGLTPNFKSNFDLAEDAKLQLSKDTYDDDLDNLLAQIGDQYADLFLAAKNLSDAILLSDILRVNTEITKAPLSASMIKRYDEHHQDLTLLKALVRQQLPEKYKEIFFDQSKNGYAGYIDGGASQEEFYKFIKPILEKMDGTEELLVKLNREDLLRKQRTFDNGSIPHQIHLGELHAILRRQEDFYPFLKDNREKIEKILTFRIPYYVGPLARGNSRFAWMTRKSEETITPWNFEEVVDKGASAQSFIERMTNFDKNLPNEKVLPKHSLLYEYFTVYNELTKVKYVTEGMRKPAFLSGEQKKAIVDLLFKTNRKVTVKQLKEDYFKKIECFDSVEISGVEDRFNASLGTYHDLLKIIKDKDFLDNEENEDILEDIVLTLTLFEDREMIEERLKTYAHLFDDKVMKQLKRRRYTGWGRLSRKLINGIRDKQSGKTILDFLKSDGFANRNFMQLIHDDSLTFKEDIQKAQVSGQGDSLHEHIANLAGSPAIKKGILQTVKVVDELVKVMGRHKPENIVIEMARENQTTQKGQKNSRERMKRIEEGIKELGSQILKEHPVENTQLQNEKLYLYYLQNGRDMYVDQELDINRLSDYDVDHIVPQSFLKDDSIDNKVLTRSDKARGKSDNVPSEEVVKKMKNYWRQLLNAKLITQRKFDNLTKAERGGLSELDKAGFIKRQLVETRQITKHVAQILDSRMNTKYDENDKLIREVKVITLKSKLVSDFRKDFQFYKVREINNYHHAHDAYLNAVVGTALIKKYPKLESEFVYGDYKVYDVRKMIAKSEQEIGKATAKYFFYSNIMNFFKTEITLANGEIRKRPLIETNGETGEIVWDKGRDFATVRKVLSMPQVNIVKKTEVQTGGFSKESILPKRNSDKLIARKKDWDPKKYGGFDSPTVAYSVLVVAKVEKGKSKKLKSVKELLGITIMERSSFEKNPIDFLEAKGYKEVKKDLIIKLPKYSLFELENGRKRMLASAGELQKGNELALPSKYVNFLYLASHYEKLKGSPEDNEQKQLFVEQHKHYLDEIIEQISEFSKRVILADANLDKVLSAYNKHRDKPIREQAENIIHLFTLTNLGAPAAFKYFDTTIDRKRYTSTKEVLDATLIHQSITGLYETRIDLSQLGGDGGGGSEAAAKGGGGGLLGRDLLTKLKAQIQFSTEGPQVTWEDRPAMCLVLNLEEEYRLHEKPVPPSIDPSWLQLFPMVWAEKAGMGLANQVPPVVVELKSDASPVAVRQYPMSKEAREGIRPHIQRFLDLGILVPCQSPWNTPLLPVKKPGTNDYRPVQDLREVNKRVQDIHPTVPNPYNLLSSLPPSHTWYSVLDLKDAFFCLKLHPNSQPLFAFEWRDPEKGNTGQLTWTRLPQGFKNSPTLFNEALHRDLASFRALNPQVVMLQYVDDLLVAAPTYRDCKEGTRRLLQELSKLGYRVSAKKAQLCREEVTYLGYLLKGGKRWLTPARKATVMKIPTPTTPRQVREFLGKAGFCRLFIPGFASLAAPLYPLTRPKVPFTWTEAHQEAFGRIKEALLSAPALALPDLTKPFALYVDEKEGVARGVLTQTLGPWRRPVAYLSKKLDPVASGWPTCLKAIAAVALLLKDADKLTLGQNVLVIAPHNLESIVRQPPDRWMTNARMTHYQSLLLNERVSFAPPAILNPATLLPVESDDTPIHICSEILAEETGTRPDLRDQPLPGVPAWYTDGSSFIMDGRRQAGAAIVDNKRTVWASNLPEGTSAQKAELIALTQALRLAEGKSINIYTDSRYAFATAHVHGAIYKQRGWLTSAGKDIKNKEEILALLEAIHLPKRVAIIHCPGHQRGTDPVATGNRKADEAAKQAAQSTRILTETTKNAGKRTADGSEFEKRTADGSEFESPKKKAKVE

SEQ ID NO: 1718 - protein, 2127 aa, synthetic construct
MPAAKRVKLDGGDKKYSIGLDIGTNSVGWAVITDEYKVPSKKFKVLGNTDRHSIKKNLIGALLFDSGETAEATRLKRTARRRYTRRKNRICYLQEIFSNEMAKVDDSFFHRLEESFLVEEDKKHERHPIFGNIVDEVAYHEKYPTIYHLRKKLVDSTDKADLRLIYLALAHMIKFRGHFLIEGDLNPDNSDVDKLFIQLVQTYNQLFEENPINASGVDAKAILSARLSKSRRLENLIAQLPGEKKNGLFGNLIALSLGLTPNFKSNFDLAEDAKLQLSKDTYDDDLDNLLAQIGDQYADLFLAAKNLSDAILLSDILRVNTEITKAPLSASMIKRYDEHHQDLTLLKALVRQQLPEKYKEIFFDQSKNGYAGYIDGGASQEEFYKFIKPILEKMDGTEELLVKLNREDLLRKQRTFDNGSIPHQIHLGELHAILRRQEDFYPFLKDNREKIEKILTFRIPYYVGPLARGNSRFAWMTRKSEETITPWNFEEVVDKGASAQSFIERMTNFDKNLPNEKVLPKHSLLYEYFTVYNELTKVKYVTEGMRKPAFLSGEQKKAIVDLLFKTNRKVTVKQLKEDYFKKIECFDSVEISGVEDRFNASLGTYHDLLKIIKDKDFLDNEENEDILEDIVLTLTLFEDREMIEERLKTYAHLFDDKVMKQLKRRRYTGWGRLSRKLINGIRDKQSGKTILDFLKSDGFANRNFMQLIHDDSLTFKEDIQKAQVSGQGDSLHEHIANLAGSPAIKKGILQTVKVVDELVKVMGRHKPENIVIEMARENQTTQKGQKNSRERMKRIEEGIKELGSQILKEHPVENTQLQNEKLYLYYLQNGRDMYVDQELDINRLSDYDVDHIVPQSFLKDDSIDNKVLTRSDKARGKSDNVPSEEVVKKMKNYWRQLLNAKLITQRKFDNLTKAERGGLSELDKAGFIKRQLVETRQITKHVAQILDSRMNTKYDENDKLIREVKVITLKSKLVSDFRKDFQFYKVREINNYHHAHDAYLNAVVGTALIKKYPKLESEFVYGDYKVYDVRKMIAKSEQEIGKATAKYFFYSNIMNFFKTEITLANGEIRKRPLIETNGETGEIVWDKGRDFATVRKVLSMPQVNIVKKTEVQTGGFSKESILPKRNSDKLIARKKDWDPKKYGGFDSPTVAYSVLVVAKVEKGKSKKLKSVKELLGITIMERSSFEKNPIDFLEAKGYKEVKKDLIIKLPKYSLFELENGRKRMLASAGELQKGNELALPSKYVNFLYLASHYEKLKGSPEDNEQKQLFVEQHKHYLDEIIEQISEFSKRVILADANLDKVLSAYNKHRDKPIREQAENIIHLFTLTNLGAPAAFKYFDTTIDRKRYTSTKEVLDATLIHQSITGLYETRIDLSQLGGDGGPAPGGSEAAAKGGLLGRDLLTKLKAQIQFSTEGPQVTWEDRPAMCLVLNLEEEYRLHEKPVPPSIDPSWLQLFPMVWAEKAGMGLANQVPPVVVELKSDASPVAVRQYPMSKEAREGIRPHIQRFLDLGILVPCQSPWNTPLLPVKKPGTNDYRPVQDLREVNKRVQDIHPTVPNPYNLLSSLPPSHTWYSVLDLKDAFFCLKLHPNSQPLFAFEWRDPEKGNTGQLTWTRLPQGFKNSPTLFNEALHRDLASFRALNPQVVMLQYVDDLLVAAPTYRDCKEGTRRLLQELSKLGYRVSAKKAQLCREEVTYLGYLLKGGKRWLTPARKATVMKIPTPTTPRQVREFLGKAGFCRLFIPGFASLAAPLYPLTRPKVPFTWTEAHQEAFGRIKEALLSAPALALPDLTKPFALYVDEKEGVARGVLTQTLGPWRRPVAYLSKKLDPVASGWPTCLKAIAAVALLLKDADKLTLGQNVLVIAPHNLESIVRQPPDRWMTNARMTHYQSLLLNERVSFAPPAILNPATLLPVESDDTPIHICSEILAEETGTRPDLRDQPLPGVPAWYTDGSSFIMDGRRQAGAAIVDNKRTVWASNLPEGTSAQKAELIALTQALRLAEGKSINIYTDSRYAFATAHVHGAIYKQRGWLTSAGKDIKNKEEILALLEAIHLPKRVAIIHCPGHQRGTDPVATGNRKADEAAKQAAQSTRILTETTKNAGKRTADGSEFEKRTADGSEFESPKKKAKVE

SEQ ID NO: 1719 - protein, 2125 aa, synthetic construct
MPAAKRVKLDGGDKKYSIGLDIGTNSVGWAVITDEYKVPSKKFKVLGNTDRHSIKKNLIGALLFDSGETAEATRLKRTARRRYTRRKNRICYLQEIFSNEMAKVDDSFFHRLEESFLVEEDKKHERHPIFGNIVDEVAYHEKYPTIYHLRKKLVDSTDKADLRLIYLALAHMIKFRGHFLIEGDLNPDNSDVDKLFIQLVQTYNQLFEENPINASGVDAKAILSARLSKSRRLENLIAQLPGEKKNGLFGNLIALSLGLTPNFKSNFDLAEDAKLQLSKDTYDDDLDNLLAQIGDQYADLFLAAKNLSDAILLSDILRVNTEITKAPLSASMIKRYDEHHQDLTLLKALVRQQLPEKYKEIFFDQSKNGYAGYIDGGASQEEFYKFIKPILEKMDGTEELLVKLNREDLLRKQRTFDNGSIPHQIHLGELHAILRRQEDFYPFLKDNREKIEKILTFRIPYYVGPLARGNSRFAWMTRKSEETITPWNFEEVVDKGASAQSFIERMTNFDKNLPNEKVLPKHSLLYEYFTVYNELTKVKYVTEGMRKPAFLSGEQKKAIVDLLFKTNRKVTVKQLKEDYFKKIECFDSVEISGVEDRFNASLGTYHDLLKIIKDKDFLDNEENEDILEDIVLTLTLFEDREMIEERLKTYAHLFDDKVMKQLKRRRYTGWGRLSRKLINGIRDKQSGKTILDFLKSDGFANRNFMQLIHDDSLTFKEDIQKAQVSGQGDSLHEHIANLAGSPAIKKGILQTVKVVDELVKVMGRHKPENIVIEMARENQTTQKGQKNSRERMKRIEEGIKELGSQILKEHPVENTQLQNEKLYLYYLQNGRDMYVDQELDINRLSDYDVDHIVPQSFLKDDSIDNKVLTRSDKARGKSDNVPSEEVVKKMKNYWRQLLNAKLITQRKFDNLTKAERGGLSELDKAGFIKRQLVETRQITKHVAQILDSRMNTKYDENDKLIREVKVITLKSKLVSDFRKDFQFYKVREINNYHHAHDAYLNAVVGTALIKKYPKLESEFVYGDYKVYDVRKMIAKSEQEIGKATAKYFFYSNIMNFFKTEITLANGEIRKRPLIETNGETGEIVWDKGRDFATVRKVLSMPQVNIVKKTEVQTGGFSKESILPKRNSDKLIARKKDWDPKKYGGFDSPTVAYSVLVVAKVEKGKSKKLKSVKELLGITIMERSSFEKNPIDFLEAKGYKEVKKDLIIKLPKYSLFELENGRKRMLASAGELQKGNELALPSKYVNFLYLASHYEKLKGSPEDNEQKQLFVEQHKHYLDEIIEQISEFSKRVILADANLDKVLSAYNKHRDKPIREQAENIIHLFTLTNLGAPAAFKYFDTTIDRKRYTSTKEVLDATLIHQSITGLYETRIDLSQLGGDGGPAPGSSGGGGGLLGRDLLTKLKAQIQFSTEGPQVTWEDRPAMCLVLNLEEEYRLHEKPVPPSIDPSWLQLFPMVWAEKAGMGLANQVPPVVVELKSDASPVAVRQYPMSKEAREGIRPHIQRFLDLGILVPCQSPWNTPLLPVKKPGTNDYRPVQDLREVNKRVQDIHPTVPNPYNLLSSLPPSHTWYSVLDLKDAFFCLKLHPNSQPLFAFEWRDPEKGNTGQLTWTRLPQGFKNSPTLFNEALHRDLASFRALNPQVVMLQYVDDLLVAAPTYRDCKEGTRRLLQELSKLGYRVSAKKAQLCREEVTYLGYLLKGGKRWLTPARKATVMKIPTPTTPRQVREFLGKAGFCRLFIPGFASLAAPLYPLTRPKVPFTWTEAHQEAFGRIKEALLSAPALALPDLTKPFALYVDEKEGVARGVLTQTLGPWRRPVAYLSKKLDPVASGWPTCLKAIAAVALLLKDADKLTLGQNVLVIAPHNLESIVRQPPDRWMTNARMTHYQSLLLNERVSFAPPAILNPATLLPVESDDTPIHICSEILAEETGTRPDLRDQPLPGVPAWYTDGSSFIMDGRRQAGAAIVDNKRTVWASNLPEGTSAQKAELIALTQALRLAEGKSINIYTDSRYAFATAHVHGAIYKQRGWLTSAGKDIKNKEEILALLEAIHLPKRVAIIHCPGHQRGTDPVATGNRKADEAAKQAAQSTRILTETTKNAGKRTADGSEFEKRTADGSEFESPKKKAKVE

SEQ ID NO: 1720 - protein, 2126 aa, synthetic construct
MPAAKRVKLDGGDKKYSIGLDIGTNSVGWAVITDEYKVPSKKFKVLGNTDRHSIKKNLIGALLFDSGETAEATRLKRTARRRYTRRKNRICYLQEIFSNEMAKVDDSFFHRLEESFLVEEDKKHERHPIFGNIVDEVAYHEKYPTIYHLRKKLVDSTDKADLRLIYLALAHMIKFRGHFLIEGDLNPDNSDVDKLFIQLVQTYNQLFEENPINASGVDAKAILSARLSKSRRLENLIAQLPGEKKNGLFGNLIALSLGLTPNFKSNFDLAEDAKLQLSKDTYDDDLDNLLAQIGDQYADLFLAAKNLSDAILLSDILRVNTEITKAPLSASMIKRYDEHHQDLTLLKALVRQQLPEKYKEIFFDQSKNGYAGYIDGGASQEEFYKFIKPILEKMDGTEELLVKLNREDLLRKQRTFDNGSIPHQIHLGELHAILRRQEDFYPFLKDNREKIEKILTFRIPYYVGPLARGNSRFAWMTRKSEETITPWNFEEVVDKGASAQSFIERMTNFDKNLPNEKVLPKHSLLYEYFTVYNELTKVKYVTEGMRKPAFLSGEQKKAIVDLLFKTNRKVTVKQLKEDYFKKIECFDSVEISGVEDRFNASLGTYHDLLKIIKDKDFLDNEENEDILEDIVLTLTLFEDREMIEERLKTYAHLFDDKVMKQLKRRRYTGWGRLSRKLINGIRDKQSGKTILDFLKSDGFANRNFMQLIHDDSLTFKEDIQKAQVSGQGDSLHEHIANLAGSPAIKKGILQTVKVVDELVKVMGRHKPENIVIEMARENQTTQKGQKNSRERMKRIEEGIKELGSQILKEHPVENTQLQNEKLYLYYLQNGRDMYVDQELDINRLSDYDVDHIVPQSFLKDDSIDNKVLTRSDKARGKSDNVPSEEVVKKMKNYWRQLLNAKLITQRKFDNLTKAERGGLSELDKAGFIKRQLVETRQITKHVAQILDSRMNTKYDENDKLIREVKVITLKSKLVSDFRKDFQFYKVREINNYHHAHDAYLNAVVGTALIKKYPKLESEFVYGDYKVYDVRKMIAKSEQEIGKATAKYFFYSNIMNFFKTEITLANGEIRKRPLIETNGETGEIVWDKGRDFATVRKVLSMPQVNIVKKTEVQTGGFSKESILPKRNSDKLIARKKDWDPKKYGGFDSPTVAYSVLVVAKVEKGKSKKLKSVKELLGITIMERSSFEKNPIDFLEAKGYKEVKKDLIIKLPKYSLFELENGRKRMLASAGELQKGNELALPSKYVNFLYLASHYEKLKGSPEDNEQKQLFVEQHKHYLDEIIEQISEFSKRVILADANLDKVLSAYNKHRDKPIREQAENIIHLFTLTNLGAPAAFKYFDTTIDRKRYTSTKEVLDATLIHQSITGLYETRIDLSQLGGDGGGGGGSGGGGSGGLLGRDLLTKLKAQIQFSTEGPQVTWEDRPAMCLVLNLEEEYRLHEKPVPPSIDPSWLQLFPMVWAEKAGMGLANQVPPVVVELKSDASPVAVRQYPMSKEAREGIRPHIQRFLDLGILVPCQSPWNTPLLPVKKPGTNDYRPVQDLREVNKRVQDIHPTVPNPYNLLSSLPPSHTWYSVLDLKDAFFCLKLHPNSQPLFAFEWRDPEKGNTGQLTWTRLPQGFKNSPTLFNEALHRDLASFRALNPQVVMLQYVDDLLVAAPTYRDCKEGTRRLLQELSKLGYRVSAKKAQLCREEVTYLGYLLKGGKRWLTPARKATVMKIPTPTTPRQVREFLGKAGFCRLFIPGFASLAAPLYPLTRPKVPFTWTEAHQEAFGRIKEALLSAPALALPDLTKPFALYVDEKEGVARGVLTQTLGPWRRPVAYLSKKLDPVASGWPTCLKAIAAVALLLKDADKLTLGQNVLVIAPHNLESIVRQPPDRWMTNARMTHYQSLLLNERVSFAPPAILNPATLLPVESDDTPIHICSEILAEETGTRPDLRDQPLPGVPAWYTDGSSFIMDGRRQAGAAIVDNKRTVWASNLPEGTSAQKAELIALTQALRLAEGKSINIYTDSRYAFATAHVHGAIYKQRGWLTSAGKDIKNKEEILALLEAIHLPKRVAIIHCPGHQRGTDPVATGNRKADEAAKQAAQSTRILTETTKNAGKRTADGSEFEKRTADGSEFESPKKKAKVE

SEQ ID NO: 1721 - protein, 2127 aa, synthetic construct
MPAAKRVKLDGGDKKYSIGLDIGTNSVGWAVITDEYKVPSKKFKVLGNTDRHSIKKNLIGALLFDSGETAEATRLKRTARRRYTRRKNRICYLQEIFSNEMAKVDDSFFHRLEESFLVEEDKKHERHPIFGNIVDEVAYHEKYPTIYHLRKKLVDSTDKADLRLIYLALAHMIKFRGHFLIEGDLNPDNSDVDKLFIQLVQTYNQLFEENPINASGVDAKAILSARLSKSRRLENLIAQLPGEKKNGLFGNLIALSLGLTPNFKSNFDLAEDAKLQLSKDTYDDDLDNLLAQIGDQYADLFLAAKNLSDAILLSDILRVNTEITKAPLSASMIKRYDEHHQDLTLLKALVRQQLPEKYKEIFFDQSKNGYAGYIDGGASQEEFYKFIKPILEKMDGTEELLVKLNREDLLRKQRTFDNGSIPHQIHLGELHAILRRQEDFYPFLKDNREKIEKILTFRIPYYVGPLARGNSRFAWMTRKSEETITPWNFEEVVDKGASAQSFIERMTNFDKNLPNEKVLPKHSLLYEYFTVYNELTKVKYVTEGMRKPAFLSGEQKKAIVDLLFKTNRKVTVKQLKEDYFKKIECFDSVEISGVEDRFNASLGTYHDLLKIIKDKDFLDNEENEDILEDIVLTLTLFEDREMIEERLKTYAHLFDDKVMKQLKRRRYTGWGRLSRKLINGIRDKQSGKTILDFLKSDGFANRNFMQLIHDDSLTFKEDIQKAQVSGQGDSLHEHIANLAGSPAIKKGILQTVKVVDELVKVMGRHKPENIVIEMARENQTTQKGQKNSRERMKRIEEGIKELGSQILKEHPVENTQLQNEKLYLYYLQNGRDMYVDQELDINRLSDYDVDHIVPQSFLKDDSIDNKVLTRSDKARGKSDNVPSEEVVKKMKNYWRQLLNAKLITQRKFDNLTKAERGGLSELDKAGFIKRQLVETRQITKHVAQILDSRMNTKYDENDKLIREVKVITLKSKLVSDFRKDFQFYKVREINNYHHAHDAYLNAVVGTALIKKYPKLESEFVYGDYKVYDVRKMIAKSEQEIGKATAKYFFYSNIMNFFKTEITLANGEIRKRPLIETNGETGEIVWDKGRDFATVRKVLSMPQVNIVKKTEVQTGGFSKESILPKRNSDKLIARKKDWDPKKYGGFDSPTVAYSVLVVAKVEKGKSKKLKSVKELLGITIMERSSFEKNPIDFLEAKGYKEVKKDLIIKLPKYSLFELENGRKRMLASAGELQKGNELALPSKYVNFLYLASHYEKLKGSPEDNEQKQLFVEQHKHYLDEIIEQISEFSKRVILADANLDKVLSAYNKHRDKPIREQAENIIHLFTLTNLGAPAAFKYFDTTIDRKRYTSTKEVLDATLIHQSITGLYETRIDLSQLGGDGGGSSPAPEAAAKGGLLGRDLLTKLKAQIQFSTEGPQVTWEDRPAMCLVLNLEEEYRLHEKPVPPSIDPSWLQLFPMVWAEKAGMGLANQVPPVVVELKSDASPVAVRQYPMSKEAREGIRPHIQRFLDLGILVPCQSPWNTPLLPVKKPGTNDYRPVQDLREVNKRVQDIHPTVPNPYNLLSSLPPSHTWYSVLDLKDAFFCLKLHPNSQPLFAFEWRDPEKGNTGQLTWTRLPQGFKNSPTLFNEALHRDLASFRALNPQVVMLQYVDDLLVAAPTYRDCKEGTRRLLQELSKLGYRVSAKKAQLCREEVTYLGYLLKGGKRWLTPARKATVMKIPTPTTPRQVREFLGKAGFCRLFIPGFASLAAPLYPLTRPKVPFTWTEAHQEAFGRIKEALLSAPALALPDLTKPFALYVDEKEGVARGVLTQTLGPWRRPVAYLSKKLDPVASGWPTCLKAIAAVALLLKDADKLTLGQNVLVIAPHNLESIVRQPPDRWMTNARMTHYQSLLLNERVSFAPPAILNPATLLPVESDDTPIHICSEILAEETGTRPDLRDQPLPGVPAWYTDGSSFIMDGRRQAGAAIVDNKRTVWASNLPEGTSAQKAELIALTQALRLAEGKSINIYTDSRYAFATAHVHGAIYKQRGWLTSAGKDIKNKEEILALLEAIHLPKRVAIIHCPGHQRGTDPVATGNRKADEAAKQAAQSTRILTETTKNAGKRTADGSEFEKRTADGSEFESPKKKAKVE

SEQ ID NO: 1722 - protein, 2127 aa, synthetic construct
MPAAKRVKLDGGDKKYSIGLDIGTNSVGWAVITDEYKVPSKKFKVLGNTDRHSIKKNLIGALLFDSGETAEATRLKRTARRRYTRRKNRICYLQEIFSNEMAKVDDSFFHRLEESFLVEEDKKHERHPIFGNIVDEVAYHEKYPTIYHLRKKLVDSTDKADLRLIYLALAHMIKFRGHFLIEGDLNPDNSDVDKLFIQLVQTYNQLFEENPINASGVDAKAILSARLSKSRRLENLIAQLPGEKKNGLFGNLIALSLGLTPNFKSNFDLAEDAKLQLSKDTYDDDLDNLLAQIGDQYADLFLAAKNLSDAILLSDILRVNTEITKAPLSASMIKRYDEHHQDLTLLKALVRQQLPEKYKEIFFDQSKNGYAGYIDGGASQEEFYKFIKPILEKMDGTEELLVKLNREDLLRKQRTFDNGSIPHQIHLGELHAILRRQEDFYPFLKDNREKIEKILTFRIPYYVGPLARGNSRFAWMTRKSEETITPWNFEEVVDKGASAQSFIERMTNFDKNLPNEKVLPKHSLLYEYFTVYNELTKVKYVTEGMRKPAFLSGEQKKAIVDLLFKTNRKVTVKQLKEDYFKKIECFDSVEISGVEDRFNASLGTYHDLLKIIKDKDFLDNEENEDILEDIVLTLTLFEDREMIEERLKTYAHLFDDKVMKQLKRRRYTGWGRLSRKLINGIRDKQSGKTILDFLKSDGFANRNFMQLIHDDSLTFKEDIQKAQVSGQGDSLHEHIANLAGSPAIKKGILQTVKVVDELVKVMGRHKPENIVIEMARENQTTQKGQKNSRERMKRIEEGIKELGSQILKEHPVENTQLQNEKLYLYYLQNGRDMYVDQELDINRLSDYDVDHIVPQSFLKDDSIDNKVLTRSDKARGKSDNVPSEEVVKKMKNYWRQLLNAKLITQRKFDNLTKAERGGLSELDKAGFIKRQLVETRQITKHVAQILDSRMNTKYDENDKLIREVKVITLKSKLVSDFRKDFQFYKVREINNYHHAHDAYLNAVVGTALIKKYPKLESEFVYGDYKVYDVRKMIAKSEQEIGKATAKYFFYSNIMNFFKTEITLANGEIRKRPLIETNGETGEIVWDKGRDFATVRKVLSMPQVNIVKKTEVQTGGFSKESILPKRNSDKLIARKKDWDPKKYGGFDSPTVAYSVLVVAKVEKGKSKKLKSVKELLGITIMERSSFEKNPIDFLEAKGYKEVKKDLIIKLPKYSLFELENGRKRMLASAGELQKGNELALPSKYVNFLYLASHYEKLKGSPEDNEQKQLFVEQHKHYLDEIIEQISEFSKRVILADANLDKVLSAYNKHRDKPIREQAENIIHLFTLTNLGAPAAFKYFDTTIDRKRYTSTKEVLDATLIHQSITGLYETRIDLSQLGGDGGGGSEAAAKGSSGGLLGRDLLTKLKAQIQFSTEGPQVTWEDRPAMCLVLNLEEEYRLHEKPVPPSIDPSWLQLFPMVWAEKAGMGLANQVPPVVVELKSDASPVAVRQYPMSKEAREGIRPHIQRFLDLGILVPCQSPWNTPLLPVKKPGTNDYRPVQDLREVNKRVQDIHPTVPNPYNLLSSLPPSHTWYSVLDLKDAFFCLKLHPNSQPLFAFEWRDPEKGNTGQLTWTRLPQGFKNSPTLFNEALHRDLASFRALNPQVVMLQYVDDLLVAAPTYRDCKEGTRRLLQELSKLGYRVSAKKAQLCREEVTYLGYLLKGGKRWLTPARKATVMKIPTPTTPRQVREFLGKAGFCRLFIPGFASLAAPLYPLTRPKVPFTWTEAHQEAFGRIKEALLSAPALALPDLTKPFALYVDEKEGVARGVLTQTLGPWRRPVAYLSKKLDPVASGWPTCLKAIAAVALLLKDADKLTLGQNVLVIAPHNLESIVRQPPDRWMTNARMTHYQSLLLNERVSFAPPAILNPATLLPVESDDTPIHICSEILAEETGTRPDLRDQPLPGVPAWYTDGSSFIMDGRRQAGAAIVDNKRTVWASNLPEGTSAQKAELIALTQALRLAEGKSINIYTDSRYAFATAHVHGAIYKQRGWLTSAGKDIKNKEEILALLEAIHLPKRVAIIHCPGHQRGTDPVATGNRKADEAAKQAAQSTRILTETTKNAGKRTADGSEFEKRTADGSEFESPKKKAKVE

SEQ ID NO: 1723 - protein, 2127 aa, synthetic construct
MPAAKRVKLDGGDKKYSIGLDIGTNSVGWAVITDEYKVPSKKFKVLGNTDRHSIKKNLIGALLFDSGETAEATRLKRTARRRYTRRKNRICYLQEIFSNEMAKVDDSFFHRLEESFLVEEDKKHERHPIFGNIVDEVAYHEKYPTIYHLRKKLVDSTDKADLRLIYLALAHMIKFRGHFLIEGDLNPDNSDVDKLFIQLVQTYNQLFEENPINASGVDAKAILSARLSKSRRLENLIAQLPGEKKNGLFGNLIALSLGLTPNFKSNFDLAEDAKLQLSKDTYDDDLDNLLAQIGDQYADLFLAAKNLSDAILLSDILRVNTEITKAPLSASMIKRYDEHHQDLTLLKALVRQQLPEKYKEIFFDQSKNGYAGYIDGGASQEEFYKFIKPILEKMDGTEELLVKLNREDLLRKQRTFDNGSIPHQIHLGELHAILRRQEDFYPFLKDNREKIEKILTFRIPYYVGPLARGNSRFAWMTRKSEETITPWNFEEVVDKGASAQSFIERMTNFDKNLPNEKVLPKHSLLYEYFTVYNELTKVKYVTEGMRKPAFLSGEQKKAIVDLLFKTNRKVTVKQLKEDYFKKIECFDSVEISGVEDRFNASLGTYHDLLKIIKDKDFLDNEENEDILEDIVLTLTLFEDREMIEERLKTYAHLFDDKVMKQLKRRRYTGWGRLSRKLINGIRDKQSGKTILDFLKSDGFANRNFMQLIHDDSLTFKEDIQKAQVSGQGDSLHEHIANLAGSPAIKKGILQTVKVVDELVKVMGRHKPENIVIEMARENQTTQKGQKNSRERMKRIEEGIKELGSQILKEHPVENTQLQNEKLYLYYLQNGRDMYVDQELDINRLSDYDVDHIVPQSFLKDDSIDNKVLTRSDKARGKSDNVPSEEVVKKMKNYWRQLLNAKLITQRKFDNLTKAERGGLSELDKAGFIKRQLVETRQITKHVAQILDSRMNTKYDENDKLIREVKVITLKSKLVSDFRKDFQFYKVREINNYHHAHDAYLNAVVGTALIKKYPKLESEFVYGDYKVYDVRKMIAKSEQEIGKATAKYFFYSNIMNFFKTEITLANGEIRKRPLIETNGETGEIVWDKGRDFATVRKVLSMPQVNIVKKTEVQTGGFSKESILPKRNSDKLIARKKDWDPKKYGGFDSPTVAYSVLVVAKVEKGKSKKLKSVKELLGITIMERSSFEKNPIDFLEAKGYKEVKKDLIIKLPKYSLFELENGRKRMLASAGELQKGNELALPSKYVNFLYLASHYEKLKGSPEDNEQKQLFVEQHKHYLDEIIEQISEFSKRVILADANLDKVLSAYNKHRDKPIREQAENIIHLFTLTNLGAPAAFKYFDTTIDRKRYTSTKEVLDATLIHQSITGLYETRIDLSQLGGDGGEAAAKPAPGGSGGLLGRDLLTKLKAQIQFSTEGPQVTWEDRPAMCLVLNLEEEYRLHEKPVPPSIDPSWLQLFPMVWAEKAGMGLANQVPPVVVELKSDASPVAVRQYPMSKEAREGIRPHIQRFLDLGILVPCQSPWNTPLLPVKKPGTNDYRPVQDLREVNKRVQDIHPTVPNPYNLLSSLPPSHTWYSVLDLKDAFFCLKLHPNSQPLFAFEWRDPEKGNTGQLTWTRLPQGFKNSPTLFNEALHRDLASFRALNPQVVMLQYVDDLLVAAPTYRDCKEGTRRLLQELSKLGYRVSAKKAQLCREEVTYLGYLLKGGKRWLTPARKATVMKIPTPTTPRQVREFLGKAGFCRLFIPGFASLAAPLYPLTRPKVPFTWTEAHQEAFGRIKEALLSAPALALPDLTKPFALYVDEKEGVARGVLTQTLGPWRRPVAYLSKKLDPVASGWPTCLKAIAAVALLLKDADKLTLGQNVLVIAPHNLESIVRQPPDRWMTNARMTHYQSLLLNERVSFAPPAILNPATLLPVESDDTPIHICSEILAEETGTRPDLRDQPLPGVPAWYTDGSSFIMDGRRQAGAAIVDNKRTVWASNLPEGTSAQKAELIALTQALRLAEGKSINIYTDSRYAFATAHVHGAIYKQRGWLTSAGKDIKNKEEILALLEAIHLPKRVAIIHCPGHQRGTDPVATGNRKADEAAKQAAQSTRILTETTKNAGKRTADGSEFEKRTADGSEFESPKKKAKVE

SEQ ID NO: 1724 - protein, 2125 aa, synthetic construct
MPAAKRVKLDGGDKKYSIGLDIGTNSVGWAVITDEYKVPSKKFKVLGNTDRHSIKKNLIGALLFDSGETAEATRLKRTARRRYTRRKNRICYLQEIFSNEMAKVDDSFFHRLEESFLVEEDKKHERHPIFGNIVDEVAYHEKYPTIYHLRKKLVDSTDKADLRLIYLALAHMIKFRGHFLIEGDLNPDNSDVDKLFIQLVQTYNQLFEENPINASGVDAKAILSARLSKSRRLENLIAQLPGEKKNGLFGNLIALSLGLTPNFKSNFDLAEDAKLQLSKDTYDDDLDNLLAQIGDQYADLFLAAKNLSDAILLSDILRVNTEITKAPLSASMIKRYDEHHQDLTLLKALVRQQLPEKYKEIFFDQSKNGYAGYIDGGASQEEFYKFIKPILEKMDGTEELLVKLNREDLLRKQRTFDNGSIPHQIHLGELHAILRRQEDFYPFLKDNREKIEKILTFRIPYYVGPLARGNSRFAWMTRKSEETITPWNFEEVVDKGASAQSFIERMTNFDKNLPNEKVLPKHSLLYEYFTVYNELTKVKYVTEGMRKPAFLSGEQKKAIVDLLFKTNRKVTVKQLKEDYFKKIECFDSVEISGVEDRFNASLGTYHDLLKIIKDKDFLDNEENEDILEDIVLTLTLFEDREMIEERLKTYAHLFDDKVMKQLKRRRYTGWGRLSRKLINGIRDKQSGKTILDFLKSDGFANRNFMQLIHDDSLTFKEDIQKAQVSGQGDSLHEHIANLAGSPAIKKGILQTVKVVDELVKVMGRHKPENIVIEMARENQTTQKGQKNSRERMKRIEEGIKELGSQILKEHPVENTQLQNEKLYLYYLQNGRDMYVDQELDINRLSDYDVDHIVPQSFLKDDSIDNKVLTRSDKARGKSDNVPSEEVVKKMKNYWRQLLNAKLITQRKFDNLTKAERGGLSELDKAGFIKRQLVETRQITKHVAQILDSRMNTKYDENDKLIREVKVITLKSKLVSDFRKDFQFYKVREINNYHHAHDAYLNAVVGTALIKKYPKLESEFVYGDYKVYDVRKMIAKSEQEIGKATAKYFFYSNIMNFFKTEITLANGEIRKRPLIETNGETGEIVWDKGRDFATVRKVLSMPQVNIVKKTEVQTGGFSKESILPKRNSDKLIARKKDWDPKKYGGFDSPTVAYSVLVVAKVEKGKSKKLKSVKELLGITIMERSSFEKNPIDFLEAKGYKEVKKDLIIKLPKYSLFELENGRKRMLASAGELQKGNELALPSKYVNFLYLASHYEKLKGSPEDNEQKQLFVEQHKHYLDEIIEQISEFSKRVILADANLDKVLSAYNKHRDKPIREQAENIIHLFTLTNLGAPAAFKYFDTTIDRKRYTSTKEVLDATLIHQSITGLYETRIDLSQLGGDGGGGSGSSGGGGGLLGRDLLTKLKAQIQFSTEGPQVTWEDRPAMCLVLNLEEEYRLHEKPVPPSIDPSWLQLFPMVWAEKAGMGLANQVPPVVVELKSDASPVAVRQYPMSKEAREGIRPHIQRFLDLGILVPCQSPWNTPLLPVKKPGTNDYRPVQDLREVNKRVQDIHPTVPNPYNLLSSLPPSHTWYSVLDLKDAFFCLKLHPNSQPLFAFEWRDPEKGNTGQLTWTRLPQGFKNSPTLFNEALHRDLASFRALNPQVVMLQYVDDLLVAAPTYRDCKEGTRRLLQELSKLGYRVSAKKAQLCREEVTYLGYLLKGGKRWLTPARKATVMKIPTPTTPRQVREFLGKAGFCRLFIPGFASLAAPLYPLTRPKVPFTWTEAHQEAFGRIKEALLSAPALALPDLTKPFALYVDEKEGVARGVLTQTLGPWRRPVAYLSKKLDPVASGWPTCLKAIAAVALLLKDADKLTLGQNVLVIAPHNLESIVRQPPDRWMTNARMTHYQSLLLNERVSFAPPAILNPATLLPVESDDTPIHICSEILAEETGTRPDLRDQPLPGVPAWYTDGSSFIMDGRRQAGAAIVDNKRTVWASNLPEGTSAQKAELIALTQALRLAEGKSINIYTDSRYAFATAHVHGAIYKQRGWLTSAGKDIKNKEEILALLEAIHLPKRVAIIHCPGHQRGTDPVATGNRKADEAAKQAAQSTRILTETTKNAGKRTADGSEFEKRTADGSEFESPKKKAKVE

SEQ ID NO: 1725 - protein, 2127 aa, synthetic construct
MPAAKRVKLDGGDKKYSIGLDIGTNSVGWAVITDEYKVPSKKFKVLGNTDRHSIKKNLIGALLFDSGETAEATRLKRTARRRYTRRKNRICYLQEIFSNEMAKVDDSFFHRLEESFLVEEDKKHERHPIFGNIVDEVAYHEKYPTIYHLRKKLVDSTDKADLRLIYLALAHMIKFRGHFLIEGDLNPDNSDVDKLFIQLVQTYNQLFEENPINASGVDAKAILSARLSKSRRLENLIAQLPGEKKNGLFGNLIALSLGLTPNFKSNFDLAEDAKLQLSKDTYDDDLDNLLAQIGDQYADLFLAAKNLSDAILLSDILRVNTEITKAPLSASMIKRYDEHHQDLTLLKALVRQQLPEKYKEIFFDQSKNGYAGYIDGGASQEEFYKFIKPILEKMDGTEELLVKLNREDLLRKQRTFDNGSIPHQIHLGELHAILRRQEDFYPFLKDNREKIEKILTFRIPYYVGPLARGNSRFAWMTRKSEETITPWNFEEVVDKGASAQSFIERMTNFDKNLPNEKVLPKHSLLYEYFTVYNELTKVKYVTEGMRKPAFLSGEQKKAIVDLLFKTNRKVTVKQLKEDYFKKIECFDSVEISGVEDRFNASLGTYHDLLKIIKDKDFLDNEENEDILEDIVLTLTLFEDREMIEERLKTYAHLFDDKVMKQLKRRRYTGWGRLSRKLINGIRDKQSGKTILDFLKSDGFANRNFMQLIHDDSLTFKEDIQKAQVSGQGDSLHEHIANLAGSPAIKKGILQTVKVVDELVKVMGRHKPENIVIEMARENQTTQKGQKNSRERMKRIEEGIKELGSQILKEHPVENTQLQNEKLYLYYLQNGRDMYVDQELDINRLSDYDVDHIVPQSFLKDDSIDNKVLTRSDKARGKSDNVPSEEVVKKMKNYWRQLLNAKLITQRKFDNLTKAERGGLSELDKAGFIKRQLVETRQITKHVAQILDSRMNTKYDENDKLIREVKVITLKSKLVSDFRKDFQFYKVREINNYHHAHDAYLNAVVGTALIKKYPKLESEFVYGDYKVYDVRKMIAKSEQEIGKATAKYFFYSNIMNFFKTEITLANGEIRKRPLIETNGETGEIVWDKGRDFATVRKVLSMPQVNIVKKTEVQTGGFSKESILPKRNSDKLIARKKDWDPKKYGGFDSPTVAYSVLVVAKVEKGKSKKLKSVKELLGITIMERSSFEKNPIDFLEAKGYKEVKKDLIIKLPKYSLFELENGRKRMLASAGELQKGNELALPSKYVNFLYLASHYEKLKGSPEDNEQKQLFVEQHKHYLDEIIEQISEFSKRVILADANLDKVLSAYNKHRDKPIREQAENIIHLFTLTNLGAPAAFKYFDTTIDRKRYTSTKEVLDATLIHQSITGLYETRIDLSQLGGDGGGSSEAAAKGGSGGLLGRDLLTKLKAQIQFSTEGPQVTWEDRPAMCLVLNLEEEYRLHEKPVPPSIDPSWLQLFPMVWAEKAGMGLANQVPPVVVELKSDASPVAVRQYPMSKEAREGIRPHIQRFLDLGILVPCQSPWNTPLLPVKKPGTNDYRPVQDLREVNKRVQDIHPTVPNPYNLLSSLPPSHTWYSVLDLKDAFFCLKLHPNSQPLFAFEWRDPEKGNTGQLTWTRLPQGFKNSPTLFNEALHRDLASFRALNPQVVMLQYVDDLLVAAPTYRDCKEGTRRLLQELSKLGYRVSAKKAQLCREEVTYLGYLLKGGKRWLTPARKATVMKIPTPTTPRQVREFLGKAGFCRLFIPGFASLAAPLYPLTRPKVPFTWTEAHQEAFGRIKEALLSAPALALPDLTKPFALYVDEKEGVARGVLTQTLGPWRRPVAYLSKKLDPVASGWPTCLKAIAAVALLLKDADKLTLGQNVLVIAPHNLESIVRQPPDRWMTNARMTHYQSLLLNERVSFAPPAILNPATLLPVESDDTPIHICSEILAEETGTRPDLRDQPLPGVPAWYTDGSSFIMDGRRQAGAAIVDNKRTVWASNLPEGTSAQKAELIALTQALRLAEGKSINIYTDSRYAFATAHVHGAIYKQRGWLTSAGKDIKNKEEILALLEAIHLPKRVAIIHCPGHQRGTDPVATGNRKADEAAKQAAQSTRILTETTKNAGKRTADGSEFEKRTADGSEFESPKKKAKVE

SEQ ID NO: 1726 - protein, 2127 aa, synthetic construct
MPAAKRVKLDGGDKKYSIGLDIGTNSVGWAVITDEYKVPSKKFKVLGNTDRHSIKKNLIGALLFDSGETAEATRLKRTARRRYTRRKNRICYLQEIFSNEMAKVDDSFFHRLEESFLVEEDKKHERHPIFGNIVDEVAYHEKYPTIYHLRKKLVDSTDKADLRLIYLALAHMIKFRGHFLIEGDLNPDNSDVDKLFIQLVQTYNQLFEENPINASGVDAKAILSARLSKSRRLENLIAQLPGEKKNGLFGNLIALSLGLTPNFKSNFDLAEDAKLQLSKDTYDDDLDNLLAQIGDQYADLFLAAKNLSDAILLSDILRVNTEITKAPLSASMIKRYDEHHQDLTLLKALVRQQLPEKYKEIFFDQSKNGYAGYIDGGASQEEFYKFIKPILEKMDGTEELLVKLNREDLLRKQRTFDNGSIPHQIHLGELHAILRRQEDFYPFLKDNREKIEKILTFRIPYYVGPLARGNSRFAWMTRKSEETITPWNFEEVVDKGASAQSFIERMTNFDKNLPNEKVLPKHSLLYEYFTVYNELTKVKYVTEGMRKPAFLSGEQKKAIVDLLFKTNRKVTVKQLKEDYFKKIECFDSVEISGVEDRFNASLGTYHDLLKIIKDKDFLDNEENEDILEDIVLTLTLFEDREMIEERLKTYAHLFDDKVMKQLKRRRYTGWGRLSRKLINGIRDKQSGKTILDFLKSDGFANRNFMQLIHDDSLTFKEDIQKAQVSGQGDSLHEHIANLAGSPAIKKGILQTVKVVDELVKVMGRHKPENIVIEMARENQTTQKGQKNSRERMKRIEEGIKELGSQILKEHPVENTQLQNEKLYLYYLQNGRDMYVDQELDINRLSDYDVDHIVPQSFLKDDSIDNKVLTRSDKARGKSDNVPSEEVVKKMKNYWRQLLNAKLITQRKFDNLTKAERGGLSELDKAGFIKRQLVETRQITKHVAQILDSRMNTKYDENDKLIREVKVITLKSKLVSDFRKDFQFYKVREINNYHHAHDAYLNAVVGTALIKKYPKLESEFVYGDYKVYDVRKMIAKSEQEIGKATAKYFFYSNIMNFFKTEITLANGEIRKRPLIETNGETGEIVWDKGRDFATVRKVLSMPQVNIVKKTEVQTGGFSKESILPKRNSDKLIARKKDWDPKKYGGFDSPTVAYSVLVVAKVEKGKSKKLKSVKELLGITIMERSSFEKNPIDFLEAKGYKEVKKDLIIKLPKYSLFELENGRKRMLASAGELQKGNELALPSKYVNFLYLASHYEKLKGSPEDNEQKQLFVEQHKHYLDEIIEQISEFSKRVILADANLDKVLSAYNKHRDKPIREQAENIIHLFTLTNLGAPAAFKYFDTTIDRKRYTSTKEVLDATLIHQSITGLYETRIDLSQLGGDGGGGGGSSEAAAKGGLLGRDLLTKLKAQIQFSTEGPQVTWEDRPAMCLVLNLEEEYRLHEKPVPPSIDPSWLQLFPMVWAEKAGMGLANQVPPVVVELKSDASPVAVRQYPMSKEAREGIRPHIQRFLDLGILVPCQSPWNTPLLPVKKPGTNDYRPVQDLREVNKRVQDIHPTVPNPYNLLSSLPPSHTWYSVLDLKDAFFCLKLHPNSQPLFAFEWRDPEKGNTGQLTWTRLPQGFKNSPTLFNEALHRDLASFRALNPQVVMLQYVDDLLVAAPTYRDCKEGTRRLLQELSKLGYRVSAKKAQLCREEVTYLGYLLKGGKRWLTPARKATVMKIPTPTTPRQVREFLGKAGFCRLFIPGFASLAAPLYPLTRPKVPFTWTEAHQEAFGRIKEALLSAPALALPDLTKPFALYVDEKEGVARGVLTQTLGPWRRPVAYLSKKLDPVASGWPTCLKAIAAVALLLKDADKLTLGQNVLVIAPHNLESIVRQPPDRWMTNARMTHYQSLLLNERVSFAPPAILNPATLLPVESDDTPIHICSEILAEETGTRPDLRDQPLPGVPAWYTDGSSFIMDGRRQAGAAIVDNKRTVWASNLPEGTSAQKAELIALTQALRLAEGKSINIYTDSRYAFATAHVHGAIYKQRGWLTSAGKDIKNKEEILALLEAIHLPKRVAIIHCPGHQRGTDPVATGNRKADEAAKQAAQSTRILTETTKNAGKRTADGSEFEKRTADGSEFESPKKKAKVE

SEQ ID NO: 1727 - protein, 2121 aa, synthetic construct
MPAAKRVKLDGGDKKYSIGLDIGTNSVGWAVITDEYKVPSKKFKVLGNTDRHSIKKNLIGALLFDSGETAEATRLKRTARRRYTRRKNRICYLQEIFSNEMAKVDDSFFHRLEESFLVEEDKKHERHPIFGNIVDEVAYHEKYPTIYHLRKKLVDSTDKADLRLIYLALAHMIKFRGHFLIEGDLNPDNSDVDKLFIQLVQTYNQLFEENPINASGVDAKAILSARLSKSRRLENLIAQLPGEKKNGLFGNLIALSLGLTPNFKSNFDLAEDAKLQLSKDTYDDDLDNLLAQIGDQYADLFLAAKNLSDAILLSDILRVNTEITKAPLSASMIKRYDEHHQDLTLLKALVRQQLPEKYKEIFFDQSKNGYAGYIDGGASQEEFYKFIKPILEKMDGTEELLVKLNREDLLRKQRTFDNGSIPHQIHLGELHAILRRQEDFYPFLKDNREKIEKILTFRIPYYVGPLARGNSRFAWMTRKSEETITPWNFEEVVDKGASAQSFIERMTNFDKNLPNEKVLPKHSLLYEYFTVYNELTKVKYVTEGMRKPAFLSGEQKKAIVDLLFKTNRKVTVKQLKEDYFKKIECFDSVEISGVEDRFNASLGTYHDLLKIIKDKDFLDNEENEDILEDIVLTLTLFEDREMIEERLKTYAHLFDDKVMKQLKRRRYTGWGRLSRKLINGIRDKQSGKTILDFLKSDGFANRNFMQLIHDDSLTFKEDIQKAQVSGQGDSLHEHIANLAGSPAIKKGILQTVKVVDELVKVMGRHKPENIVIEMARENQTTQKGQKNSRERMKRIEEGIKELGSQILKEHPVENTQLQNEKLYLYYLQNGRDMYVDQELDINRLSDYDVDHIVPQSFLKDDSIDNKVLTRSDKARGKSDNVPSEEVVKKMKNYWRQLLNAKLITQRKFDNLTKAERGGLSELDKAGFIKRQLVETRQITKHVAQILDSRMNTKYDENDKLIREVKVITLKSKLVSDFRKDFQFYKVREINNYHHAHDAYLNAVVGTALIKKYPKLESEFVYGDYKVYDVRKMIAKSEQEIGKATAKYFFYSNIMNFFKTEITLANGEIRKRPLIETNGETGEIVWDKGRDFATVRKVLSMPQVNIVKKTEVQTGGFSKESILPKRNSDKLIARKKDWDPKKYGGFDSPTVAYSVLVVAKVEKGKSKKLKSVKELLGITIMERSSFEKNPIDFLEAKGYKEVKKDLIIKLPKYSLFELENGRKRMLASAGELQKGNELALPSKYVNFLYLASHYEKLKGSPEDNEQKQLFVEQHKHYLDEIIEQISEFSKRVILADANLDKVLSAYNKHRDKPIREQAENIIHLFTLTNLGAPAAFKYFDTTIDRKRYTSTKEVLDATLIHQSITGLYETRIDLSQLGGDGGPAPAPGGLLGRDLLTKLKAQIQFSTEGPQVTWEDRPAMCLVLNLEEEYRLHEKPVPPSIDPSWLQLFPMVWAEKAGMGLANQVPPVVVELKSDASPVAVRQYPMSKEAREGIRPHIQRFLDLGILVPCQSPWNTPLLPVKKPGTNDYRPVQDLREVNKRVQDIHPTVPNPYNLLSSLPPSHTWYSVLDLKDAFFCLKLHPNSQPLFAFEWRDPEKGNTGQLTWTRLPQGFKNSPTLFNEALHRDLASFRALNPQVVMLQYVDDLLVAAPTYRDCKEGTRRLLQELSKLGYRVSAKKAQLCREEVTYLGYLLKGGKRWLTPARKATVMKIPTPTTPRQVREFLGKAGFCRLFIPGFASLAAPLYPLTRPKVPFTWTEAHQEAFGRIKEALLSAPALALPDLTKPFALYVDEKEGVARGVLTQTLGPWRRPVAYLSKKLDPVASGWPTCLKAIAAVALLLKDADKLTLGQNVLVIAPHNLESIVRQPPDRWMTNARMTHYQSLLLNERVSFAPPAILNPATLLPVESDDTPIHICSEILAEETGTRPDLRDQPLPGVPAWYTDGSSFIMDGRRQAGAAIVDNKRTVWASNLPEGTSAQKAELIALTQALRLAEGKSINIYTDSRYAFATAHVHGAIYKQRGWLTSAGKDIKNKEEILALLEAIHLPKRVAIIHCPGHQRGTDPVATGNRKADEAAKQAAQSTRILTETTKNAGKRTADGSEFEKRTADGSEFESPKKKAKVE

SEQ ID NO: 1728 - protein, 2122 aa, synthetic construct
MPAAKRVKLDGGDKKYSIGLDIGTNSVGWAVITDEYKVPSKKFKVLGNTDRHSIKKNLIGALLFDSGETAEATRLKRTARRRYTRRKNRICYLQEIFSNEMAKVDDSFFHRLEESFLVEEDKKHERHPIFGNIVDEVAYHEKYPTIYHLRKKLVDSTDKADLRLIYLALAHMIKFRGHFLIEGDLNPDNSDVDKLFIQLVQTYNQLFEENPINASGVDAKAILSARLSKSRRLENLIAQLPGEKKNGLFGNLIALSLGLTPNFKSNFDLAEDAKLQLSKDTYDDDLDNLLAQIGDQYADLFLAAKNLSDAILLSDILRVNTEITKAPLSASMIKRYDEHHQDLTLLKALVRQQLPEKYKEIFFDQSKNGYAGYIDGGASQEEFYKFIKPILEKMDGTEELLVKLNREDLLRKQRTFDNGSIPHQIHLGELHAILRRQEDFYPFLKDNREKIEKILTFRIPYYVGPLARGNSRFAWMTRKSEETITPWNFEEVVDKGASAQSFIERMTNFDKNLPNEKVLPKHSLLYEYFTVYNELTKVKYVTEGMRKPAFLSGEQKKAIVDLLFKTNRKVTVKQLKEDYFKKIECFDSVEISGVEDRFNASLGTYHDLLKIIKDKDFLDNEENEDILEDIVLTLTLFEDREMIEERLKTYAHLFDDKVMKQLKRRRYTGWGRLSRKLINGIRDKQSGKTILDFLKSDGFANRNFMQLIHDDSLTFKEDIQKAQVSGQGDSLHEHIANLAGSPAIKKGILQTVKVVDELVKVMGRHKPENIVIEMARENQTTQKGQKNSRERMKRIEEGIKELGSQILKEHPVENTQLQNEKLYLYYLQNGRDMYVDQELDINRLSDYDVDHIVPQSFLKDDSIDNKVLTRSDKARGKSDNVPSEEVVKKMKNYWRQLLNAKLITQRKFDNLTKAERGGLSELDKAGFIKRQLVETRQITKHVAQILDSRMNTKYDENDKLIREVKVITLKSKLVSDFRKDFQFYKVREINNYHHAHDAYLNAVVGTALIKKYPKLESEFVYGDYKVYDVRKMIAKSEQEIGKATAKYFFYSNIMNFFKTEITLANGEIRKRPLIETNGETGEIVWDKGRDFATVRKVLSMPQVNIVKKTEVQTGGFSKESILPKRNSDKLIARKKDWDPKKYGGFDSPTVAYSVLVVAKVEKGKSKKLKSVKELLGITIMERSSFEKNPIDFLEAKGYKEVKKDLIIKLPKYSLFELENGRKRMLASAGELQKGNELALPSKYVNFLYLASHYEKLKGSPEDNEQKQLFVEQHKHYLDEIIEQISEFSKRVILADANLDKVLSAYNKHRDKPIREQAENIIHLFTLTNLGAPAAFKYFDTTIDRKRYTSTKEVLDATLIHQSITGLYETRIDLSQLGGDGGPAPGGSGGLLGRDLLTKLKAQIQFSTEGPQVTWEDRPAMCLVLNLEEEYRLHEKPVPPSIDPSWLQLFPMVWAEKAGMGLANQVPPVVVELKSDASPVAVRQYPMSKEAREGIRPHIQRFLDLGILVPCQSPWNTPLLPVKKPGTNDYRPVQDLREVNKRVQDIHPTVPNPYNLLSSLPPSHTWYSVLDLKDAFFCLKLHPNSQPLFAFEWRDPEKGNTGQLTWTRLPQGFKNSPTLFNEALHRDLASFRALNPQVVMLQYVDDLLVAAPTYRDCKEGTRRLLQELSKLGYRVSAKKAQLCREEVTYLGYLLKGGKRWLTPARKATVMKIPTPTTPRQVREFLGKAGFCRLFIPGFASLAAPLYPLTRPKVPFTWTEAHQEAFGRIKEALLSAPALALPDLTKPFALYVDEKEGVARGVLTQTLGPWRRPVAYLSKKLDPVASGWPTCLKAIAAVALLLKDADKLTLGQNVLVIAPHNLESIVRQPPDRWMTNARMTHYQSLLLNERVSFAPPAILNPATLLPVESDDTPIHICSEILAEETGTRPDLRDQPLPGVPAWYTDGSSFIMDGRRQAGAAIVDNKRTVWASNLPEGTSAQKAELIALTQALRLAEGKSINIYTDSRYAFATAHVHGAIYKQRGWLTSAGKDIKNKEEILALLEAIHLPKRVAIIHCPGHQRGTDPVATGNRKADEAAKQAAQSTRILTETTKNAGKRTADGSEFEKRTADGSEFESPKKKAKVE

SEQ ID NO: 1729 - protein, 2131 aa, synthetic construct
MPAAKRVKLDGGDKKYSIGLDIGTNSVGWAVITDEYKVPSKKFKVLGNTDRHSIKKNLIGALLFDSGETAEATRLKRTARRRYTRRKNRICYLQEIFSNEMAKVDDSFFHRLEESFLVEEDKKHERHPIFGNIVDEVAYHEKYPTIYHLRKKLVDSTDKADLRLIYLALAHMIKFRGHFLIEGDLNPDNSDVDKLFIQLVQTYNQLFEENPINASGVDAKAILSARLSKSRRLENLIAQLPGEKKNGLFGNLIALSLGLTPNFKSNFDLAEDAKLQLSKDTYDDDLDNLLAQIGDQYADLFLAAKNLSDAILLSDILRVNTEITKAPLSASMIKRYDEHHQDLTLLKALVRQQLPEKYKEIFFDQSKNGYAGYIDGGASQEEFYKFIKPILEKMDGTEELLVKLNREDLLRKQRTFDNGSIPHQIHLGELHAILRRQEDFYPFLKDNREKIEKILTFRIPYYVGPLARGNSRFAWMTRKSEETITPWNFEEVVDKGASAQSFIERMTNFDKNLPNEKVLPKHSLLYEYFTVYNELTKVKYVTEGMRKPAFLSGEQKKAIVDLLFKTNRKVTVKQLKEDYFKKIECFDSVEISGVEDRFNASLGTYHDLLKIIKDKDFLDNEENEDILEDIVLTLTLFEDREMIEERLKTYAHLFDDKVMKQLKRRRYTGWGRLSRKLINGIRDKQSGKTILDFLKSDGFANRNFMQLIHDDSLTFKEDIQKAQVSGQGDSLHEHIANLAGSPAIKKGILQTVKVVDELVKVMGRHKPENIVIEMARENQTTQKGQKNSRERMKRIEEGIKELGSQILKEHPVENTQLQNEKLYLYYLQNGRDMYVDQELDINRLSDYDVDHIVPQSFLKDDSIDNKVLTRSDKARGKSDNVPSEEVVKKMKNYWRQLLNAKLITQRKFDNLTKAERGGLSELDKAGFIKRQLVETRQITKHVAQILDSRMNTKYDENDKLIREVKVITLKSKLVSDFRKDFQFYKVREINNYHHAHDAYLNAVVGTALIKKYPKLESEFVYGDYKVYDVRKMIAKSEQEIGKATAKYFFYSNIMNFFKTEITLANGEIRKRPLIETNGETGEIVWDKGRDFATVRKVLSMPQVNIVKKTEVQTGGFSKESILPKRNSDKLIARKKDWDPKKYGGFDSPTVAYSVLVVAKVEKGKSKKLKSVKELLGITIMERSSFEKNPIDFLEAKGYKEVKKDLIIKLPKYSLFELENGRKRMLASAGELQKGNELALPSKYVNFLYLASHYEKLKGSPEDNEQKQLFVEQHKHYLDEIIEQISEFSKRVILADANLDKVLSAYNKHRDKPIREQAENIIHLFTLTNLGAPAAFKYFDTTIDRKRYTSTKEVLDATLIHQSITGLYETRIDLSQLGGDGGGGGGSGGGGSGGGGSGGLLGRDLLTKLKAQIQFSTEGPQVTWEDRPAMCLVLNLEEEYRLHEKPVPPSIDPSWLQLFPMVWAEKAGMGLANQVPPVVVELKSDASPVAVRQYPMSKEAREGIRPHIQRFLDLGILVPCQSPWNTPLLPVKKPGTNDYRPVQDLREVNKRVQDIHPTVPNPYNLLSSLPPSHTWYSVLDLKDAFFCLKLHPNSQPLFAFEWRDPEKGNTGQLTWTRLPQGFKNSPTLFNEALHRDLASFRALNPQVVMLQYVDDLLVAAPTYRDCKEGTRRLLQELSKLGYRVSAKKAQLCREEVTYLGYLLKGGKRWLTPARKATVMKIPTPTTPRQVREFLGKAGFCRLFIPGFASLAAPLYPLTRPKVPFTWTEAHQEAFGRIKEALLSAPALALPDLTKPFALYVDEKEGVARGVLTQTLGPWRRPVAYLSKKLDPVASGWPTCLKAIAAVALLLKDADKLTLGQNVLVIAPHNLESIVRQPPDRWMTNARMTHYQSLLLNERVSFAPPAILNPATLLPVESDDTPIHICSEILAEETGTRPDLRDQPLPGVPAWYTDGSSFIMDGRRQAGAAIVDNKRTVWASNLPEGTSAQKAELIALTQALRLAEGKSINIYTDSRYAFATAHVHGAIYKQRGWLTSAGKDIKNKEEILALLEAIHLPKRVAIIHCPGHQRGTDPVATGNRKADEAAKQAAQSTRILTETTKNAGKRTADGSEFEKRTADGSEFESPKKKAKVE

SEQ ID NO: 1730 - protein, 2125 aa, synthetic construct
MPAAKRVKLDGGDKKYSIGLDIGTNSVGWAVITDEYKVPSKKFKVLGNTDRHSIKKNLIGALLFDSGETAEATRLKRTARRRYTRRKNRICYLQEIFSNEMAKVDDSFFHRLEESFLVEEDKKHERHPIFGNIVDEVAYHEKYPTIYHLRKKLVDSTDKADLRLIYLALAHMIKFRGHFLIEGDLNPDNSDVDKLFIQLVQTYNQLFEENPINASGVDAKAILSARLSKSRRLENLIAQLPGEKKNGLFGNLIALSLGLTPNFKSNFDLAEDAKLQLSKDTYDDDLDNLLAQIGDQYADLFLAAKNLSDAILLSDILRVNTEITKAPLSASMIKRYDEHHQDLTLLKALVRQQLPEKYKEIFFDQSKNGYAGYIDGGASQEEFYKFIKPILEKMDGTEELLVKLNREDLLRKQRTFDNGSIPHQIHLGELHAILRRQEDFYPFLKDNREKIEKILTFRIPYYVGPLARGNSRFAWMTRKSEETITPWNFEEVVDKGASAQSFIERMTNFDKNLPNEKVLPKHSLLYEYFTVYNELTKVKYVTEGMRKPAFLSGEQKKAIVDLLFKTNRKVTVKQLKEDYFKKIECFDSVEISGVEDRFNASLGTYHDLLKIIKDKDFLDNEENEDILEDIVLTLTLFEDREMIEERLKTYAHLFDDKVMKQLKRRRYTGWGRLSRKLINGIRDKQSGKTILDFLKSDGFANRNFMQLIHDDSLTFKEDIQKAQVSGQGDSLHEHIANLAGSPAIKKGILQTVKVVDELVKVMGRHKPENIVIEMARENQTTQKGQKNSRERMKRIEEGIKELGSQILKEHPVENTQLQNEKLYLYYLQNGRDMYVDQELDINRLSDYDVDHIVPQSFLKDDSIDNKVLTRSDKARGKSDNVPSEEVVKKMKNYWRQLLNAKLITQRKFDNLTKAERGGLSELDKAGFIKRQLVETRQITKHVAQILDSRMNTKYDENDKLIREVKVITLKSKLVSDFRKDFQFYKVREINNYHHAHDAYLNAVVGTALIKKYPKLESEFVYGDYKVYDVRKMIAKSEQEIGKATAKYFFYSNIMNFFKTEITLANGEIRKRPLIETNGETGEIVWDKGRDFATVRKVLSMPQVNIVKKTEVQTGGFSKESILPKRNSDKLIARKKDWDPKKYGGFDSPTVAYSVLVVAKVEKGKSKKLKSVKELLGITIMERSSFEKNPIDFLEAKGYKEVKKDLIIKLPKYSLFELENGRKRMLASAGELQKGNELALPSKYVNFLYLASHYEKLKGSPEDNEQKQLFVEQHKHYLDEIIEQISEFSKRVILADANLDKVLSAYNKHRDKPIREQAENIIHLFTLTNLGAPAAFKYFDTTIDRKRYTSTKEVLDATLIHQSITGLYETRIDLSQLGGDGGGGSPAPGGGGGLLGRDLLTKLKAQIQFSTEGPQVTWEDRPAMCLVLNLEEEYRLHEKPVPPSIDPSWLQLFPMVWAEKAGMGLANQVPPVVVELKSDASPVAVRQYPMSKEAREGIRPHIQRFLDLGILVPCQSPWNTPLLPVKKPGTNDYRPVQDLREVNKRVQDIHPTVPNPYNLLSSLPPSHTWYSVLDLKDAFFCLKLHPNSQPLFAFEWRDPEKGNTGQLTWTRLPQGFKNSPTLFNEALHRDLASFRALNPQVVMLQYVDDLLVAAPTYRDCKEGTRRLLQELSKLGYRVSAKKAQLCREEVTYLGYLLKGGKRWLTPARKATVMKIPTPTTPRQVREFLGKAGFCRLFIPGFASLAAPLYPLTRPKVPFTWTEAHQEAFGRIKEALLSAPALALPDLTKPFALYVDEKEGVARGVLTQTLGPWRRPVAYLSKKLDPVASGWPTCLKAIAAVALLLKDADKLTLGQNVLVIAPHNLESIVRQPPDRWMTNARMTHYQSLLLNERVSFAPPAILNPATLLPVESDDTPIHICSEILAEETGTRPDLRDQPLPGVPAWYTDGSSFIMDGRRQAGAAIVDNKRTVWASNLPEGTSAQKAELIALTQALRLAEGKSINIYTDSRYAFATAHVHGAIYKQRGWLTSAGKDIKNKEEILALLEAIHLPKRVAIIHCPGHQRGTDPVATGNRKADEAAKQAAQSTRILTETTKNAGKRTADGSEFEKRTADGSEFESPKKKAKVE

SEQ ID NO: 1731 - protein, 2122 aa, synthetic construct
MPAAKRVKLDGGDKKYSIGLDIGTNSVGWAVITDEYKVPSKKFKVLGNTDRHSIKKNLIGALLFDSGETAEATRLKRTARRRYTRRKNRICYLQEIFSNEMAKVDDSFFHRLEESFLVEEDKKHERHPIFGNIVDEVAYHEKYPTIYHLRKKLVDSTDKADLRLIYLALAHMIKFRGHFLIEGDLNPDNSDVDKLFIQLVQTYNQLFEENPINASGVDAKAILSARLSKSRRLENLIAQLPGEKKNGLFGNLIALSLGLTPNFKSNFDLAEDAKLQLSKDTYDDDLDNLLAQIGDQYADLFLAAKNLSDAILLSDILRVNTEITKAPLSASMIKRYDEHHQDLTLLKALVRQQLPEKYKEIFFDQSKNGYAGYIDGGASQEEFYKFIKPILEKMDGTEELLVKLNREDLLRKQRTFDNGSIPHQIHLGELHAILRRQEDFYPFLKDNREKIEKILTFRIPYYVGPLARGNSRFAWMTRKSEETITPWNFEEVVDKGASAQSFIERMTNFDKNLPNEKVLPKHSLLYEYFTVYNELTKVKYVTEGMRKPAFLSGEQKKAIVDLLFKTNRKVTVKQLKEDYFKKIECFDSVEISGVEDRFNASLGTYHDLLKIIKDKDFLDNEENEDILEDIVLTLTLFEDREMIEERLKTYAHLFDDKVMKQLKRRRYTGWGRLSRKLINGIRDKQSGKTILDFLKSDGFANRNFMQLIHDDSLTFKEDIQKAQVSGQGDSLHEHIANLAGSPAIKKGILQTVKVVDELVKVMGRHKPENIVIEMARENQTTQKGQKNSRERMKRIEEGIKELGSQILKEHPVENTQLQNEKLYLYYLQNGRDMYVDQELDINRLSDYDVDHIVPQSFLKDDSIDNKVLTRSDKARGKSDNVPSEEVVKKMKNYWRQLLNAKLITQRKFDNLTKAERGGLSELDKAGFIKRQLVETRQITKHVAQILDSRMNTKYDENDKLIREVKVITLKSKLVSDFRKDFQFYKVREINNYHHAHDAYLNAVVGTALIKKYPKLESEFVYGDYKVYDVRKMIAKSEQEIGKATAKYFFYSNIMNFFKTEITLANGEIRKRPLIETNGETGEIVWDKGRDFATVRKVLSMPQVNIVKKTEVQTGGFSKESILPKRNSDKLIARKKDWDPKKYGGFDSPTVAYSVLVVAKVEKGKSKKLKSVKELLGITIMERSSFEKNPIDFLEAKGYKEVKKDLIIKLPKYSLFELENGRKRMLASAGELQKGNELALPSKYVNFLYLASHYEKLKGSPEDNEQKQLFVEQHKHYLDEIIEQISEFSKRVILADANLDKVLSAYNKHRDKPIREQAENIIHLFTLTNLGAPAAFKYFDTTIDRKRYTSTKEVLDATLIHQSITGLYETRIDLSQLGGDGGGSSPAPGGLLGRDLLTKLKAQIQFSTEGPQVTWEDRPAMCLVLNLEEEYRLHEKPVPPSIDPSWLQLFPMVWAEKAGMGLANQVPPVVVELKSDASPVAVRQYPMSKEAREGIRPHIQRFLDLGILVPCQSPWNTPLLPVKKPGTNDYRPVQDLREVNKRVQDIHPTVPNPYNLLSSLPPSHTWYSVLDLKDAFFCLKLHPNSQPLFAFEWRDPEKGNTGQLTWTRLPQGFKNSPTLFNEALHRDLASFRALNPQVVMLQYVDDLLVAAPTYRDCKEGTRRLLQELSKLGYRVSAKKAQLCREEVTYLGYLLKGGKRWLTPARKATVMKIPTPTTPRQVREFLGKAGFCRLFIPGFASLAAPLYPLTRPKVPFTWTEAHQEAFGRIKEALLSAPALALPDLTKPFALYVDEKEGVARGVLTQTLGPWRRPVAYLSKKLDPVASGWPTCLKAIAAVALLLKDADKLTLGQNVLVIAPHNLESIVRQPPDRWMTNARMTHYQSLLLNERVSFAPPAILNPATLLPVESDDTPIHICSEILAEETGTRPDLRDQPLPGVPAWYTDGSSFIMDGRRQAGAAIVDNKRTVWASNLPEGTSAQKAELIALTQALRLAEGKSINIYTDSRYAFATAHVHGAIYKQRGWLTSAGKDIKNKEEILALLEAIHLPKRVAIIHCPGHQRGTDPVATGNRKADEAAKQAAQSTRILTETTKNAGKRTADGSEFEKRTADGSEFESPKKKAKVE

SEQ ID NO: 1732 - protein, 2125 aa, synthetic construct
MPAAKRVKLDGGDKKYSIGLDIGTNSVGWAVITDEYKVPSKKFKVLGNTDRHSIKKNLIGALLFDSGETAEATRLKRTARRRYTRRKNRICYLQEIFSNEMAKVDDSFFHRLEESFLVEEDKKHERHPIFGNIVDEVAYHEKYPTIYHLRKKLVDSTDKADLRLIYLALAHMIKFRGHFLIEGDLNPDNSDVDKLFIQLVQTYNQLFEENPINASGVDAKAILSARLSKSRRLENLIAQLPGEKKNGLFGNLIALSLGLTPNFKSNFDLAEDAKLQLSKDTYDDDLDNLLAQIGDQYADLFLAAKNLSDAILLSDILRVNTEITKAPLSASMIKRYDEHHQDLTLLKALVRQQLPEKYKEIFFDQSKNGYAGYIDGGASQEEFYKFIKPILEKMDGTEELLVKLNREDLLRKQRTFDNGSIPHQIHLGELHAILRRQEDFYPFLKDNREKIEKILTFRIPYYVGPLARGNSRFAWMTRKSEETITPWNFEEVVDKGASAQSFIERMTNFDKNLPNEKVLPKHSLLYEYFTVYNELTKVKYVTEGMRKPAFLSGEQKKAIVDLLFKTNRKVTVKQLKEDYFKKIECFDSVEISGVEDRFNASLGTYHDLLKIIKDKDFLDNEENEDILEDIVLTLTLFEDREMIEERLKTYAHLFDDKVMKQLKRRRYTGWGRLSRKLINGIRDKQSGKTILDFLKSDGFANRNFMQLIHDDSLTFKEDIQKAQVSGQGDSLHEHIANLAGSPAIKKGILQTVKVVDELVKVMGRHKPENIVIEMARENQTTQKGQKNSRERMKRIEEGIKELGSQILKEHPVENTQLQNEKLYLYYLQNGRDMYVDQELDINRLSDYDVDHIVPQSFLKDDSIDNKVLTRSDKARGKSDNVPSEEVVKKMKNYWRQLLNAKLITQRKFDNLTKAERGGLSELDKAGFIKRQLVETRQITKHVAQILDSRMNTKYDENDKLIREVKVITLKSKLVSDFRKDFQFYKVREINNYHHAHDAYLNAVVGTALIKKYPKLESEFVYGDYKVYDVRKMIAKSEQEIGKATAKYFFYSNIMNFFKTEITLANGEIRKRPLIETNGETGEIVWDKGRDFATVRKVLSMPQVNIVKKTEVQTGGFSKESILPKRNSDKLIARKKDWDPKKYGGFDSPTVAYSVLVVAKVEKGKSKKLKSVKELLGITIMERSSFEKNPIDFLEAKGYKEVKKDLIIKLPKYSLFELENGRKRMLASAGELQKGNELALPSKYVNFLYLASHYEKLKGSPEDNEQKQLFVEQHKHYLDEIIEQISEFSKRVILADANLDKVLSAYNKHRDKPIREQAENIIHLFTLTNLGAPAAFKYFDTTIDRKRYTSTKEVLDATLIHQSITGLYETRIDLSQLGGDGGGGSPAPGSSGGLLGRDLLTKLKAQIQFSTEGPQVTWEDRPAMCLVLNLEEEYRLHEKPVPPSIDPSWLQLFPMVWAEKAGMGLANQVPPVVVELKSDASPVAVRQYPMSKEAREGIRPHIQRFLDLGILVPCQSPWNTPLLPVKKPGTNDYRPVQDLREVNKRVQDIHPTVPNPYNLLSSLPPSHTWYSVLDLKDAFFCLKLHPNSQPLFAFEWRDPEKGNTGQLTWTRLPQGFKNSPTLFNEALHRDLASFRALNPQVVMLQYVDDLLVAAPTYRDCKEGTRRLLQELSKLGYRVSAKKAQLCREEVTYLGYLLKGGKRWLTPARKATVMKIPTPTTPRQVREFLGKAGFCRLFIPGFASLAAPLYPLTRPKVPFTWTEAHQEAFGRIKEALLSAPALALPDLTKPFALYVDEKEGVARGVLTQTLGPWRRPVAYLSKKLDPVASGWPTCLKAIAAVALLLKDADKLTLGQNVLVIAPHNLESIVRQPPDRWMTNARMTHYQSLLLNERVSFAPPAILNPATLLPVESDDTPIHICSEILAEETGTRPDLRDQPLPGVPAWYTDGSSFIMDGRRQAGAAIVDNKRTVWASNLPEGTSAQKAELIALTQALRLAEGKSINIYTDSRYAFATAHVHGAIYKQRGWLTSAGKDIKNKEEILALLEAIHLPKRVAIIHCPGHQRGTDPVATGNRKADEAAKQAAQSTRILTETTKNAGKRTADGSEFEKRTADGSEFESPKKKAKVE

SEQ ID NO: 1733 - protein, 2122 aa, synthetic construct
MPAAKRVKLDGGDKKYSIGLDIGTNSVGWAVITDEYKVPSKKFKVLGNTDRHSIKKNLIGALLFDSGETAEATRLKRTARRRYTRRKNRICYLQEIFSNEMAKVDDSFFHRLEESFLVEEDKKHERHPIFGNIVDEVAYHEKYPTIYHLRKKLVDSTDKADLRLIYLALAHMIKFRGHFLIEGDLNPDNSDVDKLFIQLVQTYNQLFEENPINASGVDAKAILSARLSKSRRLENLIAQLPGEKKNGLFGNLIALSLGLTPNFKSNFDLAEDAKLQLSKDTYDDDLDNLLAQIGDQYADLFLAAKNLSDAILLSDILRVNTEITKAPLSASMIKRYDEHHQDLTLLKALVRQQLPEKYKEIFFDQSKNGYAGYIDGGASQEEFYKFIKPILEKMDGTEELLVKLNREDLLRKQRTFDNGSIPHQIHLGELHAILRRQEDFYPFLKDNREKIEKILTFRIPYYVGPLARGNSRFAWMTRKSEETITPWNFEEVVDKGASAQSFIERMTNFDKNLPNEKVLPKHSLLYEYFTVYNELTKVKYVTEGMRKPAFLSGEQKKAIVDLLFKTNRKVTVKQLKEDYFKKIECFDSVEISGVEDRFNASLGTYHDLLKIIKDKDFLDNEENEDILEDIVLTLTLFEDREMIEERLKTYAHLFDDKVMKQLKRRRYTGWGRLSRKLINGIRDKQSGKTILDFLKSDGFANRNFMQLIHDDSLTFKEDIQKAQVSGQGDSLHEHIANLAGSPAIKKGILQTVKVVDELVKVMGRHKPENIVIEMARENQTTQKGQKNSRERMKRIEEGIKELGSQILKEHPVENTQLQNEKLYLYYLQNGRDMYVDQELDINRLSDYDVDHIVPQSFLKDDSIDNKVLTRSDKARGKSDNVPSEEVVKKMKNYWRQLLNAKLITQRKFDNLTKAERGGLSELDKAGFIKRQLVETRQITKHVAQILDSRMNTKYDENDKLIREVKVITLKSKLVSDFRKDFQFYKVREINNYHHAHDAYLNAVVGTALIKKYPKLESEFVYGDYKVYDVRKMIAKSEQEIGKATAKYFFYSNIMNFFKTEITLANGEIRKRPLIETNGETGEIVWDKGRDFATVRKVLSMPQVNIVKKTEVQTGGFSKESILPKRNSDKLIARKKDWDPKKYGGFDSPTVAYSVLVVAKVEKGKSKKLKSVKELLGITIMERSSFEKNPIDFLEAKGYKEVKKDLIIKLPKYSLFELENGRKRMLASAGELQKGNELALPSKYVNFLYLASHYEKLKGSPEDNEQKQLFVEQHKHYLDEIIEQISEFSKRVILADANLDKVLSAYNKHRDKPIREQAENIIHLFTLTNLGAPAAFKYFDTTIDRKRYTSTKEVLDATLIHQSITGLYETRIDLSQLGGDGGGGSGSSGGLLGRDLLTKLKAQIQFSTEGPQVTWEDRPAMCLVLNLEEEYRLHEKPVPPSIDPSWLQLFPMVWAEKAGMGLANQVPPVVVELKSDASPVAVRQYPMSKEAREGIRPHIQRFLDLGILVPCQSPWNTPLLPVKKPGTNDYRPVQDLREVNKRVQDIHPTVPNPYNLLSSLPPSHTWYSVLDLKDAFFCLKLHPNSQPLFAFEWRDPEKGNTGQLTWTRLPQGFKNSPTLFNEALHRDLASFRALNPQVVMLQYVDDLLVAAPTYRDCKEGTRRLLQELSKLGYRVSAKKAQLCREEVTYLGYLLKGGKRWLTPARKATVMKIPTPTTPRQVREFLGKAGFCRLFIPGFASLAAPLYPLTRPKVPFTWTEAHQEAFGRIKEALLSAPALALPDLTKPFALYVDEKEGVARGVLTQTLGPWRRPVAYLSKKLDPVASGWPTCLKAIAAVALLLKDADKLTLGQNVLVIAPHNLESIVRQPPDRWMTNARMTHYQSLLLNERVSFAPPAILNPATLLPVESDDTPIHICSEILAEETGTRPDLRDQPLPGVPAWYTDGSSFIMDGRRQAGAAIVDNKRTVWASNLPEGTSAQKAELIALTQALRLAEGKSINIYTDSRYAFATAHVHGAIYKQRGWLTSAGKDIKNKEEILALLEAIHLPKRVAIIHCPGHQRGTDPVATGNRKADEAAKQAAQSTRILTETTKNAGKRTADGSEFEKRTADGSEFESPKKKAKVE

SEQ ID NO: 1734 - protein, 2125 aa, synthetic construct
MPAAKRVKLDGGDKKYSIGLDIGTNSVGWAVITDEYKVPSKKFKVLGNTDRHSIKKNLIGALLFDSGETAEATRLKRTARRRYTRRKNRICYLQEIFSNEMAKVDDSFFHRLEESFLVEEDKKHERHPIFGNIVDEVAYHEKYPTIYHLRKKLVDSTDKADLRLIYLALAHMIKFRGHFLIEGDLNPDNSDVDKLFIQLVQTYNQLFEENPINASGVDAKAILSARLSKSRRLENLIAQLPGEKKNGLFGNLIALSLGLTPNFKSNFDLAEDAKLQLSKDTYDDDLDNLLAQIGDQYADLFLAAKNLSDAILLSDILRVNTEITKAPLSASMIKRYDEHHQDLTLLKALVRQQLPEKYKEIFFDQSKNGYAGYIDGGASQEEFYKFIKPILEKMDGTEELLVKLNREDLLRKQRTFDNGSIPHQIHLGELHAILRRQEDFYPFLKDNREKIEKILTFRIPYYVGPLARGNSRFAWMTRKSEETITPWNFEEVVDKGASAQSFIERMTNFDKNLPNEKVLPKHSLLYEYFTVYNELTKVKYVTEGMRKPAFLSGEQKKAIVDLLFKTNRKVTVKQLKEDYFKKIECFDSVEISGVEDRFNASLGTYHDLLKIIKDKDFLDNEENEDILEDIVLTLTLFEDREMIEERLKTYAHLFDDKVMKQLKRRRYTGWGRLSRKLINGIRDKQSGKTILDFLKSDGFANRNFMQLIHDDSLTFKEDIQKAQVSGQGDSLHEHIANLAGSPAIKKGILQTVKVVDELVKVMGRHKPENIVIEMARENQTTQKGQKNSRERMKRIEEGIKELGSQILKEHPVENTQLQNEKLYLYYLQNGRDMYVDQELDINRLSDYDVDHIVPQSFLKDDSIDNKVLTRSDKARGKSDNVPSEEVVKKMKNYWRQLLNAKLITQRKFDNLTKAERGGLSELDKAGFIKRQLVETRQITKHVAQILDSRMNTKYDENDKLIREVKVITLKSKLVSDFRKDFQFYKVREINNYHHAHDAYLNAVVGTALIKKYPKLESEFVYGDYKVYDVRKMIAKSEQEIGKATAKYFFYSNIMNFFKTEITLANGEIRKRPLIETNGETGEIVWDKGRDFATVRKVLSMPQVNIVKKTEVQTGGFSKESILPKRNSDKLIARKKDWDPKKYGGFDSPTVAYSVLVVAKVEKGKSKKLKSVKELLGITIMERSSFEKNPIDFLEAKGYKEVKKDLIIKLPKYSLFELENGRKRMLASAGELQKGNELALPSKYVNFLYLASHYEKLKGSPEDNEQKQLFVEQHKHYLDEIIEQISEFSKRVILADANLDKVLSAYNKHRDKPIREQAENIIHLFTLTNLGAPAAFKYFDTTIDRKRYTSTKEVLDATLIHQSITGLYETRIDLSQLGGDGGGGGGSSPAPGGLLGRDLLTKLKAQIQFSTEGPQVTWEDRPAMCLVLNLEEEYRLHEKPVPPSIDPSWLQLFPMVWAEKAGMGLANQVPPVVVELKSDASPVAVRQYPMSKEAREGIRPHIQRFLDLGILVPCQSPWNTPLLPVKKPGTNDYRPVQDLREVNKRVQDIHPTVPNPYNLLSSLPPSHTWYSVLDLKDAFFCLKLHPNSQPLFAFEWRDPEKGNTGQLTWTRLPQGFKNSPTLFNEALHRDLASFRALNPQVVMLQYVDDLLVAAPTYRDCKEGTRRLLQELSKLGYRVSAKKAQLCREEVTYLGYLLKGGKRWLTPARKATVMKIPTPTTPRQVREFLGKAGFCRLFIPGFASLAAPLYPLTRPKVPFTWTEAHQEAFGRIKEALLSAPALALPDLTKPFALYVDEKEGVARGVLTQTLGPWRRPVAYLSKKLDPVASGWPTCLKAIAAVALLLKDADKLTLGQNVLVIAPHNLESIVRQPPDRWMTNARMTHYQSLLLNERVSFAPPAILNPATLLPVESDDTPIHICSEILAEETGTRPDLRDQPLPGVPAWYTDGSSFIMDGRRQAGAAIVDNKRTVWASNLPEGTSAQKAELIALTQALRLAEGKSINIYTDSRYAFATAHVHGAIYKQRGWLTSAGKDIKNKEEILALLEAIHLPKRVAIIHCPGHQRGTDPVATGNRKADEAAKQAAQSTRILTETTKNAGKRTADGSEFEKRTADGSEFESPKKKAKVE

SEQ ID NO: 1735 - protein, 2125 aa, synthetic construct
MPAAKRVKLDGGDKKYSIGLDIGTNSVGWAVITDEYKVPSKKFKVLGNTDRHSIKKNLIGALLFDSGETAEATRLKRTARRRYTRRKNRICYLQEIFSNEMAKVDDSFFHRLEESFLVEEDKKHERHPIFGNIVDEVAYHEKYPTIYHLRKKLVDSTDKADLRLIYLALAHMIKFRGHFLIEGDLNPDNSDVDKLFIQLVQTYNQLFEENPINASGVDAKAILSARLSKSRRLENLIAQLPGEKKNGLFGNLIALSLGLTPNFKSNFDLAEDAKLQLSKDTYDDDLDNLLAQIGDQYADLFLAAKNLSDAILLSDILRVNTEITKAPLSASMIKRYDEHHQDLTLLKALVRQQLPEKYKEIFFDQSKNGYAGYIDGGASQEEFYKFIKPILEKMDGTEELLVKLNREDLLRKQRTFDNGSIPHQIHLGELHAILRRQEDFYPFLKDNREKIEKILTFRIPYYVGPLARGNSRFAWMTRKSEETITPWNFEEVVDKGASAQSFIERMTNFDKNLPNEKVLPKHSLLYEYFTVYNELTKVKYVTEGMRKPAFLSGEQKKAIVDLLFKTNRKVTVKQLKEDYFKKIECFDSVEISGVEDRFNASLGTYHDLLKIIKDKDFLDNEENEDILEDIVLTLTLFEDREMIEERLKTYAHLFDDKVMKQLKRRRYTGWGRLSRKLINGIRDKQSGKTILDFLKSDGFANRNFMQLIHDDSLTFKEDIQKAQVSGQGDSLHEHIANLAGSPAIKKGILQTVKVVDELVKVMGRHKPENIVIEMARENQTTQKGQKNSRERMKRIEEGIKELGSQILKEHPVENTQLQNEKLYLYYLQNGRDMYVDQELDINRLSDYDVDHIVPQSFLKDDSIDNKVLTRSDKARGKSDNVPSEEVVKKMKNYWRQLLNAKLITQRKFDNLTKAERGGLSELDKAGFIKRQLVETRQITKHVAQILDSRMNTKYDENDKLIREVKVITLKSKLVSDFRKDFQFYKVREINNYHHAHDAYLNAVVGTALIKKYPKLESEFVYGDYKVYDVRKMIAKSEQEIGKATAKYFFYSNIMNFFKTEITLANGEIRKRPLIETNGETGEIVWDKGRDFATVRKVLSMPQVNIVKKTEVQTGGFSKESILPKRNSDKLIARKKDWDPKKYGGFDSPTVAYSVLVVAKVEKGKSKKLKSVKELLGITIMERSSFEKNPIDFLEAKGYKEVKKDLIIKLPKYSLFELENGRKRMLASAGELQKGNELALPSKYVNFLYLASHYEKLKGSPEDNEQKQLFVEQHKHYLDEIIEQISEFSKRVILADANLDKVLSAYNKHRDKPIREQAENIIHLFTLTNLGAPAAFKYFDTTIDRKRYTSTKEVLDATLIHQSITGLYETRIDLSQLGGDGGGSSGGSPAPGGLLGRDLLTKLKAQIQFSTEGPQVTWEDRPAMCLVLNLEEEYRLHEKPVPPSIDPSWLQLFPMVWAEKAGMGLANQVPPVVVELKSDASPVAVRQYPMSKEAREGIRPHIQRFLDLGILVPCQSPWNTPLLPVKKPGTNDYRPVQDLREVNKRVQDIHPTVPNPYNLLSSLPPSHTWYSVLDLKDAFFCLKLHPNSQPLFAFEWRDPEKGNTGQLTWTRLPQGFKNSPTLFNEALHRDLASFRALNPQVVMLQYVDDLLVAAPTYRDCKEGTRRLLQELSKLGYRVSAKKAQLCREEVTYLGYLLKGGKRWLTPARKATVMKIPTPTTPRQVREFLGKAGFCRLFIPGFASLAAPLYPLTRPKVPFTWTEAHQEAFGRIKEALLSAPALALPDLTKPFALYVDEKEGVARGVLTQTLGPWRRPVAYLSKKLDPVASGWPTCLKAIAAVALLLKDADKLTLGQNVLVIAPHNLESIVRQPPDRWMTNARMTHYQSLLLNERVSFAPPAILNPATLLPVESDDTPIHICSEILAEETGTRPDLRDQPLPGVPAWYTDGSSFIMDGRRQAGAAIVDNKRTVWASNLPEGTSAQKAELIALTQALRLAEGKSINIYTDSRYAFATAHVHGAIYKQRGWLTSAGKDIKNKEEILALLEAIHLPKRVAIIHCPGHQRGTDPVATGNRKADEAAKQAAQSTRILTETTKNAGKRTADGSEFEKRTADGSEFESPKKKAKVE

SEQ ID NO: 1736 - protein, 2127 aa, synthetic construct
MPAAKRVKLDGGDKKYSIGLDIGTNSVGWAVITDEYKVPSKKFKVLGNTDRHSIKKNLIGALLFDSGETAEATRLKRTARRRYTRRKNRICYLQEIFSNEMAKVDDSFFHRLEESFLVEEDKKHERHPIFGNIVDEVAYHEKYPTIYHLRKKLVDSTDKADLRLIYLALAHMIKFRGHFLIEGDLNPDNSDVDKLFIQLVQTYNQLFEENPINASGVDAKAILSARLSKSRRLENLIAQLPGEKKNGLFGNLIALSLGLTPNFKSNFDLAEDAKLQLSKDTYDDDLDNLLAQIGDQYADLFLAAKNLSDAILLSDILRVNTEITKAPLSASMIKRYDEHHQDLTLLKALVRQQLPEKYKEIFFDQSKNGYAGYIDGGASQEEFYKFIKPILEKMDGTEELLVKLNREDLLRKQRTFDNGSIPHQIHLGELHAILRRQEDFYPFLKDNREKIEKILTFRIPYYVGPLARGNSRFAWMTRKSEETITPWNFEEVVDKGASAQSFIERMTNFDKNLPNEKVLPKHSLLYEYFTVYNELTKVKYVTEGMRKPAFLSGEQKKAIVDLLFKTNRKVTVKQLKEDYFKKIECFDSVEISGVEDRFNASLGTYHDLLKIIKDKDFLDNEENEDILEDIVLTLTLFEDREMIEERLKTYAHLFDDKVMKQLKRRRYTGWGRLSRKLINGIRDKQSGKTILDFLKSDGFANRNFMQLIHDDSLTFKEDIQKAQVSGQGDSLHEHIANLAGSPAIKKGILQTVKVVDELVKVMGRHKPENIVIEMARENQTTQKGQKNSRERMKRIEEGIKELGSQILKEHPVENTQLQNEKLYLYYLQNGRDMYVDQELDINRLSDYDVDHIVPQSFLKDDSIDNKVLTRSDKARGKSDNVPSEEVVKKMKNYWRQLLNAKLITQRKFDNLTKAERGGLSELDKAGFIKRQLVETRQITKHVAQILDSRMNTKYDENDKLIREVKVITLKSKLVSDFRKDFQFYKVREINNYHHAHDAYLNAVVGTALIKKYPKLESEFVYGDYKVYDVRKMIAKSEQEIGKATAKYFFYSNIMNFFKTEITLANGEIRKRPLIETNGETGEIVWDKGRDFATVRKVLSMPQVNIVKKTEVQTGGFSKESILPKRNSDKLIARKKDWDPKKYGGFDSPTVAYSVLVVAKVEKGKSKKLKSVKELLGITIMERSSFEKNPIDFLEAKGYKEVKKDLIIKLPKYSLFELENGRKRMLASAGELQKGNELALPSKYVNFLYLASHYEKLKGSPEDNEQKQLFVEQHKHYLDEIIEQISEFSKRVILADANLDKVLSAYNKHRDKPIREQAENIIHLFTLTNLGAPAAFKYFDTTIDRKRYTSTKEVLDATLIHQSITGLYETRIDLSQLGGDGGEAAAKGGGGGSGGLLGRDLLTKLKAQIQFSTEGPQVTWEDRPAMCLVLNLEEEYRLHEKPVPPSIDPSWLQLFPMVWAEKAGMGLANQVPPVVVELKSDASPVAVRQYPMSKEAREGIRPHIQRFLDLGILVPCQSPWNTPLLPVKKPGTNDYRPVQDLREVNKRVQDIHPTVPNPYNLLSSLPPSHTWYSVLDLKDAFFCLKLHPNSQPLFAFEWRDPEKGNTGQLTWTRLPQGFKNSPTLFNEALHRDLASFRALNPQVVMLQYVDDLLVAAPTYRDCKEGTRRLLQELSKLGYRVSAKKAQLCREEVTYLGYLLKGGKRWLTPARKATVMKIPTPTTPRQVREFLGKAGFCRLFIPGFASLAAPLYPLTRPKVPFTWTEAHQEAFGRIKEALLSAPALALPDLTKPFALYVDEKEGVARGVLTQTLGPWRRPVAYLSKKLDPVASGWPTCLKAIAAVALLLKDADKLTLGQNVLVIAPHNLESIVRQPPDRWMTNARMTHYQSLLLNERVSFAPPAILNPATLLPVESDDTPIHICSEILAEETGTRPDLRDQPLPGVPAWYTDGSSFIMDGRRQAGAAIVDNKRTVWASNLPEGTSAQKAELIALTQALRLAEGKSINIYTDSRYAFATAHVHGAIYKQRGWLTSAGKDIKNKEEILALLEAIHLPKRVAIIHCPGHQRGTDPVATGNRKADEAAKQAAQSTRILTETTKNAGKRTADGSEFEKRTADGSEFESPKKKAKVE

SEQ ID NO: 1737 - protein, 2127 aa, synthetic construct
MPAAKRVKLDGGDKKYSIGLDIGTNSVGWAVITDEYKVPSKKFKVLGNTDRHSIKKNLIGALLFDSGETAEATRLKRTARRRYTRRKNRICYLQEIFSNEMAKVDDSFFHRLEESFLVEEDKKHERHPIFGNIVDEVAYHEKYPTIYHLRKKLVDSTDKADLRLIYLALAHMIKFRGHFLIEGDLNPDNSDVDKLFIQLVQTYNQLFEENPINASGVDAKAILSARLSKSRRLENLIAQLPGEKKNGLFGNLIALSLGLTPNFKSNFDLAEDAKLQLSKDTYDDDLDNLLAQIGDQYADLFLAAKNLSDAILLSDILRVNTEITKAPLSASMIKRYDEHHQDLTLLKALVRQQLPEKYKEIFFDQSKNGYAGYIDGGASQEEFYKFIKPILEKMDGTEELLVKLNREDLLRKQRTFDNGSIPHQIHLGELHAILRRQEDFYPFLKDNREKIEKILTFRIPYYVGPLARGNSRFAWMTRKSEETITPWNFEEVVDKGASAQSFIERMTNFDKNLPNEKVLPKHSLLYEYFTVYNELTKVKYVTEGMRKPAFLSGEQKKAIVDLLFKTNRKVTVKQLKEDYFKKIECFDSVEISGVEDRFNASLGTYHDLLKIIKDKDFLDNEENEDILEDIVLTLTLFEDREMIEERLKTYAHLFDDKVMKQLKRRRYTGWGRLSRKLINGIRDKQSGKTILDFLKSDGFANRNFMQLIHDDSLTFKEDIQKAQVSGQGDSLHEHIANLAGSPAIKKGILQTVKVVDELVKVMGRHKPENIVIEMARENQTTQKGQKNSRERMKRIEEGIKELGSQILKEHPVENTQLQNEKLYLYYLQNGRDMYVDQELDINRLSDYDVDHIVPQSFLKDDSIDNKVLTRSDKARGKSDNVPSEEVVKKMKNYWRQLLNAKLITQRKFDNLTKAERGGLSELDKAGFIKRQLVETRQITKHVAQILDSRMNTKYDENDKLIREVKVITLKSKLVSDFRKDFQFYKVREINNYHHAHDAYLNAVVGTALIKKYPKLESEFVYGDYKVYDVRKMIAKSEQEIGKATAKYFFYSNIMNFFKTEITLANGEIRKRPLIETNGETGEIVWDKGRDFATVRKVLSMPQVNIVKKTEVQTGGFSKESILPKRNSDKLIARKKDWDPKKYGGFDSPTVAYSVLVVAKVEKGKSKKLKSVKELLGITIMERSSFEKNPIDFLEAKGYKEVKKDLIIKLPKYSLFELENGRKRMLASAGELQKGNELALPSKYVNFLYLASHYEKLKGSPEDNEQKQLFVEQHKHYLDEIIEQISEFSKRVILADANLDKVLSAYNKHRDKPIREQAENIIHLFTLTNLGAPAAFKYFDTTIDRKRYTSTKEVLDATLIHQSITGLYETRIDLSQLGGDGGGSSEAAAKGGGGGLLGRDLLTKLKAQIQFSTEGPQVTWEDRPAMCLVLNLEEEYRLHEKPVPPSIDPSWLQLFPMVWAEKAGMGLANQVPPVVVELKSDASPVAVRQYPMSKEAREGIRPHIQRFLDLGILVPCQSPWNTPLLPVKKPGTNDYRPVQDLREVNKRVQDIHPTVPNPYNLLSSLPPSHTWYSVLDLKDAFFCLKLHPNSQPLFAFEWRDPEKGNTGQLTWTRLPQGFKNSPTLFNEALHRDLASFRALNPQVVMLQYVDDLLVAAPTYRDCKEGTRRLLQELSKLGYRVSAKKAQLCREEVTYLGYLLKGGKRWLTPARKATVMKIPTPTTPRQVREFLGKAGFCRLFIPGFASLAAPLYPLTRPKVPFTWTEAHQEAFGRIKEALLSAPALALPDLTKPFALYVDEKEGVARGVLTQTLGPWRRPVAYLSKKLDPVASGWPTCLKAIAAVALLLKDADKLTLGQNVLVIAPHNLESIVRQPPDRWMTNARMTHYQSLLLNERVSFAPPAILNPATLLPVESDDTPIHICSEILAEETGTRPDLRDQPLPGVPAWYTDGSSFIMDGRRQAGAAIVDNKRTVWASNLPEGTSAQKAELIALTQALRLAEGKSINIYTDSRYAFATAHVHGAIYKQRGWLTSAGKDIKNKEEILALLEAIHLPKRVAIIHCPGHQRGTDPVATGNRKADEAAKQAAQSTRILTETTKNAGKRTADGSEFEKRTADGSEFESPKKKAKVE

SEQ ID NO: 1738 - protein, 2125 aa, synthetic construct
MPAAKRVKLDGGDKKYSIGLDIGTNSVGWAVITDEYKVPSKKFKVLGNTDRHSIKKNLIGALLFDSGETAEATRLKRTARRRYTRRKNRICYLQEIFSNEMAKVDDSFFHRLEESFLVEEDKKHERHPIFGNIVDEVAYHEKYPTIYHLRKKLVDSTDKADLRLIYLALAHMIKFRGHFLIEGDLNPDNSDVDKLFIQLVQTYNQLFEENPINASGVDAKAILSARLSKSRRLENLIAQLPGEKKNGLFGNLIALSLGLTPNFKSNFDLAEDAKLQLSKDTYDDDLDNLLAQIGDQYADLFLAAKNLSDAILLSDILRVNTEITKAPLSASMIKRYDEHHQDLTLLKALVRQQLPEKYKEIFFDQSKNGYAGYIDGGASQEEFYKFIKPILEKMDGTEELLVKLNREDLLRKQRTFDNGSIPHQIHLGELHAILRRQEDFYPFLKDNREKIEKILTFRIPYYVGPLARGNSRFAWMTRKSEETITPWNFEEVVDKGASAQSFIERMTNFDKNLPNEKVLPKHSLLYEYFTVYNELTKVKYVTEGMRKPAFLSGEQKKAIVDLLFKTNRKVTVKQLKEDYFKKIECFDSVEISGVEDRFNASLGTYHDLLKIIKDKDFLDNEENEDILEDIVLTLTLFEDREMIEERLKTYAHLFDDKVMKQLKRRRYTGWGRLSRKLINGIRDKQSGKTILDFLKSDGFANRNFMQLIHDDSLTFKEDIQKAQVSGQGDSLHEHIANLAGSPAIKKGILQTVKVVDELVKVMGRHKPENIVIEMARENQTTQKGQKNSRERMKRIEEGIKELGSQILKEHPVENTQLQNEKLYLYYLQNGRDMYVDQELDINRLSDYDVDHIVPQSFLKDDSIDNKVLTRSDKARGKSDNVPSEEVVKKMKNYWRQLLNAKLITQRKFDNLTKAERGGLSELDKAGFIKRQLVETRQITKHVAQILDSRMNTKYDENDKLIREVKVITLKSKLVSDFRKDFQFYKVREINNYHHAHDAYLNAVVGTALIKKYPKLESEFVYGDYKVYDVRKMIAKSEQEIGKATAKYFFYSNIMNFFKTEITLANGEIRKRPLIETNGETGEIVWDKGRDFATVRKVLSMPQVNIVKKTEVQTGGFSKESILPKRNSDKLIARKKDWDPKKYGGFDSPTVAYSVLVVAKVEKGKSKKLKSVKELLGITIMERSSFEKNPIDFLEAKGYKEVKKDLIIKLPKYSLFELENGRKRMLASAGELQKGNELALPSKYVNFLYLASHYEKLKGSPEDNEQKQLFVEQHKHYLDEIIEQISEFSKRVILADANLDKVLSAYNKHRDKPIREQAENIIHLFTLTNLGAPAAFKYFDTTIDRKRYTSTKEVLDATLIHQSITGLYETRIDLSQLGGDGGGSSPAPGGSGGLLGRDLLTKLKAQIQFSTEGPQVTWEDRPAMCLVLNLEEEYRLHEKPVPPSIDPSWLQLFPMVWAEKAGMGLANQVPPVVVELKSDASPVAVRQYPMSKEAREGIRPHIQRFLDLGILVPCQSPWNTPLLPVKKPGTNDYRPVQDLREVNKRVQDIHPTVPNPYNLLSSLPPSHTWYSVLDLKDAFFCLKLHPNSQPLFAFEWRDPEKGNTGQLTWTRLPQGFKNSPTLFNEALHRDLASFRALNPQVVMLQYVDDLLVAAPTYRDCKEGTRRLLQELSKLGYRVSAKKAQLCREEVTYLGYLLKGGKRWLTPARKATVMKIPTPTTPRQVREFLGKAGFCRLFIPGFASLAAPLYPLTRPKVPFTWTEAHQEAFGRIKEALLSAPALALPDLTKPFALYVDEKEGVARGVLTQTLGPWRRPVAYLSKKLDPVASGWPTCLKAIAAVALLLKDADKLTLGQNVLVIAPHNLESIVRQPPDRWMTNARMTHYQSLLLNERVSFAPPAILNPATLLPVESDDTPIHICSEILAEETGTRPDLRDQPLPGVPAWYTDGSSFIMDGRRQAGAAIVDNKRTVWASNLPEGTSAQKAELIALTQALRLAEGKSINIYTDSRYAFATAHVHGAIYKQRGWLTSAGKDIKNKEEILALLEAIHLPKRVAIIHCPGHQRGTDPVATGNRKADEAAKQAAQSTRILTETTKNAGKRTADGSEFEKRTADGSEFESPKKKAKVE

SEQ ID NO: 1739 - protein, 2131 aa, synthetic construct
MPAAKRVKLDGGDKKYSIGLDIGTNSVGWAVITDEYKVPSKKFKVLGNTDRHSIKKNLIGALLFDSGETAEATRLKRTARRRYTRRKNRICYLQEIFSNEMAKVDDSFFHRLEESFLVEEDKKHERHPIFGNIVDEVAYHEKYPTIYHLRKKLVDSTDKADLRLIYLALAHMIKFRGHFLIEGDLNPDNSDVDKLFIQLVQTYNQLFEENPINASGVDAKAILSARLSKSRRLENLIAQLPGEKKNGLFGNLIALSLGLTPNFKSNFDLAEDAKLQLSKDTYDDDLDNLLAQIGDQYADLFLAAKNLSDAILLSDILRVNTEITKAPLSASMIKRYDEHHQDLTLLKALVRQQLPEKYKEIFFDQSKNGYAGYIDGGASQEEFYKFIKPILEKMDGTEELLVKLNREDLLRKQRTFDNGSIPHQIHLGELHAILRRQEDFYPFLKDNREKIEKILTFRIPYYVGPLARGNSRFAWMTRKSEETITPWNFEEVVDKGASAQSFIERMTNFDKNLPNEKVLPKHSLLYEYFTVYNELTKVKYVTEGMRKPAFLSGEQKKAIVDLLFKTNRKVTVKQLKEDYFKKIECFDSVEISGVEDRFNASLGTYHDLLKIIKDKDFLDNEENEDILEDIVLTLTLFEDREMIEERLKTYAHLFDDKVMKQLKRRRYTGWGRLSRKLINGIRDKQSGKTILDFLKSDGFANRNFMQLIHDDSLTFKEDIQKAQVSGQGDSLHEHIANLAGSPAIKKGILQTVKVVDELVKVMGRHKPENIVIEMARENQTTQKGQKNSRERMKRIEEGIKELGSQILKEHPVENTQLQNEKLYLYYLQNGRDMYVDQELDINRLSDYDVDHIVPQSFLKDDSIDNKVLTRSDKARGKSDNVPSEEVVKKMKNYWRQLLNAKLITQRKFDNLTKAERGGLSELDKAGFIKRQLVETRQITKHVAQILDSRMNTKYDENDKLIREVKVITLKSKLVSDFRKDFQFYKVREINNYHHAHDAYLNAVVGTALIKKYPKLESEFVYGDYKVYDVRKMIAKSEQEIGKATAKYFFYSNIMNFFKTEITLANGEIRKRPLIETNGETGEIVWDKGRDFATVRKVLSMPQVNIVKKTEVQTGGFSKESILPKRNSDKLIARKKDWDPKKYGGFDSPTVAYSVLVVAKVEKGKSKKLKSVKELLGITIMERSSFEKNPIDFLEAKGYKEVKKDLIIKLPKYSLFELENGRKRMLASAGELQKGNELALPSKYVNFLYLASHYEKLKGSPEDNEQKQLFVEQHKHYLDEIIEQISEFSKRVILADANLDKVLSAYNKHRDKPIREQAENIIHLFTLTNLGAPAAFKYFDTTIDRKRYTSTKEVLDATLIHQSITGLYETRIDLSQLGGDGGGGGGSEAAAKGGGGSGGLLGRDLLTKLKAQIQFSTEGPQVTWEDRPAMCLVLNLEEEYRLHEKPVPPSIDPSWLQLFPMVWAEKAGMGLANQVPPVVVELKSDASPVAVRQYPMSKEAREGIRPHIQRFLDLGILVPCQSPWNTPLLPVKKPGTNDYRPVQDLREVNKRVQDIHPTVPNPYNLLSSLPPSHTWYSVLDLKDAFFCLKLHPNSQPLFAFEWRDPEKGNTGQLTWTRLPQGFKNSPTLFNEALHRDLASFRALNPQVVMLQYVDDLLVAAPTYRDCKEGTRRLLQELSKLGYRVSAKKAQLCREEVTYLGYLLKGGKRWLTPARKATVMKIPTPTTPRQVREFLGKAGFCRLFIPGFASLAAPLYPLTRPKVPFTWTEAHQEAFGRIKEALLSAPALALPDLTKPFALYVDEKEGVARGVLTQTLGPWRRPVAYLSKKLDPVASGWPTCLKAIAAVALLLKDADKLTLGQNVLVIAPHNLESIVRQPPDRWMTNARMTHYQSLLLNERVSFAPPAILNPATLLPVESDDTPIHICSEILAEETGTRPDLRDQPLPGVPAWYTDGSSFIMDGRRQAGAAIVDNKRTVWASNLPEGTSAQKAELIALTQALRLAEGKSINIYTDSRYAFATAHVHGAIYKQRGWLTSAGKDIKNKEEILALLEAIHLPKRVAIIHCPGHQRGTDPVATGNRKADEAAKQAAQSTRILTETTKNAGKRTADGSEFEKRTADGSEFESPKKKAKVE

SEQ ID NO: 1740 - protein, 2125 aa, synthetic construct
MPAAKRVKLDGGDKKYSIGLDIGTNSVGWAVITDEYKVPSKKFKVLGNTDRHSIKKNLIGALLFDSGETAEATRLKRTARRRYTRRKNRICYLQEIFSNEMAKVDDSFFHRLEESFLVEEDKKHERHPIFGNIVDEVAYHEKYPTIYHLRKKLVDSTDKADLRLIYLALAHMIKFRGHFLIEGDLNPDNSDVDKLFIQLVQTYNQLFEENPINASGVDAKAILSARLSKSRRLENLIAQLPGEKKNGLFGNLIALSLGLTPNFKSNFDLAEDAKLQLSKDTYDDDLDNLLAQIGDQYADLFLAAKNLSDAILLSDILRVNTEITKAPLSASMIKRYDEHHQDLTLLKALVRQQLPEKYKEIFFDQSKNGYAGYIDGGASQEEFYKFIKPILEKMDGTEELLVKLNREDLLRKQRTFDNGSIPHQIHLGELHAILRRQEDFYPFLKDNREKIEKILTFRIPYYVGPLARGNSRFAWMTRKSEETITPWNFEEVVDKGASAQSFIERMTNFDKNLPNEKVLPKHSLLYEYFTVYNELTKVKYVTEGMRKPAFLSGEQKKAIVDLLFKTNRKVTVKQLKEDYFKKIECFDSVEISGVEDRFNASLGTYHDLLKIIKDKDFLDNEENEDILEDIVLTLTLFEDREMIEERLKTYAHLFDDKVMKQLKRRRYTGWGRLSRKLINGIRDKQSGKTILDFLKSDGFANRNFMQLIHDDSLTFKEDIQKAQVSGQGDSLHEHIANLAGSPAIKKGILQTVKVVDELVKVMGRHKPENIVIEMARENQTTQKGQKNSRERMKRIEEGIKELGSQILKEHPVENTQLQNEKLYLYYLQNGRDMYVDQELDINRLSDYDVDHIVPQSFLKDDSIDNKVLTRSDKARGKSDNVPSEEVVKKMKNYWRQLLNAKLITQRKFDNLTKAERGGLSELDKAGFIKRQLVETRQITKHVAQILDSRMNTKYDENDKLIREVKVITLKSKLVSDFRKDFQFYKVREINNYHHAHDAYLNAVVGTALIKKYPKLESEFVYGDYKVYDVRKMIAKSEQEIGKATAKYFFYSNIMNFFKTEITLANGEIRKRPLIETNGETGEIVWDKGRDFATVRKVLSMPQVNIVKKTEVQTGGFSKESILPKRNSDKLIARKKDWDPKKYGGFDSPTVAYSVLVVAKVEKGKSKKLKSVKELLGITIMERSSFEKNPIDFLEAKGYKEVKKDLIIKLPKYSLFELENGRKRMLASAGELQKGNELALPSKYVNFLYLASHYEKLKGSPEDNEQKQLFVEQHKHYLDEIIEQISEFSKRVILADANLDKVLSAYNKHRDKPIREQAENIIHLFTLTNLGAPAAFKYFDTTIDRKRYTSTKEVLDATLIHQSITGLYETRIDLSQLGGDGGPAPGGSGGGGGLLGRDLLTKLKAQIQFSTEGPQVTWEDRPAMCLVLNLEEEYRLHEKPVPPSIDPSWLQLFPMVWAEKAGMGLANQVPPVVVELKSDASPVAVRQYPMSKEAREGIRPHIQRFLDLGILVPCQSPWNTPLLPVKKPGTNDYRPVQDLREVNKRVQDIHPTVPNPYNLLSSLPPSHTWYSVLDLKDAFFCLKLHPNSQPLFAFEWRDPEKGNTGQLTWTRLPQGFKNSPTLFNEALHRDLASFRALNPQVVMLQYVDDLLVAAPTYRDCKEGTRRLLQELSKLGYRVSAKKAQLCREEVTYLGYLLKGGKRWLTPARKATVMKIPTPTTPRQVREFLGKAGFCRLFIPGFASLAAPLYPLTRPKVPFTWTEAHQEAFGRIKEALLSAPALALPDLTKPFALYVDEKEGVARGVLTQTLGPWRRPVAYLSKKLDPVASGWPTCLKAIAAVALLLKDADKLTLGQNVLVIAPHNLESIVRQPPDRWMTNARMTHYQSLLLNERVSFAPPAILNPATLLPVESDDTPIHICSEILAEETGTRPDLRDQPLPGVPAWYTDGSSFIMDGRRQAGAAIVDNKRTVWASNLPEGTSAQKAELIALTQALRLAEGKSINIYTDSRYAFATAHVHGAIYKQRGWLTSAGKDIKNKEEILALLEAIHLPKRVAIIHCPGHQRGTDPVATGNRKADEAAKQAAQSTRILTETTKNAGKRTADGSEFEKRTADGSEFESPKKKAKVE

SEQ ID NO: 1741 - protein, 2127 aa, synthetic construct
MPAAKRVKLDGGDKKYSIGLDIGTNSVGWAVITDEYKVPSKKFKVLGNTDRHSIKKNLIGALLFDSGETAEATRLKRTARRRYTRRKNRICYLQEIFSNEMAKVDDSFFHRLEESFLVEEDKKHERHPIFGNIVDEVAYHEKYPTIYHLRKKLVDSTDKADLRLIYLALAHMIKFRGHFLIEGDLNPDNSDVDKLFIQLVQTYNQLFEENPINASGVDAKAILSARLSKSRRLENLIAQLPGEKKNGLFGNLIALSLGLTPNFKSNFDLAEDAKLQLSKDTYDDDLDNLLAQIGDQYADLFLAAKNLSDAILLSDILRVNTEITKAPLSASMIKRYDEHHQDLTLLKALVRQQLPEKYKEIFFDQSKNGYAGYIDGGASQEEFYKFIKPILEKMDGTEELLVKLNREDLLRKQRTFDNGSIPHQIHLGELHAILRRQEDFYPFLKDNREKIEKILTFRIPYYVGPLARGNSRFAWMTRKSEETITPWNFEEVVDKGASAQSFIERMTNFDKNLPNEKVLPKHSLLYEYFTVYNELTKVKYVTEGMRKPAFLSGEQKKAIVDLLFKTNRKVTVKQLKEDYFKKIECFDSVEISGVEDRFNASLGTYHDLLKIIKDKDFLDNEENEDILEDIVLTLTLFEDREMIEERLKTYAHLFDDKVMKQLKRRRYTGWGRLSRKLINGIRDKQSGKTILDFLKSDGFANRNFMQLIHDDSLTFKEDIQKAQVSGQGDSLHEHIANLAGSPAIKKGILQTVKVVDELVKVMGRHKPENIVIEMARENQTTQKGQKNSRERMKRIEEGIKELGSQILKEHPVENTQLQNEKLYLYYLQNGRDMYVDQELDINRLSDYDVDHIVPQSFLKDDSIDNKVLTRSDKARGKSDNVPSEEVVKKMKNYWRQLLNAKLITQRKFDNLTKAERGGLSELDKAGFIKRQLVETRQITKHVAQILDSRMNTKYDENDKLIREVKVITLKSKLVSDFRKDFQFYKVREINNYHHAHDAYLNAVVGTALIKKYPKLESEFVYGDYKVYDVRKMIAKSEQEIGKATAKYFFYSNIMNFFKTEITLANGEIRKRPLIETNGETGEIVWDKGRDFATVRKVLSMPQVNIVKKTEVQTGGFSKESILPKRNSDKLIARKKDWDPKKYGGFDSPTVAYSVLVVAKVEKGKSKKLKSVKELLGITIMERSSFEKNPIDFLEAKGYKEVKKDLIIKLPKYSLFELENGRKRMLASAGELQKGNELALPSKYVNFLYLASHYEKLKGSPEDNEQKQLFVEQHKHYLDEIIEQISEFSKRVILADANLDKVLSAYNKHRDKPIREQAENIIHLFTLTNLGAPAAFKYFDTTIDRKRYTSTKEVLDATLIHQSITGLYETRIDLSQLGGDGGGGSGGGEAAAKGGLLGRDLLTKLKAQIQFSTEGPQVTWEDRPAMCLVLNLEEEYRLHEKPVPPSIDPSWLQLFPMVWAEKAGMGLANQVPPVVVELKSDASPVAVRQYPMSKEAREGIRPHIQRFLDLGILVPCQSPWNTPLLPVKKPGTNDYRPVQDLREVNKRVQDIHPTVPNPYNLLSSLPPSHTWYSVLDLKDAFFCLKLHPNSQPLFAFEWRDPEKGNTGQLTWTRLPQGFKNSPTLFNEALHRDLASFRALNPQVVMLQYVDDLLVAAPTYRDCKEGTRRLLQELSKLGYRVSAKKAQLCREEVTYLGYLLKGGKRWLTPARKATVMKIPTPTTPRQVREFLGKAGFCRLFIPGFASLAAPLYPLTRPKVPFTWTEAHQEAFGRIKEALLSAPALALPDLTKPFALYVDEKEGVARGVLTQTLGPWRRPVAYLSKKLDPVASGWPTCLKAIAAVALLLKDADKLTLGQNVLVIAPHNLESIVRQPPDRWMTNARMTHYQSLLLNERVSFAPPAILNPATLLPVESDDTPIHICSEILAEETGTRPDLRDQPLPGVPAWYTDGSSFIMDGRRQAGAAIVDNKRTVWASNLPEGTSAQKAELIALTQALRLAEGKSINIYTDSRYAFATAHVHGAIYKQRGWLTSAGKDIKNKEEILALLEAIHLPKRVAIIHCPGHQRGTDPVATGNRKADEAAKQAAQSTRILTETTKNAGKRTADGSEFEKRTADGSEFESPKKKAKVE

SEQ ID NO: 1742 - protein, 2122 aa, synthetic construct
MPAAKRVKLDGGDKKYSIGLDIGTNSVGWAVITDEYKVPSKKFKVLGNTDRHSIKKNLIGALLFDSGETAEATRLKRTARRRYTRRKNRICYLQEIFSNEMAKVDDSFFHRLEESFLVEEDKKHERHPIFGNIVDEVAYHEKYPTIYHLRKKLVDSTDKADLRLIYLALAHMIKFRGHFLIEGDLNPDNSDVDKLFIQLVQTYNQLFEENPINASGVDAKAILSARLSKSRRLENLIAQLPGEKKNGLFGNLIALSLGLTPNFKSNFDLAEDAKLQLSKDTYDDDLDNLLAQIGDQYADLFLAAKNLSDAILLSDILRVNTEITKAPLSASMIKRYDEHHQDLTLLKALVRQQLPEKYKEIFFDQSKNGYAGYIDGGASQEEFYKFIKPILEKMDGTEELLVKLNREDLLRKQRTFDNGSIPHQIHLGELHAILRRQEDFYPFLKDNREKIEKILTFRIPYYVGPLARGNSRFAWMTRKSEETITPWNFEEVVDKGASAQSFIERMTNFDKNLPNEKVLPKHSLLYEYFTVYNELTKVKYVTEGMRKPAFLSGEQKKAIVDLLFKTNRKVTVKQLKEDYFKKIECFDSVEISGVEDRFNASLGTYHDLLKIIKDKDFLDNEENEDILEDIVLTLTLFEDREMIEERLKTYAHLFDDKVMKQLKRRRYTGWGRLSRKLINGIRDKQSGKTILDFLKSDGFANRNFMQLIHDDSLTFKEDIQKAQVSGQGDSLHEHIANLAGSPAIKKGILQTVKVVDELVKVMGRHKPENIVIEMARENQTTQKGQKNSRERMKRIEEGIKELGSQILKEHPVENTQLQNEKLYLYYLQNGRDMYVDQELDINRLSDYDVDHIVPQSFLKDDSIDNKVLTRSDKARGKSDNVPSEEVVKKMKNYWRQLLNAKLITQRKFDNLTKAERGGLSELDKAGFIKRQLVETRQITKHVAQILDSRMNTKYDENDKLIREVKVITLKSKLVSDFRKDFQFYKVREINNYHHAHDAYLNAVVGTALIKKYPKLESEFVYGDYKVYDVRKMIAKSEQEIGKATAKYFFYSNIMNFFKTEITLANGEIRKRPLIETNGETGEIVWDKGRDFATVRKVLSMPQVNIVKKTEVQTGGFSKESILPKRNSDKLIARKKDWDPKKYGGFDSPTVAYSVLVVAKVEKGKSKKLKSVKELLGITIMERSSFEKNPIDFLEAKGYKEVKKDLIIKLPKYSLFELENGRKRMLASAGELQKGNELALPSKYVNFLYLASHYEKLKGSPEDNEQKQLFVEQHKHYLDEIIEQISEFSKRVILADANLDKVLSAYNKHRDKPIREQAENIIHLFTLTNLGAPAAFKYFDTTIDRKRYTSTKEVLDATLIHQSITGLYETRIDLSQLGGDGGGSSGGSGGLLGRDLLTKLKAQIQFSTEGPQVTWEDRPAMCLVLNLEEEYRLHEKPVPPSIDPSWLQLFPMVWAEKAGMGLANQVPPVVVELKSDASPVAVRQYPMSKEAREGIRPHIQRFLDLGILVPCQSPWNTPLLPVKKPGTNDYRPVQDLREVNKRVQDIHPTVPNPYNLLSSLPPSHTWYSVLDLKDAFFCLKLHPNSQPLFAFEWRDPEKGNTGQLTWTRLPQGFKNSPTLFNEALHRDLASFRALNPQVVMLQYVDDLLVAAPTYRDCKEGTRRLLQELSKLGYRVSAKKAQLCREEVTYLGYLLKGGKRWLTPARKATVMKIPTPTTPRQVREFLGKAGFCRLFIPGFASLAAPLYPLTRPKVPFTWTEAHQEAFGRIKEALLSAPALALPDLTKPFALYVDEKEGVARGVLTQTLGPWRRPVAYLSKKLDPVASGWPTCLKAIAAVALLLKDADKLTLGQNVLVIAPHNLESIVRQPPDRWMTNARMTHYQSLLLNERVSFAPPAILNPATLLPVESDDTPIHICSEILAEETGTRPDLRDQPLPGVPAWYTDGSSFIMDGRRQAGAAIVDNKRTVWASNLPEGTSAQKAELIALTQALRLAEGKSINIYTDSRYAFATAHVHGAIYKQRGWLTSAGKDIKNKEEILALLEAIHLPKRVAIIHCPGHQRGTDPVATGNRKADEAAKQAAQSTRILTETTKNAGKRTADGSEFEKRTADGSEFESPKKKAKVE

SEQ ID NO: 1743 - protein, 2124 aa, synthetic construct
MPAAKRVKLDGGDKKYSIGLDIGTNSVGWAVITDEYKVPSKKFKVLGNTDRHSIKKNLIGALLFDSGETAEATRLKRTARRRYTRRKNRICYLQEIFSNEMAKVDDSFFHRLEESFLVEEDKKHERHPIFGNIVDEVAYHEKYPTIYHLRKKLVDSTDKADLRLIYLALAHMIKFRGHFLIEGDLNPDNSDVDKLFIQLVQTYNQLFEENPINASGVDAKAILSARLSKSRRLENLIAQLPGEKKNGLFGNLIALSLGLTPNFKSNFDLAEDAKLQLSKDTYDDDLDNLLAQIGDQYADLFLAAKNLSDAILLSDILRVNTEITKAPLSASMIKRYDEHHQDLTLLKALVRQQLPEKYKEIFFDQSKNGYAGYIDGGASQEEFYKFIKPILEKMDGTEELLVKLNREDLLRKQRTFDNGSIPHQIHLGELHAILRRQEDFYPFLKDNREKIEKILTFRIPYYVGPLARGNSRFAWMTRKSEETITPWNFEEVVDKGASAQSFIERMTNFDKNLPNEKVLPKHSLLYEYFTVYNELTKVKYVTEGMRKPAFLSGEQKKAIVDLLFKTNRKVTVKQLKEDYFKKIECFDSVEISGVEDRFNASLGTYHDLLKIIKDKDFLDNEENEDILEDIVLTLTLFEDREMIEERLKTYAHLFDDKVMKQLKRRRYTGWGRLSRKLINGIRDKQSGKTILDFLKSDGFANRNFMQLIHDDSLTFKEDIQKAQVSGQGDSLHEHIANLAGSPAIKKGILQTVKVVDELVKVMGRHKPENIVIEMARENQTTQKGQKNSRERMKRIEEGIKELGSQILKEHPVENTQLQNEKLYLYYLQNGRDMYVDQELDINRLSDYDVDHIVPQSFLKDDSIDNKVLTRSDKARGKSDNVPSEEVVKKMKNYWRQLLNAKLITQRKFDNLTKAERGGLSELDKAGFIKRQLVETRQITKHVAQILDSRMNTKYDENDKLIREVKVITLKSKLVSDFRKDFQFYKVREINNYHHAHDAYLNAVVGTALIKKYPKLESEFVYGDYKVYDVRKMIAKSEQEIGKATAKYFFYSNIMNFFKTEITLANGEIRKRPLIETNGETGEIVWDKGRDFATVRKVLSMPQVNIVKKTEVQTGGFSKESILPKRNSDKLIARKKDWDPKKYGGFDSPTVAYSVLVVAKVEKGKSKKLKSVKELLGITIMERSSFEKNPIDFLEAKGYKEVKKDLIIKLPKYSLFELENGRKRMLASAGELQKGNELALPSKYVNFLYLASHYEKLKGSPEDNEQKQLFVEQHKHYLDEIIEQISEFSKRVILADANLDKVLSAYNKHRDKPIREQAENIIHLFTLTNLGAPAAFKYFDTTIDRKRYTSTKEVLDATLIHQSITGLYETRIDLSQLGGDGGGGSEAAAKGGLLGRDLLTKLKAQIQFSTEGPQVTWEDRPAMCLVLNLEEEYRLHEKPVPPSIDPSWLQLFPMVWAEKAGMGLANQVPPVVVELKSDASPVAVRQYPMSKEAREGIRPHIQRFLDLGILVPCQSPWNTPLLPVKKPGTNDYRPVQDLREVNKRVQDIHPTVPNPYNLLSSLPPSHTWYSVLDLKDAFFCLKLHPNSQPLFAFEWRDPEKGNTGQLTWTRLPQGFKNSPTLFNEALHRDLASFRALNPQVVMLQYVDDLLVAAPTYRDCKEGTRRLLQELSKLGYRVSAKKAQLCREEVTYLGYLLKGGKRWLTPARKATVMKIPTPTTPRQVREFLGKAGFCRLFIPGFASLAAPLYPLTRPKVPFTWTEAHQEAFGRIKEALLSAPALALPDLTKPFALYVDEKEGVARGVLTQTLGPWRRPVAYLSKKLDPVASGWPTCLKAIAAVALLLKDADKLTLGQNVLVIAPHNLESIVRQPPDRWMTNARMTHYQSLLLNERVSFAPPAILNPATLLPVESDDTPIHICSEILAEETGTRPDLRDQPLPGVPAWYTDGSSFIMDGRRQAGAAIVDNKRTVWASNLPEGTSAQKAELIALTQALRLAEGKSINIYTDSRYAFATAHVHGAIYKQRGWLTSAGKDIKNKEEILALLEAIHLPKRVAIIHCPGHQRGTDPVATGNRKADEAAKQAAQSTRILTETTKNAGKRTADGSEFEKRTADGSEFESPKKKAKVE

SEQ ID NO: 1744 - protein, 2141 aa, synthetic construct
MPAAKRVKLDGGDKKYSIGLDIGTNSVGWAVITDEYKVPSKKFKVLGNTDRHSIKKNLIGALLFDSGETAEATRLKRTARRRYTRRKNRICYLQEIFSNEMAKVDDSFFHRLEESFLVEEDKKHERHPIFGNIVDEVAYHEKYPTIYHLRKKLVDSTDKADLRLIYLALAHMIKFRGHFLIEGDLNPDNSDVDKLFIQLVQTYNQLFEENPINASGVDAKAILSARLSKSRRLENLIAQLPGEKKNGLFGNLIALSLGLTPNFKSNFDLAEDAKLQLSKDTYDDDLDNLLAQIGDQYADLFLAAKNLSDAILLSDILRVNTEITKAPLSASMIKRYDEHHQDLTLLKALVRQQLPEKYKEIFFDQSKNGYAGYIDGGASQEEFYKFIKPILEKMDGTEELLVKLNREDLLRKQRTFDNGSIPHQIHLGELHAILRRQEDFYPFLKDNREKIEKILTFRIPYYVGPLARGNSRFAWMTRKSEETITPWNFEEVVDKGASAQSFIERMTNFDKNLPNEKVLPKHSLLYEYFTVYNELTKVKYVTEGMRKPAFLSGEQKKAIVDLLFKTNRKVTVKQLKEDYFKKIECFDSVEISGVEDRFNASLGTYHDLLKIIKDKDFLDNEENEDILEDIVLTLTLFEDREMIEERLKTYAHLFDDKVMKQLKRRRYTGWGRLSRKLINGIRDKQSGKTILDFLKSDGFANRNFMQLIHDDSLTFKEDIQKAQVSGQGDSLHEHIANLAGSPAIKKGILQTVKVVDELVKVMGRHKPENIVIEMARENQTTQKGQKNSRERMKRIEEGIKELGSQILKEHPVENTQLQNEKLYLYYLQNGRDMYVDQELDINRLSDYDVDHIVPQSFLKDDSIDNKVLTRSDKARGKSDNVPSEEVVKKMKNYWRQLLNAKLITQRKFDNLTKAERGGLSELDKAGFIKRQLVETRQITKHVAQILDSRMNTKYDENDKLIREVKVITLKSKLVSDFRKDFQFYKVREINNYHHAHDAYLNAVVGTALIKKYPKLESEFVYGDYKVYDVRKMIAKSEQEIGKATAKYFFYSNIMNFFKTEITLANGEIRKRPLIETNGETGEIVWDKGRDFATVRKVLSMPQVNIVKKTEVQTGGFSKESILPKRNSDKLIARKKDWDPKKYGGFDSPTVAYSVLVVAKVEKGKSKKLKSVKELLGITIMERSSFEKNPIDFLEAKGYKEVKKDLIIKLPKYSLFELENGRKRMLASAGELQKGNELALPSKYVNFLYLASHYEKLKGSPEDNEQKQLFVEQHKHYLDEIIEQISEFSKRVILADANLDKVLSAYNKHRDKPIREQAENIIHLFTLTNLGAPAAFKYFDTTIDRKRYTSTKEVLDATLIHQSITGLYETRIDLSQLGGDGGEAAAKEAAAKEAAAKEAAAKEAAAKGGLLGRDLLTKLKAQIQFSTEGPQVTWEDRPAMCLVLNLEEEYRLHEKPVPPSIDPSWLQLFPMVWAEKAGMGLANQVPPVVVELKSDASPVAVRQYPMSKEAREGIRPHIQRFLDLGILVPCQSPWNTPLLPVKKPGTNDYRPVQDLREVNKRVQDIHPTVPNPYNLLSSLPPSHTWYSVLDLKDAFFCLKLHPNSQPLFAFEWRDPEKGNTGQLTWTRLPQGFKNSPTLFNEALHRDLASFRALNPQVVMLQYVDDLLVAAPTYRDCKEGTRRLLQELSKLGYRVSAKKAQLCREEVTYLGYLLKGGKRWLTPARKATVMKIPTPTTPRQVREFLGKAGFCRLFIPGFASLAAPLYPLTRPKVPFTWTEAHQEAFGRIKEALLSAPALALPDLTKPFALYVDEKEGVARGVLTQTLGPWRRPVAYLSKKLDPVASGWPTCLKAIAAVALLLKDADKLTLGQNVLVIAPHNLESIVRQPPDRWMTNARMTHYQSLLLNERVSFAPPAILNPATLLPVESDDTPIHICSEILAEETGTRPDLRDQPLPGVPAWYTDGSSFIMDGRRQAGAAIVDNKRTVWASNLPEGTSAQKAELIALTQALRLAEGKSINIYTDSRYAFATAHVHGAIYKQRGWLTSAGKDIKNKEEILALLEAIHLPKRVAIIHCPGHQRGTDPVATGNRKADEAAKQAAQSTRILTETTKNAGKRTADGSEFEKRTADGSEFESPKKKAKVE

SEQ ID NO: 1745 - protein, 2125 aa, synthetic construct
MPAAKRVKLDGGDKKYSIGLDIGTNSVGWAVITDEYKVPSKKFKVLGNTDRHSIKKNLIGALLFDSGETAEATRLKRTARRRYTRRKNRICYLQEIFSNEMAKVDDSFFHRLEESFLVEEDKKHERHPIFGNIVDEVAYHEKYPTIYHLRKKLVDSTDKADLRLIYLALAHMIKFRGHFLIEGDLNPDNSDVDKLFIQLVQTYNQLFEENPINASGVDAKAILSARLSKSRRLENLIAQLPGEKKNGLFGNLIALSLGLTPNFKSNFDLAEDAKLQLSKDTYDDDLDNLLAQIGDQYADLFLAAKNLSDAILLSDILRVNTEITKAPLSASMIKRYDEHHQDLTLLKALVRQQLPEKYKEIFFDQSKNGYAGYIDGGASQEEFYKFIKPILEKMDGTEELLVKLNREDLLRKQRTFDNGSIPHQIHLGELHAILRRQEDFYPFLKDNREKIEKILTFRIPYYVGPLARGNSRFAWMTRKSEETITPWNFEEVVDKGASAQSFIERMTNFDKNLPNEKVLPKHSLLYEYFTVYNELTKVKYVTEGMRKPAFLSGEQKKAIVDLLFKTNRKVTVKQLKEDYFKKIECFDSVEISGVEDRFNASLGTYHDLLKIIKDKDFLDNEENEDILEDIVLTLTLFEDREMIEERLKTYAHLFDDKVMKQLKRRRYTGWGRLSRKLINGIRDKQSGKTILDFLKSDGFANRNFMQLIHDDSLTFKEDIQKAQVSGQGDSLHEHIANLAGSPAIKKGILQTVKVVDELVKVMGRHKPENIVIEMARENQTTQKGQKNSRERMKRIEEGIKELGSQILKEHPVENTQLQNEKLYLYYLQNGRDMYVDQELDINRLSDYDVDHIVPQSFLKDDSIDNKVLTRSDKARGKSDNVPSEEVVKKMKNYWRQLLNAKLITQRKFDNLTKAERGGLSELDKAGFIKRQLVETRQITKHVAQILDSRMNTKYDENDKLIREVKVITLKSKLVSDFRKDFQFYKVREINNYHHAHDAYLNAVVGTALIKKYPKLESEFVYGDYKVYDVRKMIAKSEQEIGKATAKYFFYSNIMNFFKTEITLANGEIRKRPLIETNGETGEIVWDKGRDFATVRKVLSMPQVNIVKKTEVQTGGFSKESILPKRNSDKLIARKKDWDPKKYGGFDSPTVAYSVLVVAKVEKGKSKKLKSVKELLGITIMERSSFEKNPIDFLEAKGYKEVKKDLIIKLPKYSLFELENGRKRMLASAGELQKGNELALPSKYVNFLYLASHYEKLKGSPEDNEQKQLFVEQHKHYLDEIIEQISEFSKRVILADANLDKVLSAYNKHRDKPIREQAENIIHLFTLTNLGAPAAFKYFDTTIDRKRYTSTKEVLDATLIHQSITGLYETRIDLSQLGGDGGGGGGGSPAPGGLLGRDLLTKLKAQIQFSTEGPQVTWEDRPAMCLVLNLEEEYRLHEKPVPPSIDPSWLQLFPMVWAEKAGMGLANQVPPVVVELKSDASPVAVRQYPMSKEAREGIRPHIQRFLDLGILVPCQSPWNTPLLPVKKPGTNDYRPVQDLREVNKRVQDIHPTVPNPYNLLSSLPPSHTWYSVLDLKDAFFCLKLHPNSQPLFAFEWRDPEKGNTGQLTWTRLPQGFKNSPTLFNEALHRDLASFRALNPQVVMLQYVDDLLVAAPTYRDCKEGTRRLLQELSKLGYRVSAKKAQLCREEVTYLGYLLKGGKRWLTPARKATVMKIPTPTTPRQVREFLGKAGFCRLFIPGFASLAAPLYPLTRPKVPFTWTEAHQEAFGRIKEALLSAPALALPDLTKPFALYVDEKEGVARGVLTQTLGPWRRPVAYLSKKLDPVASGWPTCLKAIAAVALLLKDADKLTLGQNVLVIAPHNLESIVRQPPDRWMTNARMTHYQSLLLNERVSFAPPAILNPATLLPVESDDTPIHICSEILAEETGTRPDLRDQPLPGVPAWYTDGSSFIMDGRRQAGAAIVDNKRTVWASNLPEGTSAQKAELIALTQALRLAEGKSINIYTDSRYAFATAHVHGAIYKQRGWLTSAGKDIKNKEEILALLEAIHLPKRVAIIHCPGHQRGTDPVATGNRKADEAAKQAAQSTRILTETTKNAGKRTADGSEFEKRTADGSEFESPKKKAKVE

SEQ ID NO: 1746 - protein, 2124 aa, synthetic construct
MPAAKRVKLDGGDKKYSIGLDIGTNSVGWAVITDEYKVPSKKFKVLGNTDRHSIKKNLIGALLFDSGETAEATRLKRTARRRYTRRKNRICYLQEIFSNEMAKVDDSFFHRLEESFLVEEDKKHERHPIFGNIVDEVAYHEKYPTIYHLRKKLVDSTDKADLRLIYLALAHMIKFRGHFLIEGDLNPDNSDVDKLFIQLVQTYNQLFEENPINASGVDAKAILSARLSKSRRLENLIAQLPGEKKNGLFGNLIALSLGLTPNFKSNFDLAEDAKLQLSKDTYDDDLDNLLAQIGDQYADLFLAAKNLSDAILLSDILRVNTEITKAPLSASMIKRYDEHHQDLTLLKALVRQQLPEKYKEIFFDQSKNGYAGYIDGGASQEEFYKFIKPILEKMDGTEELLVKLNREDLLRKQRTFDNGSIPHQIHLGELHAILRRQEDFYPFLKDNREKIEKILTFRIPYYVGPLARGNSRFAWMTRKSEETITPWNFEEVVDKGASAQSFIERMTNFDKNLPNEKVLPKHSLLYEYFTVYNELTKVKYVTEGMRKPAFLSGEQKKAIVDLLFKTNRKVTVKQLKEDYFKKIECFDSVEISGVEDRFNASLGTYHDLLKIIKDKDFLDNEENEDILEDIVLTLTLFEDREMIEERLKTYAHLFDDKVMKQLKRRRYTGWGRLSRKLINGIRDKQSGKTILDFLKSDGFANRNFMQLIHDDSLTFKEDIQKAQVSGQGDSLHEHIANLAGSPAIKKGILQTVKVVDELVKVMGRHKPENIVIEMARENQTTQKGQKNSRERMKRIEEGIKELGSQILKEHPVENTQLQNEKLYLYYLQNGRDMYVDQELDINRLSDYDVDHIVPQSFLKDDSIDNKVLTRSDKARGKSDNVPSEEVVKKMKNYWRQLLNAKLITQRKFDNLTKAERGGLSELDKAGFIKRQLVETRQITKHVAQILDSRMNTKYDENDKLIREVKVITLKSKLVSDFRKDFQFYKVREINNYHHAHDAYLNAVVGTALIKKYPKLESEFVYGDYKVYDVRKMIAKSEQEIGKATAKYFFYSNIMNFFKTEITLANGEIRKRPLIETNGETGEIVWDKGRDFATVRKVLSMPQVNIVKKTEVQTGGFSKESILPKRNSDKLIARKKDWDPKKYGGFDSPTVAYSVLVVAKVEKGKSKKLKSVKELLGITIMERSSFEKNPIDFLEAKGYKEVKKDLIIKLPKYSLFELENGRKRMLASAGELQKGNELALPSKYVNFLYLASHYEKLKGSPEDNEQKQLFVEQHKHYLDEIIEQISEFSKRVILADANLDKVLSAYNKHRDKPIREQAENIIHLFTLTNLGAPAAFKYFDTTIDRKRYTSTKEVLDATLIHQSITGLYETRIDLSQLGGDGGEAAAKGGGGGLLGRDLLTKLKAQIQFSTEGPQVTWEDRPAMCLVLNLEEEYRLHEKPVPPSIDPSWLQLFPMVWAEKAGMGLANQVPPVVVELKSDASPVAVRQYPMSKEAREGIRPHIQRFLDLGILVPCQSPWNTPLLPVKKPGTNDYRPVQDLREVNKRVQDIHPTVPNPYNLLSSLPPSHTWYSVLDLKDAFFCLKLHPNSQPLFAFEWRDPEKGNTGQLTWTRLPQGFKNSPTLFNEALHRDLASFRALNPQVVMLQYVDDLLVAAPTYRDCKEGTRRLLQELSKLGYRVSAKKAQLCREEVTYLGYLLKGGKRWLTPARKATVMKIPTPTTPRQVREFLGKAGFCRLFIPGFASLAAPLYPLTRPKVPFTWTEAHQEAFGRIKEALLSAPALALPDLTKPFALYVDEKEGVARGVLTQTLGPWRRPVAYLSKKLDPVASGWPTCLKAIAAVALLLKDADKLTLGQNVLVIAPHNLESIVRQPPDRWMTNARMTHYQSLLLNERVSFAPPAILNPATLLPVESDDTPIHICSEILAEETGTRPDLRDQPLPGVPAWYTDGSSFIMDGRRQAGAAIVDNKRTVWASNLPEGTSAQKAELIALTQALRLAEGKSINIYTDSRYAFATAHVHGAIYKQRGWLTSAGKDIKNKEEILALLEAIHLPKRVAIIHCPGHQRGTDPVATGNRKADEAAKQAAQSTRILTETTKNAGKRTADGSEFEKRTADGSEFESPKKKAKVE

SEQ ID NO: 1747 - protein, 2122 aa, synthetic construct
MPAAKRVKLDGGDKKYSIGLDIGTNSVGWAVITDEYKVPSKKFKVLGNTDRHSIKKNLIGALLFDSGETAEATRLKRTARRRYTRRKNRICYLQEIFSNEMAKVDDSFFHRLEESFLVEEDKKHERHPIFGNIVDEVAYHEKYPTIYHLRKKLVDSTDKADLRLIYLALAHMIKFRGHFLIEGDLNPDNSDVDKLFIQLVQTYNQLFEENPINASGVDAKAILSARLSKSRRLENLIAQLPGEKKNGLFGNLIALSLGLTPNFKSNFDLAEDAKLQLSKDTYDDDLDNLLAQIGDQYADLFLAAKNLSDAILLSDILRVNTEITKAPLSASMIKRYDEHHQDLTLLKALVRQQLPEKYKEIFFDQSKNGYAGYIDGGASQEEFYKFIKPILEKMDGTEELLVKLNREDLLRKQRTFDNGSIPHQIHLGELHAILRRQEDFYPFLKDNREKIEKILTFRIPYYVGPLARGNSRFAWMTRKSEETITPWNFEEVVDKGASAQSFIERMTNFDKNLPNEKVLPKHSLLYEYFTVYNELTKVKYVTEGMRKPAFLSGEQKKAIVDLLFKTNRKVTVKQLKEDYFKKIECFDSVEISGVEDRFNASLGTYHDLLKIIKDKDFLDNEENEDILEDIVLTLTLFEDREMIEERLKTYAHLFDDKVMKQLKRRRYTGWGRLSRKLINGIRDKQSGKTILDFLKSDGFANRNFMQLIHDDSLTFKEDIQKAQVSGQGDSLHEHIANLAGSPAIKKGILQTVKVVDELVKVMGRHKPENIVIEMARENQTTQKGQKNSRERMKRIEEGIKELGSQILKEHPVENTQLQNEKLYLYYLQNGRDMYVDQELDINRLSDYDVDHIVPQSFLKDDSIDNKVLTRSDKARGKSDNVPSEEVVKKMKNYWRQLLNAKLITQRKFDNLTKAERGGLSELDKAGFIKRQLVETRQITKHVAQILDSRMNTKYDENDKLIREVKVITLKSKLVSDFRKDFQFYKVREINNYHHAHDAYLNAVVGTALIKKYPKLESEFVYGDYKVYDVRKMIAKSEQEIGKATAKYFFYSNIMNFFKTEITLANGEIRKRPLIETNGETGEIVWDKGRDFATVRKVLSMPQVNIVKKTEVQTGGFSKESILPKRNSDKLIARKKDWDPKKYGGFDSPTVAYSVLVVAKVEKGKSKKLKSVKELLGITIMERSSFEKNPIDFLEAKGYKEVKKDLIIKLPKYSLFELENGRKRMLASAGELQKGNELALPSKYVNFLYLASHYEKLKGSPEDNEQKQLFVEQHKHYLDEIIEQISEFSKRVILADANLDKVLSAYNKHRDKPIREQAENIIHLFTLTNLGAPAAFKYFDTTIDRKRYTSTKEVLDATLIHQSITGLYETRIDLSQLGGDGGGSSGSSGGLLGRDLLTKLKAQIQFSTEGPQVTWEDRPAMCLVLNLEEEYRLHEKPVPPSIDPSWLQLFPMVWAEKAGMGLANQVPPVVVELKSDASPVAVRQYPMSKEAREGIRPHIQRFLDLGILVPCQSPWNTPLLPVKKPGTNDYRPVQDLREVNKRVQDIHPTVPNPYNLLSSLPPSHTWYSVLDLKDAFFCLKLHPNSQPLFAFEWRDPEKGNTGQLTWTRLPQGFKNSPTLFNEALHRDLASFRALNPQVVMLQYVDDLLVAAPTYRDCKEGTRRLLQELSKLGYRVSAKKAQLCREEVTYLGYLLKGGKRWLTPARKATVMKIPTPTTPRQVREFLGKAGFCRLFIPGFASLAAPLYPLTRPKVPFTWTEAHQEAFGRIKEALLSAPALALPDLTKPFALYVDEKEGVARGVLTQTLGPWRRPVAYLSKKLDPVASGWPTCLKAIAAVALLLKDADKLTLGQNVLVIAPHNLESIVRQPPDRWMTNARMTHYQSLLLNERVSFAPPAILNPATLLPVESDDTPIHICSEILAEETGTRPDLRDQPLPGVPAWYTDGSSFIMDGRRQAGAAIVDNKRTVWASNLPEGTSAQKAELIALTQALRLAEGKSINIYTDSRYAFATAHVHGAIYKQRGWLTSAGKDIKNKEEILALLEAIHLPKRVAIIHCPGHQRGTDPVATGNRKADEAAKQAAQSTRILTETTKNAGKRTADGSEFEKRTADGSEFESPKKKAKVE

SEQ ID NO: 1748 - protein, 2122 aa, synthetic construct
MPAAKRVKLDGGDKKYSIGLDIGTNSVGWAVITDEYKVPSKKFKVLGNTDRHSIKKNLIGALLFDSGETAEATRLKRTARRRYTRRKNRICYLQEIFSNEMAKVDDSFFHRLEESFLVEEDKKHERHPIFGNIVDEVAYHEKYPTIYHLRKKLVDSTDKADLRLIYLALAHMIKFRGHFLIEGDLNPDNSDVDKLFIQLVQTYNQLFEENPINASGVDAKAILSARLSKSRRLENLIAQLPGEKKNGLFGNLIALSLGLTPNFKSNFDLAEDAKLQLSKDTYDDDLDNLLAQIGDQYADLFLAAKNLSDAILLSDILRVNTEITKAPLSASMIKRYDEHHQDLTLLKALVRQQLPEKYKEIFFDQSKNGYAGYIDGGASQEEFYKFIKPILEKMDGTEELLVKLNREDLLRKQRTFDNGSIPHQIHLGELHAILRRQEDFYPFLKDNREKIEKILTFRIPYYVGPLARGNSRFAWMTRKSEETITPWNFEEVVDKGASAQSFIERMTNFDKNLPNEKVLPKHSLLYEYFTVYNELTKVKYVTEGMRKPAFLSGEQKKAIVDLLFKTNRKVTVKQLKEDYFKKIECFDSVEISGVEDRFNASLGTYHDLLKIIKDKDFLDNEENEDILEDIVLTLTLFEDREMIEERLKTYAHLFDDKVMKQLKRRRYTGWGRLSRKLINGIRDKQSGKTILDFLKSDGFANRNFMQLIHDDSLTFKEDIQKAQVSGQGDSLHEHIANLAGSPAIKKGILQTVKVVDELVKVMGRHKPENIVIEMARENQTTQKGQKNSRERMKRIEEGIKELGSQILKEHPVENTQLQNEKLYLYYLQNGRDMYVDQELDINRLSDYDVDHIVPQSFLKDDSIDNKVLTRSDKARGKSDNVPSEEVVKKMKNYWRQLLNAKLITQRKFDNLTKAERGGLSELDKAGFIKRQLVETRQITKHVAQILDSRMNTKYDENDKLIREVKVITLKSKLVSDFRKDFQFYKVREINNYHHAHDAYLNAVVGTALIKKYPKLESEFVYGDYKVYDVRKMIAKSEQEIGKATAKYFFYSNIMNFFKTEITLANGEIRKRPLIETNGETGEIVWDKGRDFATVRKVLSMPQVNIVKKTEVQTGGFSKESILPKRNSDKLIARKKDWDPKKYGGFDSPTVAYSVLVVAKVEKGKSKKLKSVKELLGITIMERSSFEKNPIDFLEAKGYKEVKKDLIIKLPKYSLFELENGRKRMLASAGELQKGNELALPSKYVNFLYLASHYEKLKGSPEDNEQKQLFVEQHKHYLDEIIEQISEFSKRVILADANLDKVLSAYNKHRDKPIREQAENIIHLFTLTNLGAPAAFKYFDTTIDRKRYTSTKEVLDATLIHQSITGLYETRIDLSQLGGDGGGGGGGSGGLLGRDLLTKLKAQIQFSTEGPQVTWEDRPAMCLVLNLEEEYRLHEKPVPPSIDPSWLQLFPMVWAEKAGMGLANQVPPVVVELKSDASPVAVRQYPMSKEAREGIRPHIQRFLDLGILVPCQSPWNTPLLPVKKPGTNDYRPVQDLREVNKRVQDIHPTVPNPYNLLSSLPPSHTWYSVLDLKDAFFCLKLHPNSQPLFAFEWRDPEKGNTGQLTWTRLPQGFKNSPTLFNEALHRDLASFRALNPQVVMLQYVDDLLVAAPTYRDCKEGTRRLLQELSKLGYRVSAKKAQLCREEVTYLGYLLKGGKRWLTPARKATVMKIPTPTTPRQVREFLGKAGFCRLFIPGFASLAAPLYPLTRPKVPFTWTEAHQEAFGRIKEALLSAPALALPDLTKPFALYVDEKEGVARGVLTQTLGPWRRPVAYLSKKLDPVASGWPTCLKAIAAVALLLKDADKLTLGQNVLVIAPHNLESIVRQPPDRWMTNARMTHYQSLLLNERVSFAPPAILNPATLLPVESDDTPIHICSEILAEETGTRPDLRDQPLPGVPAWYTDGSSFIMDGRRQAGAAIVDNKRTVWASNLPEGTSAQKAELIALTQALRLAEGKSINIYTDSRYAFATAHVHGAIYKQRGWLTSAGKDIKNKEEILALLEAIHLPKRVAIIHCPGHQRGTDPVATGNRKADEAAKQAAQSTRILTETTKNAGKRTADGSEFEKRTADGSEFESPKKKAKVE

SEQ ID NO: 1749 - protein, 2125 aa, synthetic construct
MPAAKRVKLDGGDKKYSIGLDIGTNSVGWAVITDEYKVPSKKFKVLGNTDRHSIKKNLIGALLFDSGETAEATRLKRTARRRYTRRKNRICYLQEIFSNEMAKVDDSFFHRLEESFLVEEDKKHERHPIFGNIVDEVAYHEKYPTIYHLRKKLVDSTDKADLRLIYLALAHMIKFRGHFLIEGDLNPDNSDVDKLFIQLVQTYNQLFEENPINASGVDAKAILSARLSKSRRLENLIAQLPGEKKNGLFGNLIALSLGLTPNFKSNFDLAEDAKLQLSKDTYDDDLDNLLAQIGDQYADLFLAAKNLSDAILLSDILRVNTEITKAPLSASMIKRYDEHHQDLTLLKALVRQQLPEKYKEIFFDQSKNGYAGYIDGGASQEEFYKFIKPILEKMDGTEELLVKLNREDLLRKQRTFDNGSIPHQIHLGELHAILRRQEDFYPFLKDNREKIEKILTFRIPYYVGPLARGNSRFAWMTRKSEETITPWNFEEVVDKGASAQSFIERMTNFDKNLPNEKVLPKHSLLYEYFTVYNELTKVKYVTEGMRKPAFLSGEQKKAIVDLLFKTNRKVTVKQLKEDYFKKIECFDSVEISGVEDRFNASLGTYHDLLKIIKDKDFLDNEENEDILEDIVLTLTLFEDREMIEERLKTYAHLFDDKVMKQLKRRRYTGWGRLSRKLINGIRDKQSGKTILDFLKSDGFANRNFMQLIHDDSLTFKEDIQKAQVSGQGDSLHEHIANLAGSPAIKKGILQTVKVVDELVKVMGRHKPENIVIEMARENQTTQKGQKNSRERMKRIEEGIKELGSQILKEHPVENTQLQNEKLYLYYLQNGRDMYVDQELDINRLSDYDVDHIVPQSFLKDDSIDNKVLTRSDKARGKSDNVPSEEVVKKMKNYWRQLLNAKLITQRKFDNLTKAERGGLSELDKAGFIKRQLVETRQITKHVAQILDSRMNTKYDENDKLIREVKVITLKSKLVSDFRKDFQFYKVREINNYHHAHDAYLNAVVGTALIKKYPKLESEFVYGDYKVYDVRKMIAKSEQEIGKATAKYFFYSNIMNFFKTEITLANGEIRKRPLIETNGETGEIVWDKGRDFATVRKVLSMPQVNIVKKTEVQTGGFSKESILPKRNSDKLIARKKDWDPKKYGGFDSPTVAYSVLVVAKVEKGKSKKLKSVKELLGITIMERSSFEKNPIDFLEAKGYKEVKKDLIIKLPKYSLFELENGRKRMLASAGELQKGNELALPSKYVNFLYLASHYEKLKGSPEDNEQKQLFVEQHKHYLDEIIEQISEFSKRVILADANLDKVLSAYNKHRDKPIREQAENIIHLFTLTNLGAPAAFKYFDTTIDRKRYTSTKEVLDATLIHQSITGLYETRIDLSQLGGDGGPAPGSSGGSGGLLGRDLLTKLKAQIQFSTEGPQVTWEDRPAMCLVLNLEEEYRLHEKPVPPSIDPSWLQLFPMVWAEKAGMGLANQVPPVVVELKSDASPVAVRQYPMSKEAREGIRPHIQRFLDLGILVPCQSPWNTPLLPVKKPGTNDYRPVQDLREVNKRVQDIHPTVPNPYNLLSSLPPSHTWYSVLDLKDAFFCLKLHPNSQPLFAFEWRDPEKGNTGQLTWTRLPQGFKNSPTLFNEALHRDLASFRALNPQVVMLQYVDDLLVAAPTYRDCKEGTRRLLQELSKLGYRVSAKKAQLCREEVTYLGYLLKGGKRWLTPARKATVMKIPTPTTPRQVREFLGKAGFCRLFIPGFASLAAPLYPLTRPKVPFTWTEAHQEAFGRIKEALLSAPALALPDLTKPFALYVDEKEGVARGVLTQTLGPWRRPVAYLSKKLDPVASGWPTCLKAIAAVALLLKDADKLTLGQNVLVIAPHNLESIVRQPPDRWMTNARMTHYQSLLLNERVSFAPPAILNPATLLPVESDDTPIHICSEILAEETGTRPDLRDQPLPGVPAWYTDGSSFIMDGRRQAGAAIVDNKRTVWASNLPEGTSAQKAELIALTQALRLAEGKSINIYTDSRYAFATAHVHGAIYKQRGWLTSAGKDIKNKEEILALLEAIHLPKRVAIIHCPGHQRGTDPVATGNRKADEAAKQAAQSTRILTETTKNAGKRTADGSEFEKRTADGSEFESPKKKAKVE

SEQ ID NO: 1750 - protein, 2122 aa, synthetic construct
MPAAKRVKLDGGDKKYSIGLDIGTNSVGWAVITDEYKVPSKKFKVLGNTDRHSIKKNLIGALLFDSGETAEATRLKRTARRRYTRRKNRICYLQEIFSNEMAKVDDSFFHRLEESFLVEEDKKHERHPIFGNIVDEVAYHEKYPTIYHLRKKLVDSTDKADLRLIYLALAHMIKFRGHFLIEGDLNPDNSDVDKLFIQLVQTYNQLFEENPINASGVDAKAILSARLSKSRRLENLIAQLPGEKKNGLFGNLIALSLGLTPNFKSNFDLAEDAKLQLSKDTYDDDLDNLLAQIGDQYADLFLAAKNLSDAILLSDILRVNTEITKAPLSASMIKRYDEHHQDLTLLKALVRQQLPEKYKEIFFDQSKNGYAGYIDGGASQEEFYKFIKPILEKMDGTEELLVKLNREDLLRKQRTFDNGSIPHQIHLGELHAILRRQEDFYPFLKDNREKIEKILTFRIPYYVGPLARGNSRFAWMTRKSEETITPWNFEEVVDKGASAQSFIERMTNFDKNLPNEKVLPKHSLLYEYFTVYNELTKVKYVTEGMRKPAFLSGEQKKAIVDLLFKTNRKVTVKQLKEDYFKKIECFDSVEISGVEDRFNASLGTYHDLLKIIKDKDFLDNEENEDILEDIVLTLTLFEDREMIEERLKTYAHLFDDKVMKQLKRRRYTGWGRLSRKLINGIRDKQSGKTILDFLKSDGFANRNFMQLIHDDSLTFKEDIQKAQVSGQGDSLHEHIANLAGSPAIKKGILQTVKVVDELVKVMGRHKPENIVIEMARENQTTQKGQKNSRERMKRIEEGIKELGSQILKEHPVENTQLQNEKLYLYYLQNGRDMYVDQELDINRLSDYDVDHIVPQSFLKDDSIDNKVLTRSDKARGKSDNVPSEEVVKKMKNYWRQLLNAKLITQRKFDNLTKAERGGLSELDKAGFIKRQLVETRQITKHVAQILDSRMNTKYDENDKLIREVKVITLKSKLVSDFRKDFQFYKVREINNYHHAHDAYLNAVVGTALIKKYPKLESEFVYGDYKVYDVRKMIAKSEQEIGKATAKYFFYSNIMNFFKTEITLANGEIRKRPLIETNGETGEIVWDKGRDFATVRKVLSMPQVNIVKKTEVQTGGFSKESILPKRNSDKLIARKKDWDPKKYGGFDSPTVAYSVLVVAKVEKGKSKKLKSVKELLGITIMERSSFEKNPIDFLEAKGYKEVKKDLIIKLPKYSLFELENGRKRMLASAGELQKGNELALPSKYVNFLYLASHYEKLKGSPEDNEQKQLFVEQHKHYLDEIIEQISEFSKRVILADANLDKVLSAYNKHRDKPIREQAENIIHLFTLTNLGAPAAFKYFDTTIDRKRYTSTKEVLDATLIHQSITGLYETRIDLSQLGGDGGGGSGGSGGLLGRDLLTKLKAQIQFSTEGPQVTWEDRPAMCLVLNLEEEYRLHEKPVPPSIDPSWLQLFPMVWAEKAGMGLANQVPPVVVELKSDASPVAVRQYPMSKEAREGIRPHIQRFLDLGILVPCQSPWNTPLLPVKKPGTNDYRPVQDLREVNKRVQDIHPTVPNPYNLLSSLPPSHTWYSVLDLKDAFFCLKLHPNSQPLFAFEWRDPEKGNTGQLTWTRLPQGFKNSPTLFNEALHRDLASFRALNPQVVMLQYVDDLLVAAPTYRDCKEGTRRLLQELSKLGYRVSAKKAQLCREEVTYLGYLLKGGKRWLTPARKATVMKIPTPTTPRQVREFLGKAGFCRLFIPGFASLAAPLYPLTRPKVPFTWTEAHQEAFGRIKEALLSAPALALPDLTKPFALYVDEKEGVARGVLTQTLGPWRRPVAYLSKKLDPVASGWPTCLKAIAAVALLLKDADKLTLGQNVLVIAPHNLESIVRQPPDRWMTNARMTHYQSLLLNERVSFAPPAILNPATLLPVESDDTPIHICSEILAEETGTRPDLRDQPLPGVPAWYTDGSSFIMDGRRQAGAAIVDNKRTVWASNLPEGTSAQKAELIALTQALRLAEGKSINIYTDSRYAFATAHVHGAIYKQRGWLTSAGKDIKNKEEILALLEAIHLPKRVAIIHCPGHQRGTDPVATGNRKADEAAKQAAQSTRILTETTKNAGKRTADGSEFEKRTADGSEFESPKKKAKVE

SEQ ID NO: 1751 - protein, 2216 aa, synthetic construct
MPAAKRVKLDGGDKKYSIGLDIGTNSVGWAVITDEYKVPSKKFKVLGNTDRHSIKKNLIGALLFDSGETAEATRLKRTARRRYTRRKNRICYLQEIFSNEMAKVDDSFFHRLEESFLVEEDKKHERHPIFGNIVDEVAYHEKYPTIYHLRKKLVDSTDKADLRLIYLALAHMIKFRGHFLIEGDLNPDNSDVDKLFIQLVQTYNQLFEENPINASGVDAKAILSARLSKSRRLENLIAQLPGEKKNGLFGNLIALSLGLTPNFKSNFDLAEDAKLQLSKDTYDDDLDNLLAQIGDQYADLFLAAKNLSDAILLSDILRVNTEITKAPLSASMIKRYDEHHQDLTLLKALVRQQLPEKYKEIFFDQSKNGYAGYIDGGASQEEFYKFIKPILEKMDGTEELLVKLNREDLLRKQRTFDNGSIPHQIHLGELHAILRRQEDFYPFLKDNREKIEKILTFRIPYYVGPLARGNSRFAWMTRKSEETITPWNFEEVVDKGASAQSFIERMTNFDKNLPNEKVLPKHSLLYEYFTVYNELTKVKYVTEGMRKPAFLSGEQKKAIVDLLFKTNRKVTVKQLKEDYFKKIECFDSVEISGVEDRFNASLGTYHDLLKIIKDKDFLDNEENEDILEDIVLTLTLFEDREMIEERLKTYAHLFDDKVMKQLKRRRYTGWGRLSRKLINGIRDKQSGKTILDFLKSDGFANRNFMQLIHDDSLTFKEDIQKAQVSGQGDSLHEHIANLAGSPAIKKGILQTVKVVDELVKVMGRHKPENIVIEMARENQTTQKGQKNSRERMKRIEEGIKELGSQILKEHPVENTQLQNEKLYLYYLQNGRDMYVDQELDINRLSDYDVDHIVPQSFLKDDSIDNKVLTRSDKARGKSDNVPSEEVVKKMKNYWRQLLNAKLITQRKFDNLTKAERGGLSELDKAGFIKRQLVETRQITKHVAQILDSRMNTKYDENDKLIREVKVITLKSKLVSDFRKDFQFYKVREINNYHHAHDAYLNAVVGTALIKKYPKLESEFVYGDYKVYDVRKMIAKSEQEIGKATAKYFFYSNIMNFFKTEITLANGEIRKRPLIETNGETGEIVWDKGRDFATVRKVLSMPQVNIVKKTEVQTGGFSKESILPKRNSDKLIARKKDWDPKKYGGFDSPTVAYSVLVVAKVEKGKSKKLKSVKELLGITIMERSSFEKNPIDFLEAKGYKEVKKDLIIKLPKYSLFELENGRKRMLASAGELQKGNELALPSKYVNFLYLASHYEKLKGSPEDNEQKQLFVEQHKHYLDEIIEQISEFSKRVILADANLDKVLSAYNKHRDKPIREQAENIIHLFTLTNLGAPAAFKYFDTTIDRKRYTSTKEVLDATLIHQSITGLYETRIDLSQLGGDGGGGGGGSGSSGGTLGDQGSRGSDPLPEPRVTLTVEGIPTEFLVNTGAEHSVLTKPMGKMGSKRTVVAGATGSKVYPWTTKRLLKIGQKQVTHSFLVIPECPAPLLGRDLLTKLKAQIQFSTEGPQVTWEDRPAMCLVLNLEEEYRLHEKPVPPSIDPSWLQLFPMVWAEKAGMGLANQVPPVVVELKSDASPVAVRQYPMSKEAREGIRPHIQRFLDLGILVPCQSPWNTPLLPVKKPGTNDYRPVQDLREVNKRVQDIHPTVPNPYNLLSSLPPSHTWYSVLDLKDAFFCLKLHPNSQPLFAFEWRDPEKGNTGQLTWTRLPQGFKNSPTLFNEALHRDLASFRALNPQVVMLQYVDDLLVAAPTYRDCKEGTRRLLQELSKLGYRVSAKKAQLCREEVTYLGYLLKGGKRWLTPARKATVMKIPTPTTPRQVREFLGTAGFCRLWIPGFASLAAPLYPLTRPKVPFTWTEAHQEAFGRIKEALLSAPALALPDLTKPFALYVDEKEGVARGVLTQTLGPWRRPVAYLSKKLDPVASGWPTCLKAIAAVALLLKDADKLTLGQNVLVIAPHNLESIVRQPPDRWMTNARMTHYQSLLLNERVSFAPPAILNPATLLPVESDDTPIHICSEILAEETGTRPDLRDQPLPGVPAWYTDGSSFIMDGRRQAGAAIVDNKRTVWASNLPEGTSAQKAELIALTQALRLAEGKSINIYTDSRYAFATAHVHGAIYKQRGWLTSAGKDIKNKEEILALLEAIHLPKRVAIIHCPGHQRGTDPVATGNRKADEAAKQAAQSTRILTETTKNAGKRTADGSEFEKRTADGSEFESPKKKAKVE

SEQ ID NO: 1752 - protein, 2237 aa, synthetic construct
MPAAKRVKLDGGDKKYSIGLDIGTNSVGWAVITDEYKVPSKKFKVLGNTDRHSIKKNLIGALLFDSGETAEATRLKRTARRRYTRRKNRICYLQEIFSNEMAKVDDSFFHRLEESFLVEEDKKHERHPIFGNIVDEVAYHEKYPTIYHLRKKLVDSTDKADLRLIYLALAHMIKFRGHFLIEGDLNPDNSDVDKLFIQLVQTYNQLFEENPINASGVDAKAILSARLSKSRRLENLIAQLPGEKKNGLFGNLIALSLGLTPNFKSNFDLAEDAKLQLSKDTYDDDLDNLLAQIGDQYADLFLAAKNLSDAILLSDILRVNTEITKAPLSASMIKRYDEHHQDLTLLKALVRQQLPEKYKEIFFDQSKNGYAGYIDGGASQEEFYKFIKPILEKMDGTEELLVKLNREDLLRKQRTFDNGSIPHQIHLGELHAILRRQEDFYPFLKDNREKIEKILTFRIPYYVGPLARGNSRFAWMTRKSEETITPWNFEEVVDKGASAQSFIERMTNFDKNLPNEKVLPKHSLLYEYFTVYNELTKVKYVTEGMRKPAFLSGEQKKAIVDLLFKTNRKVTVKQLKEDYFKKIECFDSVEISGVEDRFNASLGTYHDLLKIIKDKDFLDNEENEDILEDIVLTLTLFEDREMIEERLKTYAHLFDDKVMKQLKRRRYTGWGRLSRKLINGIRDKQSGKTILDFLKSDGFANRNFMQLIHDDSLTFKEDIQKAQVSGQGDSLHEHIANLAGSPAIKKGILQTVKVVDELVKVMGRHKPENIVIEMARENQTTQKGQKNSRERMKRIEEGIKELGSQILKEHPVENTQLQNEKLYLYYLQNGRDMYVDQELDINRLSDYDVDHIVPQSFLKDDSIDNKVLTRSDKARGKSDNVPSEEVVKKMKNYWRQLLNAKLITQRKFDNLTKAERGGLSELDKAGFIKRQLVETRQITKHVAQILDSRMNTKYDENDKLIREVKVITLKSKLVSDFRKDFQFYKVREINNYHHAHDAYLNAVVGTALIKKYPKLESEFVYGDYKVYDVRKMIAKSEQEIGKATAKYFFYSNIMNFFKTEITLANGEIRKRPLIETNGETGEIVWDKGRDFATVRKVLSMPQVNIVKKTEVQTGGFSKESILPKRNSDKLIARKKDWDPKKYGGFDSPTVAYSVLVVAKVEKGKSKKLKSVKELLGITIMERSSFEKNPIDFLEAKGYKEVKKDLIIKLPKYSLFELENGRKRMLASAGELQKGNELALPSKYVNFLYLASHYEKLKGSPEDNEQKQLFVEQHKHYLDEIIEQISEFSKRVILADANLDKVLSAYNKHRDKPIREQAENIIHLFTLTNLGAPAAFKYFDTTIDRKRYTSTKEVLDATLIHQSITGLYETRIDLSQLGGDGGGGGGSGGGGSGGGGSGGGGSGGGGSGGGGSGGTLGDQGSRGSDPLPEPRVTLTVEGIPTEFLVNTGAEHSVLTKPMGKMGSKRTVVAGATGSKVYPWTTKRLLKIGQKQVTHSFLVIPECPAPLLGRDLLTKLKAQIQFSTEGPQVTWEDRPAMCLVLNLEEEYRLHEKPVPPSIDPSWLQLFPMVWAEKAGMGLANQVPPVVVELKSDASPVAVRQYPMSKEAREGIRPHIQRFLDLGILVPCQSPWNTPLLPVKKPGTNDYRPVQDLREVNKRVQDIHPTVPNPYNLLSSLPPSHTWYSVLDLKDAFFCLKLHPNSQPLFAFEWRDPEKGNTGQLTWTRLPQGFKNSPTLFNEALHRDLASFRALNPQVVMLQYVDDLLVAAPTYRDCKEGTRRLLQELSKLGYRVSAKKAQLCREEVTYLGYLLKGGKRWLTPARKATVMKIPTPTTPRQVREFLGTAGFCRLWIPGFASLAAPLYPLTRPKVPFTWTEAHQEAFGRIKEALLSAPALALPDLTKPFALYVDEKEGVARGVLTQTLGPWRRPVAYLSKKLDPVASGWPTCLKAIAAVALLLKDADKLTLGQNVLVIAPHNLESIVRQPPDRWMTNARMTHYQSLLLNERVSFAPPAILNPATLLPVESDDTPIHICSEILAEETGTRPDLRDQPLPGVPAWYTDGSSFIMDGRRQAGAAIVDNKRTVWASNLPEGTSAQKAELIALTQALRLAEGKSINIYTDSRYAFATAHVHGAIYKQRGWLTSAGKDIKNKEEILALLEAIHLPKRVAIIHCPGHQRGTDPVATGNRKADEAAKQAAQSTRILTETTKNAGKRTADGSEFEKRTADGSEFESPKKKAKVE

SEQ ID NO: 1753 - protein, 2218 aa, synthetic construct
MPAAKRVKLDGGDKKYSIGLDIGTNSVGWAVITDEYKVPSKKFKVLGNTDRHSIKKNLIGALLFDSGETAEATRLKRTARRRYTRRKNRICYLQEIFSNEMAKVDDSFFHRLEESFLVEEDKKHERHPIFGNIVDEVAYHEKYPTIYHLRKKLVDSTDKADLRLIYLALAHMIKFRGHFLIEGDLNPDNSDVDKLFIQLVQTYNQLFEENPINASGVDAKAILSARLSKSRRLENLIAQLPGEKKNGLFGNLIALSLGLTPNFKSNFDLAEDAKLQLSKDTYDDDLDNLLAQIGDQYADLFLAAKNLSDAILLSDILRVNTEITKAPLSASMIKRYDEHHQDLTLLKALVRQQLPEKYKEIFFDQSKNGYAGYIDGGASQEEFYKFIKPILEKMDGTEELLVKLNREDLLRKQRTFDNGSIPHQIHLGELHAILRRQEDFYPFLKDNREKIEKILTFRIPYYVGPLARGNSRFAWMTRKSEETITPWNFEEVVDKGASAQSFIERMTNFDKNLPNEKVLPKHSLLYEYFTVYNELTKVKYVTEGMRKPAFLSGEQKKAIVDLLFKTNRKVTVKQLKEDYFKKIECFDSVEISGVEDRFNASLGTYHDLLKIIKDKDFLDNEENEDILEDIVLTLTLFEDREMIEERLKTYAHLFDDKVMKQLKRRRYTGWGRLSRKLINGIRDKQSGKTILDFLKSDGFANRNFMQLIHDDSLTFKEDIQKAQVSGQGDSLHEHIANLAGSPAIKKGILQTVKVVDELVKVMGRHKPENIVIEMARENQTTQKGQKNSRERMKRIEEGIKELGSQILKEHPVENTQLQNEKLYLYYLQNGRDMYVDQELDINRLSDYDVDHIVPQSFLKDDSIDNKVLTRSDKARGKSDNVPSEEVVKKMKNYWRQLLNAKLITQRKFDNLTKAERGGLSELDKAGFIKRQLVETRQITKHVAQILDSRMNTKYDENDKLIREVKVITLKSKLVSDFRKDFQFYKVREINNYHHAHDAYLNAVVGTALIKKYPKLESEFVYGDYKVYDVRKMIAKSEQEIGKATAKYFFYSNIMNFFKTEITLANGEIRKRPLIETNGETGEIVWDKGRDFATVRKVLSMPQVNIVKKTEVQTGGFSKESILPKRNSDKLIARKKDWDPKKYGGFDSPTVAYSVLVVAKVEKGKSKKLKSVKELLGITIMERSSFEKNPIDFLEAKGYKEVKKDLIIKLPKYSLFELENGRKRMLASAGELQKGNELALPSKYVNFLYLASHYEKLKGSPEDNEQKQLFVEQHKHYLDEIIEQISEFSKRVILADANLDKVLSAYNKHRDKPIREQAENIIHLFTLTNLGAPAAFKYFDTTIDRKRYTSTKEVLDATLIHQSITGLYETRIDLSQLGGDGGEAAAKGGGPAPGGTLGDQGSRGSDPLPEPRVTLTVEGIPTEFLVNTGAEHSVLTKPMGKMGSKRTVVAGATGSKVYPWTTKRLLKIGQKQVTHSFLVIPECPAPLLGRDLLTKLKAQIQFSTEGPQVTWEDRPAMCLVLNLEEEYRLHEKPVPPSIDPSWLQLFPMVWAEKAGMGLANQVPPVVVELKSDASPVAVRQYPMSKEAREGIRPHIQRFLDLGILVPCQSPWNTPLLPVKKPGTNDYRPVQDLREVNKRVQDIHPTVPNPYNLLSSLPPSHTWYSVLDLKDAFFCLKLHPNSQPLFAFEWRDPEKGNTGQLTWTRLPQGFKNSPTLFNEALHRDLASFRALNPQVVMLQYVDDLLVAAPTYRDCKEGTRRLLQELSKLGYRVSAKKAQLCREEVTYLGYLLKGGKRWLTPARKATVMKIPTPTTPRQVREFLGTAGFCRLWIPGFASLAAPLYPLTRPKVPFTWTEAHQEAFGRIKEALLSAPALALPDLTKPFALYVDEKEGVARGVLTQTLGPWRRPVAYLSKKLDPVASGWPTCLKAIAAVALLLKDADKLTLGQNVLVIAPHNLESIVRQPPDRWMTNARMTHYQSLLLNERVSFAPPAILNPATLLPVESDDTPIHICSEILAEETGTRPDLRDQPLPGVPAWYTDGSSFIMDGRRQAGAAIVDNKRTVWASNLPEGTSAQKAELIALTQALRLAEGKSINIYTDSRYAFATAHVHGAIYKQRGWLTSAGKDIKNKEEILALLEAIHLPKRVAIIHCPGHQRGTDPVATGNRKADEAAKQAAQSTRILTETTKNAGKRTADGSEFEKRTADGSEFESPKKKAKVE

SEQ ID NO: 1754 - protein, 2218 aa, synthetic construct
MPAAKRVKLDGGDKKYSIGLDIGTNSVGWAVITDEYKVPSKKFKVLGNTDRHSIKKNLIGALLFDSGETAEATRLKRTARRRYTRRKNRICYLQEIFSNEMAKVDDSFFHRLEESFLVEEDKKHERHPIFGNIVDEVAYHEKYPTIYHLRKKLVDSTDKADLRLIYLALAHMIKFRGHFLIEGDLNPDNSDVDKLFIQLVQTYNQLFEENPINASGVDAKAILSARLSKSRRLENLIAQLPGEKKNGLFGNLIALSLGLTPNFKSNFDLAEDAKLQLSKDTYDDDLDNLLAQIGDQYADLFLAAKNLSDAILLSDILRVNTEITKAPLSASMIKRYDEHHQDLTLLKALVRQQLPEKYKEIFFDQSKNGYAGYIDGGASQEEFYKFIKPILEKMDGTEELLVKLNREDLLRKQRTFDNGSIPHQIHLGELHAILRRQEDFYPFLKDNREKIEKILTFRIPYYVGPLARGNSRFAWMTRKSEETITPWNFEEVVDKGASAQSFIERMTNFDKNLPNEKVLPKHSLLYEYFTVYNELTKVKYVTEGMRKPAFLSGEQKKAIVDLLFKTNRKVTVKQLKEDYFKKIECFDSVEISGVEDRFNASLGTYHDLLKIIKDKDFLDNEENEDILEDIVLTLTLFEDREMIEERLKTYAHLFDDKVMKQLKRRRYTGWGRLSRKLINGIRDKQSGKTILDFLKSDGFANRNFMQLIHDDSLTFKEDIQKAQVSGQGDSLHEHIANLAGSPAIKKGILQTVKVVDELVKVMGRHKPENIVIEMARENQTTQKGQKNSRERMKRIEEGIKELGSQILKEHPVENTQLQNEKLYLYYLQNGRDMYVDQELDINRLSDYDVDHIVPQSFLKDDSIDNKVLTRSDKARGKSDNVPSEEVVKKMKNYWRQLLNAKLITQRKFDNLTKAERGGLSELDKAGFIKRQLVETRQITKHVAQILDSRMNTKYDENDKLIREVKVITLKSKLVSDFRKDFQFYKVREINNYHHAHDAYLNAVVGTALIKKYPKLESEFVYGDYKVYDVRKMIAKSEQEIGKATAKYFFYSNIMNFFKTEITLANGEIRKRPLIETNGETGEIVWDKGRDFATVRKVLSMPQVNIVKKTEVQTGGFSKESILPKRNSDKLIARKKDWDPKKYGGFDSPTVAYSVLVVAKVEKGKSKKLKSVKELLGITIMERSSFEKNPIDFLEAKGYKEVKKDLIIKLPKYSLFELENGRKRMLASAGELQKGNELALPSKYVNFLYLASHYEKLKGSPEDNEQKQLFVEQHKHYLDEIIEQISEFSKRVILADANLDKVLSAYNKHRDKPIREQAENIIHLFTLTNLGAPAAFKYFDTTIDRKRYTSTKEVLDATLIHQSITGLYETRIDLSQLGGDGGPAPGGSEAAAKGGTLGDQGSRGSDPLPEPRVTLTVEGIPTEFLVNTGAEHSVLTKPMGKMGSKRTVVAGATGSKVYPWTTKRLLKIGQKQVTHSFLVIPECPAPLLGRDLLTKLKAQIQFSTEGPQVTWEDRPAMCLVLNLEEEYRLHEKPVPPSIDPSWLQLFPMVWAEKAGMGLANQVPPVVVELKSDASPVAVRQYPMSKEAREGIRPHIQRFLDLGILVPCQSPWNTPLLPVKKPGTNDYRPVQDLREVNKRVQDIHPTVPNPYNLLSSLPPSHTWYSVLDLKDAFFCLKLHPNSQPLFAFEWRDPEKGNTGQLTWTRLPQGFKNSPTLFNEALHRDLASFRALNPQVVMLQYVDDLLVAAPTYRDCKEGTRRLLQELSKLGYRVSAKKAQLCREEVTYLGYLLKGGKRWLTPARKATVMKIPTPTTPRQVREFLGTAGFCRLWIPGFASLAAPLYPLTRPKVPFTWTEAHQEAFGRIKEALLSAPALALPDLTKPFALYVDEKEGVARGVLTQTLGPWRRPVAYLSKKLDPVASGWPTCLKAIAAVALLLKDADKLTLGQNVLVIAPHNLESIVRQPPDRWMTNARMTHYQSLLLNERVSFAPPAILNPATLLPVESDDTPIHICSEILAEETGTRPDLRDQPLPGVPAWYTDGSSFIMDGRRQAGAAIVDNKRTVWASNLPEGTSAQKAELIALTQALRLAEGKSINIYTDSRYAFATAHVHGAIYKQRGWLTSAGKDIKNKEEILALLEAIHLPKRVAIIHCPGHQRGTDPVATGNRKADEAAKQAAQSTRILTETTKNAGKRTADGSEFEKRTADGSEFESPKKKAKVE

SEQ ID NO: 1755 - protein, 2219 aa, synthetic construct
MPAAKRVKLDGGDKKYSIGLDIGTNSVGWAVITDEYKVPSKKFKVLGNTDRHSIKKNLIGALLFDSGETAEATRLKRTARRRYTRRKNRICYLQEIFSNEMAKVDDSFFHRLEESFLVEEDKKHERHPIFGNIVDEVAYHEKYPTIYHLRKKLVDSTDKADLRLIYLALAHMIKFRGHFLIEGDLNPDNSDVDKLFIQLVQTYNQLFEENPINASGVDAKAILSARLSKSRRLENLIAQLPGEKKNGLFGNLIALSLGLTPNFKSNFDLAEDAKLQLSKDTYDDDLDNLLAQIGDQYADLFLAAKNLSDAILLSDILRVNTEITKAPLSASMIKRYDEHHQDLTLLKALVRQQLPEKYKEIFFDQSKNGYAGYIDGGASQEEFYKFIKPILEKMDGTEELLVKLNREDLLRKQRTFDNGSIPHQIHLGELHAILRRQEDFYPFLKDNREKIEKILTFRIPYYVGPLARGNSRFAWMTRKSEETITPWNFEEVVDKGASAQSFIERMTNFDKNLPNEKVLPKHSLLYEYFTVYNELTKVKYVTEGMRKPAFLSGEQKKAIVDLLFKTNRKVTVKQLKEDYFKKIECFDSVEISGVEDRFNASLGTYHDLLKIIKDKDFLDNEENEDILEDIVLTLTLFEDREMIEERLKTYAHLFDDKVMKQLKRRRYTGWGRLSRKLINGIRDKQSGKTILDFLKSDGFANRNFMQLIHDDSLTFKEDIQKAQVSGQGDSLHEHIANLAGSPAIKKGILQTVKVVDELVKVMGRHKPENIVIEMARENQTTQKGQKNSRERMKRIEEGIKELGSQILKEHPVENTQLQNEKLYLYYLQNGRDMYVDQELDINRLSDYDVDHIVPQSFLKDDSIDNKVLTRSDKARGKSDNVPSEEVVKKMKNYWRQLLNAKLITQRKFDNLTKAERGGLSELDKAGFIKRQLVETRQITKHVAQILDSRMNTKYDENDKLIREVKVITLKSKLVSDFRKDFQFYKVREINNYHHAHDAYLNAVVGTALIKKYPKLESEFVYGDYKVYDVRKMIAKSEQEIGKATAKYFFYSNIMNFFKTEITLANGEIRKRPLIETNGETGEIVWDKGRDFATVRKVLSMPQVNIVKKTEVQTGGFSKESILPKRNSDKLIARKKDWDPKKYGGFDSPTVAYSVLVVAKVEKGKSKKLKSVKELLGITIMERSSFEKNPIDFLEAKGYKEVKKDLIIKLPKYSLFELENGRKRMLASAGELQKGNELALPSKYVNFLYLASHYEKLKGSPEDNEQKQLFVEQHKHYLDEIIEQISEFSKRVILADANLDKVLSAYNKHRDKPIREQAENIIHLFTLTNLGAPAAFKYFDTTIDRKRYTSTKEVLDATLIHQSITGLYETRIDLSQLGGDGGGGSGGSGGSGGSGGTLGDQGSRGSDPLPEPRVTLTVEGIPTEFLVNTGAEHSVLTKPMGKMGSKRTVVAGATGSKVYPWTTKRLLKIGQKQVTHSFLVIPECPAPLLGRDLLTKLKAQIQFSTEGPQVTWEDRPAMCLVLNLEEEYRLHEKPVPPSIDPSWLQLFPMVWAEKAGMGLANQVPPVVVELKSDASPVAVRQYPMSKEAREGIRPHIQRFLDLGILVPCQSPWNTPLLPVKKPGTNDYRPVQDLREVNKRVQDIHPTVPNPYNLLSSLPPSHTWYSVLDLKDAFFCLKLHPNSQPLFAFEWRDPEKGNTGQLTWTRLPQGFKNSPTLFNEALHRDLASFRALNPQVVMLQYVDDLLVAAPTYRDCKEGTRRLLQELSKLGYRVSAKKAQLCREEVTYLGYLLKGGKRWLTPARKATVMKIPTPTTPRQVREFLGTAGFCRLWIPGFASLAAPLYPLTRPKVPFTWTEAHQEAFGRIKEALLSAPALALPDLTKPFALYVDEKEGVARGVLTQTLGPWRRPVAYLSKKLDPVASGWPTCLKAIAAVALLLKDADKLTLGQNVLVIAPHNLESIVRQPPDRWMTNARMTHYQSLLLNERVSFAPPAILNPATLLPVESDDTPIHICSEILAEETGTRPDLRDQPLPGVPAWYTDGSSFIMDGRRQAGAAIVDNKRTVWASNLPEGTSAQKAELIALTQALRLAEGKSINIYTDSRYAFATAHVHGAIYKQRGWLTSAGKDIKNKEEILALLEAIHLPKRVAIIHCPGHQRGTDPVATGNRKADEAAKQAAQSTRILTETTKNAGKRTADGSEFEKRTADGSEFESPKKKAKVE

SEQ ID NO: 1756 - protein, 2218 aa, synthetic construct
MPAAKRVKLDGGDKKYSIGLDIGTNSVGWAVITDEYKVPSKKFKVLGNTDRHSIKKNLIGALLFDSGETAEATRLKRTARRRYTRRKNRICYLQEIFSNEMAKVDDSFFHRLEESFLVEEDKKHERHPIFGNIVDEVAYHEKYPTIYHLRKKLVDSTDKADLRLIYLALAHMIKFRGHFLIEGDLNPDNSDVDKLFIQLVQTYNQLFEENPINASGVDAKAILSARLSKSRRLENLIAQLPGEKKNGLFGNLIALSLGLTPNFKSNFDLAEDAKLQLSKDTYDDDLDNLLAQIGDQYADLFLAAKNLSDAILLSDILRVNTEITKAPLSASMIKRYDEHHQDLTLLKALVRQQLPEKYKEIFFDQSKNGYAGYIDGGASQEEFYKFIKPILEKMDGTEELLVKLNREDLLRKQRTFDNGSIPHQIHLGELHAILRRQEDFYPFLKDNREKIEKILTFRIPYYVGPLARGNSRFAWMTRKSEETITPWNFEEVVDKGASAQSFIERMTNFDKNLPNEKVLPKHSLLYEYFTVYNELTKVKYVTEGMRKPAFLSGEQKKAIVDLLFKTNRKVTVKQLKEDYFKKIECFDSVEISGVEDRFNASLGTYHDLLKIIKDKDFLDNEENEDILEDIVLTLTLFEDREMIEERLKTYAHLFDDKVMKQLKRRRYTGWGRLSRKLINGIRDKQSGKTILDFLKSDGFANRNFMQLIHDDSLTFKEDIQKAQVSGQGDSLHEHIANLAGSPAIKKGILQTVKVVDELVKVMGRHKPENIVIEMARENQTTQKGQKNSRERMKRIEEGIKELGSQILKEHPVENTQLQNEKLYLYYLQNGRDMYVDQELDINRLSDYDVDHIVPQSFLKDDSIDNKVLTRSDKARGKSDNVPSEEVVKKMKNYWRQLLNAKLITQRKFDNLTKAERGGLSELDKAGFIKRQLVETRQITKHVAQILDSRMNTKYDENDKLIREVKVITLKSKLVSDFRKDFQFYKVREINNYHHAHDAYLNAVVGTALIKKYPKLESEFVYGDYKVYDVRKMIAKSEQEIGKATAKYFFYSNIMNFFKTEITLANGEIRKRPLIETNGETGEIVWDKGRDFATVRKVLSMPQVNIVKKTEVQTGGFSKESILPKRNSDKLIARKKDWDPKKYGGFDSPTVAYSVLVVAKVEKGKSKKLKSVKELLGITIMERSSFEKNPIDFLEAKGYKEVKKDLIIKLPKYSLFELENGRKRMLASAGELQKGNELALPSKYVNFLYLASHYEKLKGSPEDNEQKQLFVEQHKHYLDEIIEQISEFSKRVILADANLDKVLSAYNKHRDKPIREQAENIIHLFTLTNLGAPAAFKYFDTTIDRKRYTSTKEVLDATLIHQSITGLYETRIDLSQLGGDGGEAAAKGSSGGGGGTLGDQGSRGSDPLPEPRVTLTVEGIPTEFLVNTGAEHSVLTKPMGKMGSKRTVVAGATGSKVYPWTTKRLLKIGQKQVTHSFLVIPECPAPLLGRDLLTKLKAQIQFSTEGPQVTWEDRPAMCLVLNLEEEYRLHEKPVPPSIDPSWLQLFPMVWAEKAGMGLANQVPPVVVELKSDASPVAVRQYPMSKEAREGIRPHIQRFLDLGILVPCQSPWNTPLLPVKKPGTNDYRPVQDLREVNKRVQDIHPTVPNPYNLLSSLPPSHTWYSVLDLKDAFFCLKLHPNSQPLFAFEWRDPEKGNTGQLTWTRLPQGFKNSPTLFNEALHRDLASFRALNPQVVMLQYVDDLLVAAPTYRDCKEGTRRLLQELSKLGYRVSAKKAQLCREEVTYLGYLLKGGKRWLTPARKATVMKIPTPTTPRQVREFLGTAGFCRLWIPGFASLAAPLYPLTRPKVPFTWTEAHQEAFGRIKEALLSAPALALPDLTKPFALYVDEKEGVARGVLTQTLGPWRRPVAYLSKKLDPVASGWPTCLKAIAAVALLLKDADKLTLGQNVLVIAPHNLESIVRQPPDRWMTNARMTHYQSLLLNERVSFAPPAILNPATLLPVESDDTPIHICSEILAEETGTRPDLRDQPLPGVPAWYTDGSSFIMDGRRQAGAAIVDNKRTVWASNLPEGTSAQKAELIALTQALRLAEGKSINIYTDSRYAFATAHVHGAIYKQRGWLTSAGKDIKNKEEILALLEAIHLPKRVAIIHCPGHQRGTDPVATGNRKADEAAKQAAQSTRILTETTKNAGKRTADGSEFEKRTADGSEFESPKKKAKVE

SEQ ID NO: 1757 - protein, 2216 aa, synthetic construct
MPAAKRVKLDGGDKKYSIGLDIGTNSVGWAVITDEYKVPSKKFKVLGNTDRHSIKKNLIGALLFDSGETAEATRLKRTARRRYTRRKNRICYLQEIFSNEMAKVDDSFFHRLEESFLVEEDKKHERHPIFGNIVDEVAYHEKYPTIYHLRKKLVDSTDKADLRLIYLALAHMIKFRGHFLIEGDLNPDNSDVDKLFIQLVQTYNQLFEENPINASGVDAKAILSARLSKSRRLENLIAQLPGEKKNGLFGNLIALSLGLTPNFKSNFDLAEDAKLQLSKDTYDDDLDNLLAQIGDQYADLFLAAKNLSDAILLSDILRVNTEITKAPLSASMIKRYDEHHQDLTLLKALVRQQLPEKYKEIFFDQSKNGYAGYIDGGASQEEFYKFIKPILEKMDGTEELLVKLNREDLLRKQRTFDNGSIPHQIHLGELHAILRRQEDFYPFLKDNREKIEKILTFRIPYYVGPLARGNSRFAWMTRKSEETITPWNFEEVVDKGASAQSFIERMTNFDKNLPNEKVLPKHSLLYEYFTVYNELTKVKYVTEGMRKPAFLSGEQKKAIVDLLFKTNRKVTVKQLKEDYFKKIECFDSVEISGVEDRFNASLGTYHDLLKIIKDKDFLDNEENEDILEDIVLTLTLFEDREMIEERLKTYAHLFDDKVMKQLKRRRYTGWGRLSRKLINGIRDKQSGKTILDFLKSDGFANRNFMQLIHDDSLTFKEDIQKAQVSGQGDSLHEHIANLAGSPAIKKGILQTVKVVDELVKVMGRHKPENIVIEMARENQTTQKGQKNSRERMKRIEEGIKELGSQILKEHPVENTQLQNEKLYLYYLQNGRDMYVDQELDINRLSDYDVDHIVPQSFLKDDSIDNKVLTRSDKARGKSDNVPSEEVVKKMKNYWRQLLNAKLITQRKFDNLTKAERGGLSELDKAGFIKRQLVETRQITKHVAQILDSRMNTKYDENDKLIREVKVITLKSKLVSDFRKDFQFYKVREINNYHHAHDAYLNAVVGTALIKKYPKLESEFVYGDYKVYDVRKMIAKSEQEIGKATAKYFFYSNIMNFFKTEITLANGEIRKRPLIETNGETGEIVWDKGRDFATVRKVLSMPQVNIVKKTEVQTGGFSKESILPKRNSDKLIARKKDWDPKKYGGFDSPTVAYSVLVVAKVEKGKSKKLKSVKELLGITIMERSSFEKNPIDFLEAKGYKEVKKDLIIKLPKYSLFELENGRKRMLASAGELQKGNELALPSKYVNFLYLASHYEKLKGSPEDNEQKQLFVEQHKHYLDEIIEQISEFSKRVILADANLDKVLSAYNKHRDKPIREQAENIIHLFTLTNLGAPAAFKYFDTTIDRKRYTSTKEVLDATLIHQSITGLYETRIDLSQLGGDGGGGSPAPGSSGGTLGDQGSRGSDPLPEPRVTLTVEGIPTEFLVNTGAEHSVLTKPMGKMGSKRTVVAGATGSKVYPWTTKRLLKIGQKQVTHSFLVIPECPAPLLGRDLLTKLKAQIQFSTEGPQVTWEDRPAMCLVLNLEEEYRLHEKPVPPSIDPSWLQLFPMVWAEKAGMGLANQVPPVVVELKSDASPVAVRQYPMSKEAREGIRPHIQRFLDLGILVPCQSPWNTPLLPVKKPGTNDYRPVQDLREVNKRVQDIHPTVPNPYNLLSSLPPSHTWYSVLDLKDAFFCLKLHPNSQPLFAFEWRDPEKGNTGQLTWTRLPQGFKNSPTLFNEALHRDLASFRALNPQVVMLQYVDDLLVAAPTYRDCKEGTRRLLQELSKLGYRVSAKKAQLCREEVTYLGYLLKGGKRWLTPARKATVMKIPTPTTPRQVREFLGTAGFCRLWIPGFASLAAPLYPLTRPKVPFTWTEAHQEAFGRIKEALLSAPALALPDLTKPFALYVDEKEGVARGVLTQTLGPWRRPVAYLSKKLDPVASGWPTCLKAIAAVALLLKDADKLTLGQNVLVIAPHNLESIVRQPPDRWMTNARMTHYQSLLLNERVSFAPPAILNPATLLPVESDDTPIHICSEILAEETGTRPDLRDQPLPGVPAWYTDGSSFIMDGRRQAGAAIVDNKRTVWASNLPEGTSAQKAELIALTQALRLAEGKSINIYTDSRYAFATAHVHGAIYKQRGWLTSAGKDIKNKEEILALLEAIHLPKRVAIIHCPGHQRGTDPVATGNRKADEAAKQAAQSTRILTETTKNAGKRTADGSEFEKRTADGSEFESPKKKAKVE

SEQ ID NO: 1758 - protein, 2222 aa, synthetic construct
MPAAKRVKLDGGDKKYSIGLDIGTNSVGWAVITDEYKVPSKKFKVLGNTDRHSIKKNLIGALLFDSGETAEATRLKRTARRRYTRRKNRICYLQEIFSNEMAKVDDSFFHRLEESFLVEEDKKHERHPIFGNIVDEVAYHEKYPTIYHLRKKLVDSTDKADLRLIYLALAHMIKFRGHFLIEGDLNPDNSDVDKLFIQLVQTYNQLFEENPINASGVDAKAILSARLSKSRRLENLIAQLPGEKKNGLFGNLIALSLGLTPNFKSNFDLAEDAKLQLSKDTYDDDLDNLLAQIGDQYADLFLAAKNLSDAILLSDILRVNTEITKAPLSASMIKRYDEHHQDLTLLKALVRQQLPEKYKEIFFDQSKNGYAGYIDGGASQEEFYKFIKPILEKMDGTEELLVKLNREDLLRKQRTFDNGSIPHQIHLGELHAILRRQEDFYPFLKDNREKIEKILTFRIPYYVGPLARGNSRFAWMTRKSEETITPWNFEEVVDKGASAQSFIERMTNFDKNLPNEKVLPKHSLLYEYFTVYNELTKVKYVTEGMRKPAFLSGEQKKAIVDLLFKTNRKVTVKQLKEDYFKKIECFDSVEISGVEDRFNASLGTYHDLLKIIKDKDFLDNEENEDILEDIVLTLTLFEDREMIEERLKTYAHLFDDKVMKQLKRRRYTGWGRLSRKLINGIRDKQSGKTILDFLKSDGFANRNFMQLIHDDSLTFKEDIQKAQVSGQGDSLHEHIANLAGSPAIKKGILQTVKVVDELVKVMGRHKPENIVIEMARENQTTQKGQKNSRERMKRIEEGIKELGSQILKEHPVENTQLQNEKLYLYYLQNGRDMYVDQELDINRLSDYDVDHIVPQSFLKDDSIDNKVLTRSDKARGKSDNVPSEEVVKKMKNYWRQLLNAKLITQRKFDNLTKAERGGLSELDKAGFIKRQLVETRQITKHVAQILDSRMNTKYDENDKLIREVKVITLKSKLVSDFRKDFQFYKVREINNYHHAHDAYLNAVVGTALIKKYPKLESEFVYGDYKVYDVRKMIAKSEQEIGKATAKYFFYSNIMNFFKTEITLANGEIRKRPLIETNGETGEIVWDKGRDFATVRKVLSMPQVNIVKKTEVQTGGFSKESILPKRNSDKLIARKKDWDPKKYGGFDSPTVAYSVLVVAKVEKGKSKKLKSVKELLGITIMERSSFEKNPIDFLEAKGYKEVKKDLIIKLPKYSLFELENGRKRMLASAGELQKGNELALPSKYVNFLYLASHYEKLKGSPEDNEQKQLFVEQHKHYLDEIIEQISEFSKRVILADANLDKVLSAYNKHRDKPIREQAENIIHLFTLTNLGAPAAFKYFDTTIDRKRYTSTKEVLDATLIHQSITGLYETRIDLSQLGGDGGGGGGSGGGGSGGGGSGGTLGDQGSRGSDPLPEPRVTLTVEGIPTEFLVNTGAEHSVLTKPMGKMGSKRTVVAGATGSKVYPWTTKRLLKIGQKQVTHSFLVIPECPAPLLGRDLLTKLKAQIQFSTEGPQVTWEDRPAMCLVLNLEEEYRLHEKPVPPSIDPSWLQLFPMVWAEKAGMGLANQVPPVVVELKSDASPVAVRQYPMSKEAREGIRPHIQRFLDLGILVPCQSPWNTPLLPVKKPGTNDYRPVQDLREVNKRVQDIHPTVPNPYNLLSSLPPSHTWYSVLDLKDAFFCLKLHPNSQPLFAFEWRDPEKGNTGQLTWTRLPQGFKNSPTLFNEALHRDLASFRALNPQVVMLQYVDDLLVAAPTYRDCKEGTRRLLQELSKLGYRVSAKKAQLCREEVTYLGYLLKGGKRWLTPARKATVMKIPTPTTPRQVREFLGTAGFCRLWIPGFASLAAPLYPLTRPKVPFTWTEAHQEAFGRIKEALLSAPALALPDLTKPFALYVDEKEGVARGVLTQTLGPWRRPVAYLSKKLDPVASGWPTCLKAIAAVALLLKDADKLTLGQNVLVIAPHNLESIVRQPPDRWMTNARMTHYQSLLLNERVSFAPPAILNPATLLPVESDDTPIHICSEILAEETGTRPDLRDQPLPGVPAWYTDGSSFIMDGRRQAGAAIVDNKRTVWASNLPEGTSAQKAELIALTQALRLAEGKSINIYTDSRYAFATAHVHGAIYKQRGWLTSAGKDIKNKEEILALLEAIHLPKRVAIIHCPGHQRGTDPVATGNRKADEAAKQAAQSTRILTETTKNAGKRTADGSEFEKRTADGSEFESPKKKAKVE

SEQ ID NO: 1759 - protein, 2218 aa, synthetic construct
MPAAKRVKLDGGDKKYSIGLDIGTNSVGWAVITDEYKVPSKKFKVLGNTDRHSIKKNLIGALLFDSGETAEATRLKRTARRRYTRRKNRICYLQEIFSNEMAKVDDSFFHRLEESFLVEEDKKHERHPIFGNIVDEVAYHEKYPTIYHLRKKLVDSTDKADLRLIYLALAHMIKFRGHFLIEGDLNPDNSDVDKLFIQLVQTYNQLFEENPINASGVDAKAILSARLSKSRRLENLIAQLPGEKKNGLFGNLIALSLGLTPNFKSNFDLAEDAKLQLSKDTYDDDLDNLLAQIGDQYADLFLAAKNLSDAILLSDILRVNTEITKAPLSASMIKRYDEHHQDLTLLKALVRQQLPEKYKEIFFDQSKNGYAGYIDGGASQEEFYKFIKPILEKMDGTEELLVKLNREDLLRKQRTFDNGSIPHQIHLGELHAILRRQEDFYPFLKDNREKIEKILTFRIPYYVGPLARGNSRFAWMTRKSEETITPWNFEEVVDKGASAQSFIERMTNFDKNLPNEKVLPKHSLLYEYFTVYNELTKVKYVTEGMRKPAFLSGEQKKAIVDLLFKTNRKVTVKQLKEDYFKKIECFDSVEISGVEDRFNASLGTYHDLLKIIKDKDFLDNEENEDILEDIVLTLTLFEDREMIEERLKTYAHLFDDKVMKQLKRRRYTGWGRLSRKLINGIRDKQSGKTILDFLKSDGFANRNFMQLIHDDSLTFKEDIQKAQVSGQGDSLHEHIANLAGSPAIKKGILQTVKVVDELVKVMGRHKPENIVIEMARENQTTQKGQKNSRERMKRIEEGIKELGSQILKEHPVENTQLQNEKLYLYYLQNGRDMYVDQELDINRLSDYDVDHIVPQSFLKDDSIDNKVLTRSDKARGKSDNVPSEEVVKKMKNYWRQLLNAKLITQRKFDNLTKAERGGLSELDKAGFIKRQLVETRQITKHVAQILDSRMNTKYDENDKLIREVKVITLKSKLVSDFRKDFQFYKVREINNYHHAHDAYLNAVVGTALIKKYPKLESEFVYGDYKVYDVRKMIAKSEQEIGKATAKYFFYSNIMNFFKTEITLANGEIRKRPLIETNGETGEIVWDKGRDFATVRKVLSMPQVNIVKKTEVQTGGFSKESILPKRNSDKLIARKKDWDPKKYGGFDSPTVAYSVLVVAKVEKGKSKKLKSVKELLGITIMERSSFEKNPIDFLEAKGYKEVKKDLIIKLPKYSLFELENGRKRMLASAGELQKGNELALPSKYVNFLYLASHYEKLKGSPEDNEQKQLFVEQHKHYLDEIIEQISEFSKRVILADANLDKVLSAYNKHRDKPIREQAENIIHLFTLTNLGAPAAFKYFDTTIDRKRYTSTKEVLDATLIHQSITGLYETRIDLSQLGGDGGGSSGGGEAAAKGGTLGDQGSRGSDPLPEPRVTLTVEGIPTEFLVNTGAEHSVLTKPMGKMGSKRTVVAGATGSKVYPWTTKRLLKIGQKQVTHSFLVIPECPAPLLGRDLLTKLKAQIQFSTEGPQVTWEDRPAMCLVLNLEEEYRLHEKPVPPSIDPSWLQLFPMVWAEKAGMGLANQVPPVVVELKSDASPVAVRQYPMSKEAREGIRPHIQRFLDLGILVPCQSPWNTPLLPVKKPGTNDYRPVQDLREVNKRVQDIHPTVPNPYNLLSSLPPSHTWYSVLDLKDAFFCLKLHPNSQPLFAFEWRDPEKGNTGQLTWTRLPQGFKNSPTLFNEALHRDLASFRALNPQVVMLQYVDDLLVAAPTYRDCKEGTRRLLQELSKLGYRVSAKKAQLCREEVTYLGYLLKGGKRWLTPARKATVMKIPTPTTPRQVREFLGTAGFCRLWIPGFASLAAPLYPLTRPKVPFTWTEAHQEAFGRIKEALLSAPALALPDLTKPFALYVDEKEGVARGVLTQTLGPWRRPVAYLSKKLDPVASGWPTCLKAIAAVALLLKDADKLTLGQNVLVIAPHNLESIVRQPPDRWMTNARMTHYQSLLLNERVSFAPPAILNPATLLPVESDDTPIHICSEILAEETGTRPDLRDQPLPGVPAWYTDGSSFIMDGRRQAGAAIVDNKRTVWASNLPEGTSAQKAELIALTQALRLAEGKSINIYTDSRYAFATAHVHGAIYKQRGWLTSAGKDIKNKEEILALLEAIHLPKRVAIIHCPGHQRGTDPVATGNRKADEAAKQAAQSTRILTETTKNAGKRTADGSEFEKRTADGSEFESPKKKAKVE

SEQ ID NO: 1760 - protein, 2215 aa, synthetic construct
MPAAKRVKLDGGDKKYSIGLDIGTNSVGWAVITDEYKVPSKKFKVLGNTDRHSIKKNLIGALLFDSGETAEATRLKRTARRRYTRRKNRICYLQEIFSNEMAKVDDSFFHRLEESFLVEEDKKHERHPIFGNIVDEVAYHEKYPTIYHLRKKLVDSTDKADLRLIYLALAHMIKFRGHFLIEGDLNPDNSDVDKLFIQLVQTYNQLFEENPINASGVDAKAILSARLSKSRRLENLIAQLPGEKKNGLFGNLIALSLGLTPNFKSNFDLAEDAKLQLSKDTYDDDLDNLLAQIGDQYADLFLAAKNLSDAILLSDILRVNTEITKAPLSASMIKRYDEHHQDLTLLKALVRQQLPEKYKEIFFDQSKNGYAGYIDGGASQEEFYKFIKPILEKMDGTEELLVKLNREDLLRKQRTFDNGSIPHQIHLGELHAILRRQEDFYPFLKDNREKIEKILTFRIPYYVGPLARGNSRFAWMTRKSEETITPWNFEEVVDKGASAQSFIERMTNFDKNLPNEKVLPKHSLLYEYFTVYNELTKVKYVTEGMRKPAFLSGEQKKAIVDLLFKTNRKVTVKQLKEDYFKKIECFDSVEISGVEDRFNASLGTYHDLLKIIKDKDFLDNEENEDILEDIVLTLTLFEDREMIEERLKTYAHLFDDKVMKQLKRRRYTGWGRLSRKLINGIRDKQSGKTILDFLKSDGFANRNFMQLIHDDSLTFKEDIQKAQVSGQGDSLHEHIANLAGSPAIKKGILQTVKVVDELVKVMGRHKPENIVIEMARENQTTQKGQKNSRERMKRIEEGIKELGSQILKEHPVENTQLQNEKLYLYYLQNGRDMYVDQELDINRLSDYDVDHIVPQSFLKDDSIDNKVLTRSDKARGKSDNVPSEEVVKKMKNYWRQLLNAKLITQRKFDNLTKAERGGLSELDKAGFIKRQLVETRQITKHVAQILDSRMNTKYDENDKLIREVKVITLKSKLVSDFRKDFQFYKVREINNYHHAHDAYLNAVVGTALIKKYPKLESEFVYGDYKVYDVRKMIAKSEQEIGKATAKYFFYSNIMNFFKTEITLANGEIRKRPLIETNGETGEIVWDKGRDFATVRKVLSMPQVNIVKKTEVQTGGFSKESILPKRNSDKLIARKKDWDPKKYGGFDSPTVAYSVLVVAKVEKGKSKKLKSVKELLGITIMERSSFEKNPIDFLEAKGYKEVKKDLIIKLPKYSLFELENGRKRMLASAGELQKGNELALPSKYVNFLYLASHYEKLKGSPEDNEQKQLFVEQHKHYLDEIIEQISEFSKRVILADANLDKVLSAYNKHRDKPIREQAENIIHLFTLTNLGAPAAFKYFDTTIDRKRYTSTKEVLDATLIHQSITGLYETRIDLSQLGGDGGEAAAKGGGGGTLGDQGSRGSDPLPEPRVTLTVEGIPTEFLVNTGAEHSVLTKPMGKMGSKRTVVAGATGSKVYPWTTKRLLKIGQKQVTHSFLVIPECPAPLLGRDLLTKLKAQIQFSTEGPQVTWEDRPAMCLVLNLEEEYRLHEKPVPPSIDPSWLQLFPMVWAEKAGMGLANQVPPVVVELKSDASPVAVRQYPMSKEAREGIRPHIQRFLDLGILVPCQSPWNTPLLPVKKPGTNDYRPVQDLREVNKRVQDIHPTVPNPYNLLSSLPPSHTWYSVLDLKDAFFCLKLHPNSQPLFAFEWRDPEKGNTGQLTWTRLPQGFKNSPTLFNEALHRDLASFRALNPQVVMLQYVDDLLVAAPTYRDCKEGTRRLLQELSKLGYRVSAKKAQLCREEVTYLGYLLKGGKRWLTPARKATVMKIPTPTTPRQVREFLGTAGFCRLWIPGFASLAAPLYPLTRPKVPFTWTEAHQEAFGRIKEALLSAPALALPDLTKPFALYVDEKEGVARGVLTQTLGPWRRPVAYLSKKLDPVASGWPTCLKAIAAVALLLKDADKLTLGQNVLVIAPHNLESIVRQPPDRWMTNARMTHYQSLLLNERVSFAPPAILNPATLLPVESDDTPIHICSEILAEETGTRPDLRDQPLPGVPAWYTDGSSFIMDGRRQAGAAIVDNKRTVWASNLPEGTSAQKAELIALTQALRLAEGKSINIYTDSRYAFATAHVHGAIYKQRGWLTSAGKDIKNKEEILALLEAIHLPKRVAIIHCPGHQRGTDPVATGNRKADEAAKQAAQSTRILTETTKNAGKRTADGSEFEKRTADGSEFESPKKKAKVE

SEQ ID NO: 1761 - protein, 2213 aa, synthetic construct
MPAAKRVKLDGGDKKYSIGLDIGTNSVGWAVITDEYKVPSKKFKVLGNTDRHSIKKNLIGALLFDSGETAEATRLKRTARRRYTRRKNRICYLQEIFSNEMAKVDDSFFHRLEESFLVEEDKKHERHPIFGNIVDEVAYHEKYPTIYHLRKKLVDSTDKADLRLIYLALAHMIKFRGHFLIEGDLNPDNSDVDKLFIQLVQTYNQLFEENPINASGVDAKAILSARLSKSRRLENLIAQLPGEKKNGLFGNLIALSLGLTPNFKSNFDLAEDAKLQLSKDTYDDDLDNLLAQIGDQYADLFLAAKNLSDAILLSDILRVNTEITKAPLSASMIKRYDEHHQDLTLLKALVRQQLPEKYKEIFFDQSKNGYAGYIDGGASQEEFYKFIKPILEKMDGTEELLVKLNREDLLRKQRTFDNGSIPHQIHLGELHAILRRQEDFYPFLKDNREKIEKILTFRIPYYVGPLARGNSRFAWMTRKSEETITPWNFEEVVDKGASAQSFIERMTNFDKNLPNEKVLPKHSLLYEYFTVYNELTKVKYVTEGMRKPAFLSGEQKKAIVDLLFKTNRKVTVKQLKEDYFKKIECFDSVEISGVEDRFNASLGTYHDLLKIIKDKDFLDNEENEDILEDIVLTLTLFEDREMIEERLKTYAHLFDDKVMKQLKRRRYTGWGRLSRKLINGIRDKQSGKTILDFLKSDGFANRNFMQLIHDDSLTFKEDIQKAQVSGQGDSLHEHIANLAGSPAIKKGILQTVKVVDELVKVMGRHKPENIVIEMARENQTTQKGQKNSRERMKRIEEGIKELGSQILKEHPVENTQLQNEKLYLYYLQNGRDMYVDQELDINRLSDYDVDHIVPQSFLKDDSIDNKVLTRSDKARGKSDNVPSEEVVKKMKNYWRQLLNAKLITQRKFDNLTKAERGGLSELDKAGFIKRQLVETRQITKHVAQILDSRMNTKYDENDKLIREVKVITLKSKLVSDFRKDFQFYKVREINNYHHAHDAYLNAVVGTALIKKYPKLESEFVYGDYKVYDVRKMIAKSEQEIGKATAKYFFYSNIMNFFKTEITLANGEIRKRPLIETNGETGEIVWDKGRDFATVRKVLSMPQVNIVKKTEVQTGGFSKESILPKRNSDKLIARKKDWDPKKYGGFDSPTVAYSVLVVAKVEKGKSKKLKSVKELLGITIMERSSFEKNPIDFLEAKGYKEVKKDLIIKLPKYSLFELENGRKRMLASAGELQKGNELALPSKYVNFLYLASHYEKLKGSPEDNEQKQLFVEQHKHYLDEIIEQISEFSKRVILADANLDKVLSAYNKHRDKPIREQAENIIHLFTLTNLGAPAAFKYFDTTIDRKRYTSTKEVLDATLIHQSITGLYETRIDLSQLGGDGGGGSGGGGGTLGDQGSRGSDPLPEPRVTLTVEGIPTEFLVNTGAEHSVLTKPMGKMGSKRTVVAGATGSKVYPWTTKRLLKIGQKQVTHSFLVIPECPAPLLGRDLLTKLKAQIQFSTEGPQVTWEDRPAMCLVLNLEEEYRLHEKPVPPSIDPSWLQLFPMVWAEKAGMGLANQVPPVVVELKSDASPVAVRQYPMSKEAREGIRPHIQRFLDLGILVPCQSPWNTPLLPVKKPGTNDYRPVQDLREVNKRVQDIHPTVPNPYNLLSSLPPSHTWYSVLDLKDAFFCLKLHPNSQPLFAFEWRDPEKGNTGQLTWTRLPQGFKNSPTLFNEALHRDLASFRALNPQVVMLQYVDDLLVAAPTYRDCKEGTRRLLQELSKLGYRVSAKKAQLCREEVTYLGYLLKGGKRWLTPARKATVMKIPTPTTPRQVREFLGTAGFCRLWIPGFASLAAPLYPLTRPKVPFTWTEAHQEAFGRIKEALLSAPALALPDLTKPFALYVDEKEGVARGVLTQTLGPWRRPVAYLSKKLDPVASGWPTCLKAIAAVALLLKDADKLTLGQNVLVIAPHNLESIVRQPPDRWMTNARMTHYQSLLLNERVSFAPPAILNPATLLPVESDDTPIHICSEILAEETGTRPDLRDQPLPGVPAWYTDGSSFIMDGRRQAGAAIVDNKRTVWASNLPEGTSAQKAELIALTQALRLAEGKSINIYTDSRYAFATAHVHGAIYKQRGWLTSAGKDIKNKEEILALLEAIHLPKRVAIIHCPGHQRGTDPVATGNRKADEAAKQAAQSTRILTETTKNAGKRTADGSEFEKRTADGSEFESPKKKAKVE

SEQ ID NO: 1762 - protein, 2218 aa, synthetic construct
MPAAKRVKLDGGDKKYSIGLDIGTNSVGWAVITDEYKVPSKKFKVLGNTDRHSIKKNLIGALLFDSGETAEATRLKRTARRRYTRRKNRICYLQEIFSNEMAKVDDSFFHRLEESFLVEEDKKHERHPIFGNIVDEVAYHEKYPTIYHLRKKLVDSTDKADLRLIYLALAHMIKFRGHFLIEGDLNPDNSDVDKLFIQLVQTYNQLFEENPINASGVDAKAILSARLSKSRRLENLIAQLPGEKKNGLFGNLIALSLGLTPNFKSNFDLAEDAKLQLSKDTYDDDLDNLLAQIGDQYADLFLAAKNLSDAILLSDILRVNTEITKAPLSASMIKRYDEHHQDLTLLKALVRQQLPEKYKEIFFDQSKNGYAGYIDGGASQEEFYKFIKPILEKMDGTEELLVKLNREDLLRKQRTFDNGSIPHQIHLGELHAILRRQEDFYPFLKDNREKIEKILTFRIPYYVGPLARGNSRFAWMTRKSEETITPWNFEEVVDKGASAQSFIERMTNFDKNLPNEKVLPKHSLLYEYFTVYNELTKVKYVTEGMRKPAFLSGEQKKAIVDLLFKTNRKVTVKQLKEDYFKKIECFDSVEISGVEDRFNASLGTYHDLLKIIKDKDFLDNEENEDILEDIVLTLTLFEDREMIEERLKTYAHLFDDKVMKQLKRRRYTGWGRLSRKLINGIRDKQSGKTILDFLKSDGFANRNFMQLIHDDSLTFKEDIQKAQVSGQGDSLHEHIANLAGSPAIKKGILQTVKVVDELVKVMGRHKPENIVIEMARENQTTQKGQKNSRERMKRIEEGIKELGSQILKEHPVENTQLQNEKLYLYYLQNGRDMYVDQELDINRLSDYDVDHIVPQSFLKDDSIDNKVLTRSDKARGKSDNVPSEEVVKKMKNYWRQLLNAKLITQRKFDNLTKAERGGLSELDKAGFIKRQLVETRQITKHVAQILDSRMNTKYDENDKLIREVKVITLKSKLVSDFRKDFQFYKVREINNYHHAHDAYLNAVVGTALIKKYPKLESEFVYGDYKVYDVRKMIAKSEQEIGKATAKYFFYSNIMNFFKTEITLANGEIRKRPLIETNGETGEIVWDKGRDFATVRKVLSMPQVNIVKKTEVQTGGFSKESILPKRNSDKLIARKKDWDPKKYGGFDSPTVAYSVLVVAKVEKGKSKKLKSVKELLGITIMERSSFEKNPIDFLEAKGYKEVKKDLIIKLPKYSLFELENGRKRMLASAGELQKGNELALPSKYVNFLYLASHYEKLKGSPEDNEQKQLFVEQHKHYLDEIIEQISEFSKRVILADANLDKVLSAYNKHRDKPIREQAENIIHLFTLTNLGAPAAFKYFDTTIDRKRYTSTKEVLDATLIHQSITGLYETRIDLSQLGGDGGPAPEAAAKGSSGGTLGDQGSRGSDPLPEPRVTLTVEGIPTEFLVNTGAEHSVLTKPMGKMGSKRTVVAGATGSKVYPWTTKRLLKIGQKQVTHSFLVIPECPAPLLGRDLLTKLKAQIQFSTEGPQVTWEDRPAMCLVLNLEEEYRLHEKPVPPSIDPSWLQLFPMVWAEKAGMGLANQVPPVVVELKSDASPVAVRQYPMSKEAREGIRPHIQRFLDLGILVPCQSPWNTPLLPVKKPGTNDYRPVQDLREVNKRVQDIHPTVPNPYNLLSSLPPSHTWYSVLDLKDAFFCLKLHPNSQPLFAFEWRDPEKGNTGQLTWTRLPQGFKNSPTLFNEALHRDLASFRALNPQVVMLQYVDDLLVAAPTYRDCKEGTRRLLQELSKLGYRVSAKKAQLCREEVTYLGYLLKGGKRWLTPARKATVMKIPTPTTPRQVREFLGTAGFCRLWIPGFASLAAPLYPLTRPKVPFTWTEAHQEAFGRIKEALLSAPALALPDLTKPFALYVDEKEGVARGVLTQTLGPWRRPVAYLSKKLDPVASGWPTCLKAIAAVALLLKDADKLTLGQNVLVIAPHNLESIVRQPPDRWMTNARMTHYQSLLLNERVSFAPPAILNPATLLPVESDDTPIHICSEILAEETGTRPDLRDQPLPGVPAWYTDGSSFIMDGRRQAGAAIVDNKRTVWASNLPEGTSAQKAELIALTQALRLAEGKSINIYTDSRYAFATAHVHGAIYKQRGWLTSAGKDIKNKEEILALLEAIHLPKRVAIIHCPGHQRGTDPVATGNRKADEAAKQAAQSTRILTETTKNAGKRTADGSEFEKRTADGSEFESPKKKAKVE

SEQ ID NO: 1763 - protein, 2215 aa, synthetic construct
MPAAKRVKLDGGDKKYSIGLDIGTNSVGWAVITDEYKVPSKKFKVLGNTDRHSIKKNLIGALLFDSGETAEATRLKRTARRRYTRRKNRICYLQEIFSNEMAKVDDSFFHRLEESFLVEEDKKHERHPIFGNIVDEVAYHEKYPTIYHLRKKLVDSTDKADLRLIYLALAHMIKFRGHFLIEGDLNPDNSDVDKLFIQLVQTYNQLFEENPINASGVDAKAILSARLSKSRRLENLIAQLPGEKKNGLFGNLIALSLGLTPNFKSNFDLAEDAKLQLSKDTYDDDLDNLLAQIGDQYADLFLAAKNLSDAILLSDILRVNTEITKAPLSASMIKRYDEHHQDLTLLKALVRQQLPEKYKEIFFDQSKNGYAGYIDGGASQEEFYKFIKPILEKMDGTEELLVKLNREDLLRKQRTFDNGSIPHQIHLGELHAILRRQEDFYPFLKDNREKIEKILTFRIPYYVGPLARGNSRFAWMTRKSEETITPWNFEEVVDKGASAQSFIERMTNFDKNLPNEKVLPKHSLLYEYFTVYNELTKVKYVTEGMRKPAFLSGEQKKAIVDLLFKTNRKVTVKQLKEDYFKKIECFDSVEISGVEDRFNASLGTYHDLLKIIKDKDFLDNEENEDILEDIVLTLTLFEDREMIEERLKTYAHLFDDKVMKQLKRRRYTGWGRLSRKLINGIRDKQSGKTILDFLKSDGFANRNFMQLIHDDSLTFKEDIQKAQVSGQGDSLHEHIANLAGSPAIKKGILQTVKVVDELVKVMGRHKPENIVIEMARENQTTQKGQKNSRERMKRIEEGIKELGSQILKEHPVENTQLQNEKLYLYYLQNGRDMYVDQELDINRLSDYDVDHIVPQSFLKDDSIDNKVLTRSDKARGKSDNVPSEEVVKKMKNYWRQLLNAKLITQRKFDNLTKAERGGLSELDKAGFIKRQLVETRQITKHVAQILDSRMNTKYDENDKLIREVKVITLKSKLVSDFRKDFQFYKVREINNYHHAHDAYLNAVVGTALIKKYPKLESEFVYGDYKVYDVRKMIAKSEQEIGKATAKYFFYSNIMNFFKTEITLANGEIRKRPLIETNGETGEIVWDKGRDFATVRKVLSMPQVNIVKKTEVQTGGFSKESILPKRNSDKLIARKKDWDPKKYGGFDSPTVAYSVLVVAKVEKGKSKKLKSVKELLGITIMERSSFEKNPIDFLEAKGYKEVKKDLIIKLPKYSLFELENGRKRMLASAGELQKGNELALPSKYVNFLYLASHYEKLKGSPEDNEQKQLFVEQHKHYLDEIIEQISEFSKRVILADANLDKVLSAYNKHRDKPIREQAENIIHLFTLTNLGAPAAFKYFDTTIDRKRYTSTKEVLDATLIHQSITGLYETRIDLSQLGGDGGEAAAKGGSGGTLGDQGSRGSDPLPEPRVTLTVEGIPTEFLVNTGAEHSVLTKPMGKMGSKRTVVAGATGSKVYPWTTKRLLKIGQKQVTHSFLVIPECPAPLLGRDLLTKLKAQIQFSTEGPQVTWEDRPAMCLVLNLEEEYRLHEKPVPPSIDPSWLQLFPMVWAEKAGMGLANQVPPVVVELKSDASPVAVRQYPMSKEAREGIRPHIQRFLDLGILVPCQSPWNTPLLPVKKPGTNDYRPVQDLREVNKRVQDIHPTVPNPYNLLSSLPPSHTWYSVLDLKDAFFCLKLHPNSQPLFAFEWRDPEKGNTGQLTWTRLPQGFKNSPTLFNEALHRDLASFRALNPQVVMLQYVDDLLVAAPTYRDCKEGTRRLLQELSKLGYRVSAKKAQLCREEVTYLGYLLKGGKRWLTPARKATVMKIPTPTTPRQVREFLGTAGFCRLWIPGFASLAAPLYPLTRPKVPFTWTEAHQEAFGRIKEALLSAPALALPDLTKPFALYVDEKEGVARGVLTQTLGPWRRPVAYLSKKLDPVASGWPTCLKAIAAVALLLKDADKLTLGQNVLVIAPHNLESIVRQPPDRWMTNARMTHYQSLLLNERVSFAPPAILNPATLLPVESDDTPIHICSEILAEETGTRPDLRDQPLPGVPAWYTDGSSFIMDGRRQAGAAIVDNKRTVWASNLPEGTSAQKAELIALTQALRLAEGKSINIYTDSRYAFATAHVHGAIYKQRGWLTSAGKDIKNKEEILALLEAIHLPKRVAIIHCPGHQRGTDPVATGNRKADEAAKQAAQSTRILTETTKNAGKRTADGSEFEKRTADGSEFESPKKKAKVE

SEQ ID NO: 1764 - protein, 2216 aa, synthetic construct
MPAAKRVKLDGGDKKYSIGLDIGTNSVGWAVITDEYKVPSKKFKVLGNTDRHSIKKNLIGALLFDSGETAEATRLKRTARRRYTRRKNRICYLQEIFSNEMAKVDDSFFHRLEESFLVEEDKKHERHPIFGNIVDEVAYHEKYPTIYHLRKKLVDSTDKADLRLIYLALAHMIKFRGHFLIEGDLNPDNSDVDKLFIQLVQTYNQLFEENPINASGVDAKAILSARLSKSRRLENLIAQLPGEKKNGLFGNLIALSLGLTPNFKSNFDLAEDAKLQLSKDTYDDDLDNLLAQIGDQYADLFLAAKNLSDAILLSDILRVNTEITKAPLSASMIKRYDEHHQDLTLLKALVRQQLPEKYKEIFFDQSKNGYAGYIDGGASQEEFYKFIKPILEKMDGTEELLVKLNREDLLRKQRTFDNGSIPHQIHLGELHAILRRQEDFYPFLKDNREKIEKILTFRIPYYVGPLARGNSRFAWMTRKSEETITPWNFEEVVDKGASAQSFIERMTNFDKNLPNEKVLPKHSLLYEYFTVYNELTKVKYVTEGMRKPAFLSGEQKKAIVDLLFKTNRKVTVKQLKEDYFKKIECFDSVEISGVEDRFNASLGTYHDLLKIIKDKDFLDNEENEDILEDIVLTLTLFEDREMIEERLKTYAHLFDDKVMKQLKRRRYTGWGRLSRKLINGIRDKQSGKTILDFLKSDGFANRNFMQLIHDDSLTFKEDIQKAQVSGQGDSLHEHIANLAGSPAIKKGILQTVKVVDELVKVMGRHKPENIVIEMARENQTTQKGQKNSRERMKRIEEGIKELGSQILKEHPVENTQLQNEKLYLYYLQNGRDMYVDQELDINRLSDYDVDHIVPQSFLKDDSIDNKVLTRSDKARGKSDNVPSEEVVKKMKNYWRQLLNAKLITQRKFDNLTKAERGGLSELDKAGFIKRQLVETRQITKHVAQILDSRMNTKYDENDKLIREVKVITLKSKLVSDFRKDFQFYKVREINNYHHAHDAYLNAVVGTALIKKYPKLESEFVYGDYKVYDVRKMIAKSEQEIGKATAKYFFYSNIMNFFKTEITLANGEIRKRPLIETNGETGEIVWDKGRDFATVRKVLSMPQVNIVKKTEVQTGGFSKESILPKRNSDKLIARKKDWDPKKYGGFDSPTVAYSVLVVAKVEKGKSKKLKSVKELLGITIMERSSFEKNPIDFLEAKGYKEVKKDLIIKLPKYSLFELENGRKRMLASAGELQKGNELALPSKYVNFLYLASHYEKLKGSPEDNEQKQLFVEQHKHYLDEIIEQISEFSKRVILADANLDKVLSAYNKHRDKPIREQAENIIHLFTLTNLGAPAAFKYFDTTIDRKRYTSTKEVLDATLIHQSITGLYETRIDLSQLGGDGGGGGGSSGGSGGTLGDQGSRGSDPLPEPRVTLTVEGIPTEFLVNTGAEHSVLTKPMGKMGSKRTVVAGATGSKVYPWTTKRLLKIGQKQVTHSFLVIPECPAPLLGRDLLTKLKAQIQFSTEGPQVTWEDRPAMCLVLNLEEEYRLHEKPVPPSIDPSWLQLFPMVWAEKAGMGLANQVPPVVVELKSDASPVAVRQYPMSKEAREGIRPHIQRFLDLGILVPCQSPWNTPLLPVKKPGTNDYRPVQDLREVNKRVQDIHPTVPNPYNLLSSLPPSHTWYSVLDLKDAFFCLKLHPNSQPLFAFEWRDPEKGNTGQLTWTRLPQGFKNSPTLFNEALHRDLASFRALNPQVVMLQYVDDLLVAAPTYRDCKEGTRRLLQELSKLGYRVSAKKAQLCREEVTYLGYLLKGGKRWLTPARKATVMKIPTPTTPRQVREFLGTAGFCRLWIPGFASLAAPLYPLTRPKVPFTWTEAHQEAFGRIKEALLSAPALALPDLTKPFALYVDEKEGVARGVLTQTLGPWRRPVAYLSKKLDPVASGWPTCLKAIAAVALLLKDADKLTLGQNVLVIAPHNLESIVRQPPDRWMTNARMTHYQSLLLNERVSFAPPAILNPATLLPVESDDTPIHICSEILAEETGTRPDLRDQPLPGVPAWYTDGSSFIMDGRRQAGAAIVDNKRTVWASNLPEGTSAQKAELIALTQALRLAEGKSINIYTDSRYAFATAHVHGAIYKQRGWLTSAGKDIKNKEEILALLEAIHLPKRVAIIHCPGHQRGTDPVATGNRKADEAAKQAAQSTRILTETTKNAGKRTADGSEFEKRTADGSEFESPKKKAKVE

SEQ ID NO: 1765 - protein, 2216 aa, synthetic construct
MPAAKRVKLDGGDKKYSIGLDIGTNSVGWAVITDEYKVPSKKFKVLGNTDRHSIKKNLIGALLFDSGETAEATRLKRTARRRYTRRKNRICYLQEIFSNEMAKVDDSFFHRLEESFLVEEDKKHERHPIFGNIVDEVAYHEKYPTIYHLRKKLVDSTDKADLRLIYLALAHMIKFRGHFLIEGDLNPDNSDVDKLFIQLVQTYNQLFEENPINASGVDAKAILSARLSKSRRLENLIAQLPGEKKNGLFGNLIALSLGLTPNFKSNFDLAEDAKLQLSKDTYDDDLDNLLAQIGDQYADLFLAAKNLSDAILLSDILRVNTEITKAPLSASMIKRYDEHHQDLTLLKALVRQQLPEKYKEIFFDQSKNGYAGYIDGGASQEEFYKFIKPILEKMDGTEELLVKLNREDLLRKQRTFDNGSIPHQIHLGELHAILRRQEDFYPFLKDNREKIEKILTFRIPYYVGPLARGNSRFAWMTRKSEETITPWNFEEVVDKGASAQSFIERMTNFDKNLPNEKVLPKHSLLYEYFTVYNELTKVKYVTEGMRKPAFLSGEQKKAIVDLLFKTNRKVTVKQLKEDYFKKIECFDSVEISGVEDRFNASLGTYHDLLKIIKDKDFLDNEENEDILEDIVLTLTLFEDREMIEERLKTYAHLFDDKVMKQLKRRRYTGWGRLSRKLINGIRDKQSGKTILDFLKSDGFANRNFMQLIHDDSLTFKEDIQKAQVSGQGDSLHEHIANLAGSPAIKKGILQTVKVVDELVKVMGRHKPENIVIEMARENQTTQKGQKNSRERMKRIEEGIKELGSQILKEHPVENTQLQNEKLYLYYLQNGRDMYVDQELDINRLSDYDVDHIVPQSFLKDDSIDNKVLTRSDKARGKSDNVPSEEVVKKMKNYWRQLLNAKLITQRKFDNLTKAERGGLSELDKAGFIKRQLVETRQITKHVAQILDSRMNTKYDENDKLIREVKVITLKSKLVSDFRKDFQFYKVREINNYHHAHDAYLNAVVGTALIKKYPKLESEFVYGDYKVYDVRKMIAKSEQEIGKATAKYFFYSNIMNFFKTEITLANGEIRKRPLIETNGETGEIVWDKGRDFATVRKVLSMPQVNIVKKTEVQTGGFSKESILPKRNSDKLIARKKDWDPKKYGGFDSPTVAYSVLVVAKVEKGKSKKLKSVKELLGITIMERSSFEKNPIDFLEAKGYKEVKKDLIIKLPKYSLFELENGRKRMLASAGELQKGNELALPSKYVNFLYLASHYEKLKGSPEDNEQKQLFVEQHKHYLDEIIEQISEFSKRVILADANLDKVLSAYNKHRDKPIREQAENIIHLFTLTNLGAPAAFKYFDTTIDRKRYTSTKEVLDATLIHQSITGLYETRIDLSQLGGDGGPAPGSSGGSGGTLGDQGSRGSDPLPEPRVTLTVEGIPTEFLVNTGAEHSVLTKPMGKMGSKRTVVAGATGSKVYPWTTKRLLKIGQKQVTHSFLVIPECPAPLLGRDLLTKLKAQIQFSTEGPQVTWEDRPAMCLVLNLEEEYRLHEKPVPPSIDPSWLQLFPMVWAEKAGMGLANQVPPVVVELKSDASPVAVRQYPMSKEAREGIRPHIQRFLDLGILVPCQSPWNTPLLPVKKPGTNDYRPVQDLREVNKRVQDIHPTVPNPYNLLSSLPPSHTWYSVLDLKDAFFCLKLHPNSQPLFAFEWRDPEKGNTGQLTWTRLPQGFKNSPTLFNEALHRDLASFRALNPQVVMLQYVDDLLVAAPTYRDCKEGTRRLLQELSKLGYRVSAKKAQLCREEVTYLGYLLKGGKRWLTPARKATVMKIPTPTTPRQVREFLGTAGFCRLWIPGFASLAAPLYPLTRPKVPFTWTEAHQEAFGRIKEALLSAPALALPDLTKPFALYVDEKEGVARGVLTQTLGPWRRPVAYLSKKLDPVASGWPTCLKAIAAVALLLKDADKLTLGQNVLVIAPHNLESIVRQPPDRWMTNARMTHYQSLLLNERVSFAPPAILNPATLLPVESDDTPIHICSEILAEETGTRPDLRDQPLPGVPAWYTDGSSFIMDGRRQAGAAIVDNKRTVWASNLPEGTSAQKAELIALTQALRLAEGKSINIYTDSRYAFATAHVHGAIYKQRGWLTSAGKDIKNKEEILALLEAIHLPKRVAIIHCPGHQRGTDPVATGNRKADEAAKQAAQSTRILTETTKNAGKRTADGSEFEKRTADGSEFESPKKKAKVE

SEQ ID NO: 1766 - protein, 2216 aa, synthetic construct
MPAAKRVKLDGGDKKYSIGLDIGTNSVGWAVITDEYKVPSKKFKVLGNTDRHSIKKNLIGALLFDSGETAEATRLKRTARRRYTRRKNRICYLQEIFSNEMAKVDDSFFHRLEESFLVEEDKKHERHPIFGNIVDEVAYHEKYPTIYHLRKKLVDSTDKADLRLIYLALAHMIKFRGHFLIEGDLNPDNSDVDKLFIQLVQTYNQLFEENPINASGVDAKAILSARLSKSRRLENLIAQLPGEKKNGLFGNLIALSLGLTPNFKSNFDLAEDAKLQLSKDTYDDDLDNLLAQIGDQYADLFLAAKNLSDAILLSDILRVNTEITKAPLSASMIKRYDEHHQDLTLLKALVRQQLPEKYKEIFFDQSKNGYAGYIDGGASQEEFYKFIKPILEKMDGTEELLVKLNREDLLRKQRTFDNGSIPHQIHLGELHAILRRQEDFYPFLKDNREKIEKILTFRIPYYVGPLARGNSRFAWMTRKSEETITPWNFEEVVDKGASAQSFIERMTNFDKNLPNEKVLPKHSLLYEYFTVYNELTKVKYVTEGMRKPAFLSGEQKKAIVDLLFKTNRKVTVKQLKEDYFKKIECFDSVEISGVEDRFNASLGTYHDLLKIIKDKDFLDNEENEDILEDIVLTLTLFEDREMIEERLKTYAHLFDDKVMKQLKRRRYTGWGRLSRKLINGIRDKQSGKTILDFLKSDGFANRNFMQLIHDDSLTFKEDIQKAQVSGQGDSLHEHIANLAGSPAIKKGILQTVKVVDELVKVMGRHKPENIVIEMARENQTTQKGQKNSRERMKRIEEGIKELGSQILKEHPVENTQLQNEKLYLYYLQNGRDMYVDQELDINRLSDYDVDHIVPQSFLKDDSIDNKVLTRSDKARGKSDNVPSEEVVKKMKNYWRQLLNAKLITQRKFDNLTKAERGGLSELDKAGFIKRQLVETRQITKHVAQILDSRMNTKYDENDKLIREVKVITLKSKLVSDFRKDFQFYKVREINNYHHAHDAYLNAVVGTALIKKYPKLESEFVYGDYKVYDVRKMIAKSEQEIGKATAKYFFYSNIMNFFKTEITLANGEIRKRPLIETNGETGEIVWDKGRDFATVRKVLSMPQVNIVKKTEVQTGGFSKESILPKRNSDKLIARKKDWDPKKYGGFDSPTVAYSVLVVAKVEKGKSKKLKSVKELLGITIMERSSFEKNPIDFLEAKGYKEVKKDLIIKLPKYSLFELENGRKRMLASAGELQKGNELALPSKYVNFLYLASHYEKLKGSPEDNEQKQLFVEQHKHYLDEIIEQISEFSKRVILADANLDKVLSAYNKHRDKPIREQAENIIHLFTLTNLGAPAAFKYFDTTIDRKRYTSTKEVLDATLIHQSITGLYETRIDLSQLGGDGGGGSGGSGGSGGTLGDQGSRGSDPLPEPRVTLTVEGIPTEFLVNTGAEHSVLTKPMGKMGSKRTVVAGATGSKVYPWTTKRLLKIGQKQVTHSFLVIPECPAPLLGRDLLTKLKAQIQFSTEGPQVTWEDRPAMCLVLNLEEEYRLHEKPVPPSIDPSWLQLFPMVWAEKAGMGLANQVPPVVVELKSDASPVAVRQYPMSKEAREGIRPHIQRFLDLGILVPCQSPWNTPLLPVKKPGTNDYRPVQDLREVNKRVQDIHPTVPNPYNLLSSLPPSHTWYSVLDLKDAFFCLKLHPNSQPLFAFEWRDPEKGNTGQLTWTRLPQGFKNSPTLFNEALHRDLASFRALNPQVVMLQYVDDLLVAAPTYRDCKEGTRRLLQELSKLGYRVSAKKAQLCREEVTYLGYLLKGGKRWLTPARKATVMKIPTPTTPRQVREFLGTAGFCRLWIPGFASLAAPLYPLTRPKVPFTWTEAHQEAFGRIKEALLSAPALALPDLTKPFALYVDEKEGVARGVLTQTLGPWRRPVAYLSKKLDPVASGWPTCLKAIAAVALLLKDADKLTLGQNVLVIAPHNLESIVRQPPDRWMTNARMTHYQSLLLNERVSFAPPAILNPATLLPVESDDTPIHICSEILAEETGTRPDLRDQPLPGVPAWYTDGSSFIMDGRRQAGAAIVDNKRTVWASNLPEGTSAQKAELIALTQALRLAEGKSINIYTDSRYAFATAHVHGAIYKQRGWLTSAGKDIKNKEEILALLEAIHLPKRVAIIHCPGHQRGTDPVATGNRKADEAAKQAAQSTRILTETTKNAGKRTADGSEFEKRTADGSEFESPKKKAKVE

SEQ ID NO: 1767 - protein, 2222 aa, synthetic construct
MPAAKRVKLDGGDKKYSIGLDIGTNSVGWAVITDEYKVPSKKFKVLGNTDRHSIKKNLIGALLFDSGETAEATRLKRTARRRYTRRKNRICYLQEIFSNEMAKVDDSFFHRLEESFLVEEDKKHERHPIFGNIVDEVAYHEKYPTIYHLRKKLVDSTDKADLRLIYLALAHMIKFRGHFLIEGDLNPDNSDVDKLFIQLVQTYNQLFEENPINASGVDAKAILSARLSKSRRLENLIAQLPGEKKNGLFGNLIALSLGLTPNFKSNFDLAEDAKLQLSKDTYDDDLDNLLAQIGDQYADLFLAAKNLSDAILLSDILRVNTEITKAPLSASMIKRYDEHHQDLTLLKALVRQQLPEKYKEIFFDQSKNGYAGYIDGGASQEEFYKFIKPILEKMDGTEELLVKLNREDLLRKQRTFDNGSIPHQIHLGELHAILRRQEDFYPFLKDNREKIEKILTFRIPYYVGPLARGNSRFAWMTRKSEETITPWNFEEVVDKGASAQSFIERMTNFDKNLPNEKVLPKHSLLYEYFTVYNELTKVKYVTEGMRKPAFLSGEQKKAIVDLLFKTNRKVTVKQLKEDYFKKIECFDSVEISGVEDRFNASLGTYHDLLKIIKDKDFLDNEENEDILEDIVLTLTLFEDREMIEERLKTYAHLFDDKVMKQLKRRRYTGWGRLSRKLINGIRDKQSGKTILDFLKSDGFANRNFMQLIHDDSLTFKEDIQKAQVSGQGDSLHEHIANLAGSPAIKKGILQTVKVVDELVKVMGRHKPENIVIEMARENQTTQKGQKNSRERMKRIEEGIKELGSQILKEHPVENTQLQNEKLYLYYLQNGRDMYVDQELDINRLSDYDVDHIVPQSFLKDDSIDNKVLTRSDKARGKSDNVPSEEVVKKMKNYWRQLLNAKLITQRKFDNLTKAERGGLSELDKAGFIKRQLVETRQITKHVAQILDSRMNTKYDENDKLIREVKVITLKSKLVSDFRKDFQFYKVREINNYHHAHDAYLNAVVGTALIKKYPKLESEFVYGDYKVYDVRKMIAKSEQEIGKATAKYFFYSNIMNFFKTEITLANGEIRKRPLIETNGETGEIVWDKGRDFATVRKVLSMPQVNIVKKTEVQTGGFSKESILPKRNSDKLIARKKDWDPKKYGGFDSPTVAYSVLVVAKVEKGKSKKLKSVKELLGITIMERSSFEKNPIDFLEAKGYKEVKKDLIIKLPKYSLFELENGRKRMLASAGELQKGNELALPSKYVNFLYLASHYEKLKGSPEDNEQKQLFVEQHKHYLDEIIEQISEFSKRVILADANLDKVLSAYNKHRDKPIREQAENIIHLFTLTNLGAPAAFKYFDTTIDRKRYTSTKEVLDATLIHQSITGLYETRIDLSQLGGDGGGGGGSEAAAKGGGGSGGTLGDQGSRGSDPLPEPRVTLTVEGIPTEFLVNTGAEHSVLTKPMGKMGSKRTVVAGATGSKVYPWTTKRLLKIGQKQVTHSFLVIPECPAPLLGRDLLTKLKAQIQFSTEGPQVTWEDRPAMCLVLNLEEEYRLHEKPVPPSIDPSWLQLFPMVWAEKAGMGLANQVPPVVVELKSDASPVAVRQYPMSKEAREGIRPHIQRFLDLGILVPCQSPWNTPLLPVKKPGTNDYRPVQDLREVNKRVQDIHPTVPNPYNLLSSLPPSHTWYSVLDLKDAFFCLKLHPNSQPLFAFEWRDPEKGNTGQLTWTRLPQGFKNSPTLFNEALHRDLASFRALNPQVVMLQYVDDLLVAAPTYRDCKEGTRRLLQELSKLGYRVSAKKAQLCREEVTYLGYLLKGGKRWLTPARKATVMKIPTPTTPRQVREFLGTAGFCRLWIPGFASLAAPLYPLTRPKVPFTWTEAHQEAFGRIKEALLSAPALALPDLTKPFALYVDEKEGVARGVLTQTLGPWRRPVAYLSKKLDPVASGWPTCLKAIAAVALLLKDADKLTLGQNVLVIAPHNLESIVRQPPDRWMTNARMTHYQSLLLNERVSFAPPAILNPATLLPVESDDTPIHICSEILAEETGTRPDLRDQPLPGVPAWYTDGSSFIMDGRRQAGAAIVDNKRTVWASNLPEGTSAQKAELIALTQALRLAEGKSINIYTDSRYAFATAHVHGAIYKQRGWLTSAGKDIKNKEEILALLEAIHLPKRVAIIHCPGHQRGTDPVATGNRKADEAAKQAAQSTRILTETTKNAGKRTADGSEFEKRTADGSEFESPKKKAKVE

SEQ ID NO: 1768 - protein, 2213 aa, synthetic construct
MPAAKRVKLDGGDKKYSIGLDIGTNSVGWAVITDEYKVPSKKFKVLGNTDRHSIKKNLIGALLFDSGETAEATRLKRTARRRYTRRKNRICYLQEIFSNEMAKVDDSFFHRLEESFLVEEDKKHERHPIFGNIVDEVAYHEKYPTIYHLRKKLVDSTDKADLRLIYLALAHMIKFRGHFLIEGDLNPDNSDVDKLFIQLVQTYNQLFEENPINASGVDAKAILSARLSKSRRLENLIAQLPGEKKNGLFGNLIALSLGLTPNFKSNFDLAEDAKLQLSKDTYDDDLDNLLAQIGDQYADLFLAAKNLSDAILLSDILRVNTEITKAPLSASMIKRYDEHHQDLTLLKALVRQQLPEKYKEIFFDQSKNGYAGYIDGGASQEEFYKFIKPILEKMDGTEELLVKLNREDLLRKQRTFDNGSIPHQIHLGELHAILRRQEDFYPFLKDNREKIEKILTFRIPYYVGPLARGNSRFAWMTRKSEETITPWNFEEVVDKGASAQSFIERMTNFDKNLPNEKVLPKHSLLYEYFTVYNELTKVKYVTEGMRKPAFLSGEQKKAIVDLLFKTNRKVTVKQLKEDYFKKIECFDSVEISGVEDRFNASLGTYHDLLKIIKDKDFLDNEENEDILEDIVLTLTLFEDREMIEERLKTYAHLFDDKVMKQLKRRRYTGWGRLSRKLINGIRDKQSGKTILDFLKSDGFANRNFMQLIHDDSLTFKEDIQKAQVSGQGDSLHEHIANLAGSPAIKKGILQTVKVVDELVKVMGRHKPENIVIEMARENQTTQKGQKNSRERMKRIEEGIKELGSQILKEHPVENTQLQNEKLYLYYLQNGRDMYVDQELDINRLSDYDVDHIVPQSFLKDDSIDNKVLTRSDKARGKSDNVPSEEVVKKMKNYWRQLLNAKLITQRKFDNLTKAERGGLSELDKAGFIKRQLVETRQITKHVAQILDSRMNTKYDENDKLIREVKVITLKSKLVSDFRKDFQFYKVREINNYHHAHDAYLNAVVGTALIKKYPKLESEFVYGDYKVYDVRKMIAKSEQEIGKATAKYFFYSNIMNFFKTEITLANGEIRKRPLIETNGETGEIVWDKGRDFATVRKVLSMPQVNIVKKTEVQTGGFSKESILPKRNSDKLIARKKDWDPKKYGGFDSPTVAYSVLVVAKVEKGKSKKLKSVKELLGITIMERSSFEKNPIDFLEAKGYKEVKKDLIIKLPKYSLFELENGRKRMLASAGELQKGNELALPSKYVNFLYLASHYEKLKGSPEDNEQKQLFVEQHKHYLDEIIEQISEFSKRVILADANLDKVLSAYNKHRDKPIREQAENIIHLFTLTNLGAPAAFKYFDTTIDRKRYTSTKEVLDATLIHQSITGLYETRIDLSQLGGDGGGGSGSSGGTLGDQGSRGSDPLPEPRVTLTVEGIPTEFLVNTGAEHSVLTKPMGKMGSKRTVVAGATGSKVYPWTTKRLLKIGQKQVTHSFLVIPECPAPLLGRDLLTKLKAQIQFSTEGPQVTWEDRPAMCLVLNLEEEYRLHEKPVPPSIDPSWLQLFPMVWAEKAGMGLANQVPPVVVELKSDASPVAVRQYPMSKEAREGIRPHIQRFLDLGILVPCQSPWNTPLLPVKKPGTNDYRPVQDLREVNKRVQDIHPTVPNPYNLLSSLPPSHTWYSVLDLKDAFFCLKLHPNSQPLFAFEWRDPEKGNTGQLTWTRLPQGFKNSPTLFNEALHRDLASFRALNPQVVMLQYVDDLLVAAPTYRDCKEGTRRLLQELSKLGYRVSAKKAQLCREEVTYLGYLLKGGKRWLTPARKATVMKIPTPTTPRQVREFLGTAGFCRLWIPGFASLAAPLYPLTRPKVPFTWTEAHQEAFGRIKEALLSAPALALPDLTKPFALYVDEKEGVARGVLTQTLGPWRRPVAYLSKKLDPVASGWPTCLKAIAAVALLLKDADKLTLGQNVLVIAPHNLESIVRQPPDRWMTNARMTHYQSLLLNERVSFAPPAILNPATLLPVESDDTPIHICSEILAEETGTRPDLRDQPLPGVPAWYTDGSSFIMDGRRQAGAAIVDNKRTVWASNLPEGTSAQKAELIALTQALRLAEGKSINIYTDSRYAFATAHVHGAIYKQRGWLTSAGKDIKNKEEILALLEAIHLPKRVAIIHCPGHQRGTDPVATGNRKADEAAKQAAQSTRILTETTKNAGKRTADGSEFEKRTADGSEFESPKKKAKVE

SEQ ID NO: 1769 - protein, 2218 aa, synthetic construct
MPAAKRVKLDGGDKKYSIGLDIGTNSVGWAVITDEYKVPSKKFKVLGNTDRHSIKKNLIGALLFDSGETAEATRLKRTARRRYTRRKNRICYLQEIFSNEMAKVDDSFFHRLEESFLVEEDKKHERHPIFGNIVDEVAYHEKYPTIYHLRKKLVDSTDKADLRLIYLALAHMIKFRGHFLIEGDLNPDNSDVDKLFIQLVQTYNQLFEENPINASGVDAKAILSARLSKSRRLENLIAQLPGEKKNGLFGNLIALSLGLTPNFKSNFDLAEDAKLQLSKDTYDDDLDNLLAQIGDQYADLFLAAKNLSDAILLSDILRVNTEITKAPLSASMIKRYDEHHQDLTLLKALVRQQLPEKYKEIFFDQSKNGYAGYIDGGASQEEFYKFIKPILEKMDGTEELLVKLNREDLLRKQRTFDNGSIPHQIHLGELHAILRRQEDFYPFLKDNREKIEKILTFRIPYYVGPLARGNSRFAWMTRKSEETITPWNFEEVVDKGASAQSFIERMTNFDKNLPNEKVLPKHSLLYEYFTVYNELTKVKYVTEGMRKPAFLSGEQKKAIVDLLFKTNRKVTVKQLKEDYFKKIECFDSVEISGVEDRFNASLGTYHDLLKIIKDKDFLDNEENEDILEDIVLTLTLFEDREMIEERLKTYAHLFDDKVMKQLKRRRYTGWGRLSRKLINGIRDKQSGKTILDFLKSDGFANRNFMQLIHDDSLTFKEDIQKAQVSGQGDSLHEHIANLAGSPAIKKGILQTVKVVDELVKVMGRHKPENIVIEMARENQTTQKGQKNSRERMKRIEEGIKELGSQILKEHPVENTQLQNEKLYLYYLQNGRDMYVDQELDINRLSDYDVDHIVPQSFLKDDSIDNKVLTRSDKARGKSDNVPSEEVVKKMKNYWRQLLNAKLITQRKFDNLTKAERGGLSELDKAGFIKRQLVETRQITKHVAQILDSRMNTKYDENDKLIREVKVITLKSKLVSDFRKDFQFYKVREINNYHHAHDAYLNAVVGTALIKKYPKLESEFVYGDYKVYDVRKMIAKSEQEIGKATAKYFFYSNIMNFFKTEITLANGEIRKRPLIETNGETGEIVWDKGRDFATVRKVLSMPQVNIVKKTEVQTGGFSKESILPKRNSDKLIARKKDWDPKKYGGFDSPTVAYSVLVVAKVEKGKSKKLKSVKELLGITIMERSSFEKNPIDFLEAKGYKEVKKDLIIKLPKYSLFELENGRKRMLASAGELQKGNELALPSKYVNFLYLASHYEKLKGSPEDNEQKQLFVEQHKHYLDEIIEQISEFSKRVILADANLDKVLSAYNKHRDKPIREQAENIIHLFTLTNLGAPAAFKYFDTTIDRKRYTSTKEVLDATLIHQSITGLYETRIDLSQLGGDGGGGSEAAAKGSSGGTLGDQGSRGSDPLPEPRVTLTVEGIPTEFLVNTGAEHSVLTKPMGKMGSKRTVVAGATGSKVYPWTTKRLLKIGQKQVTHSFLVIPECPAPLLGRDLLTKLKAQIQFSTEGPQVTWEDRPAMCLVLNLEEEYRLHEKPVPPSIDPSWLQLFPMVWAEKAGMGLANQVPPVVVELKSDASPVAVRQYPMSKEAREGIRPHIQRFLDLGILVPCQSPWNTPLLPVKKPGTNDYRPVQDLREVNKRVQDIHPTVPNPYNLLSSLPPSHTWYSVLDLKDAFFCLKLHPNSQPLFAFEWRDPEKGNTGQLTWTRLPQGFKNSPTLFNEALHRDLASFRALNPQVVMLQYVDDLLVAAPTYRDCKEGTRRLLQELSKLGYRVSAKKAQLCREEVTYLGYLLKGGKRWLTPARKATVMKIPTPTTPRQVREFLGKAGFCRLFIPGFASLAAPLYPLTRPKVPFTWTEAHQEAFGRIKEALLSAPALALPDLTKPFALYVDEKEGVARGVLTQTLGPWRRPVAYLSKKLDPVASGWPTCLKAIAAVALLLKDADKLTLGQNVLVIAPHNLESIVRQPPDRWMTNARMTHYQSLLLNERVSFAPPAILNPATLLPVESDDTPIHICSEILAEETGTRPDLRDQPLPGVPAWYTDGSSFIMDGRRQAGAAIVDNKRTVWASNLPEGTSAQKAELIALTQALRLAEGKSINIYTDSRYAFATAHVHGAIYKQRGWLTSAGKDIKNKEEILALLEAIHLPKRVAIIHCPGHQRGTDPVATGNRKADEAAKQAAQSTRILTETTKNAGKRTADGSEFEKRTADGSEFESPKKKAKVE

SEQ ID NO: 1770 - protein, 2218 aa, synthetic construct
MPAAKRVKLDGGDKKYSIGLDIGTNSVGWAVITDEYKVPSKKFKVLGNTDRHSIKKNLIGALLFDSGETAEATRLKRTARRRYTRRKNRICYLQEIFSNEMAKVDDSFFHRLEESFLVEEDKKHERHPIFGNIVDEVAYHEKYPTIYHLRKKLVDSTDKADLRLIYLALAHMIKFRGHFLIEGDLNPDNSDVDKLFIQLVQTYNQLFEENPINASGVDAKAILSARLSKSRRLENLIAQLPGEKKNGLFGNLIALSLGLTPNFKSNFDLAEDAKLQLSKDTYDDDLDNLLAQIGDQYADLFLAAKNLSDAILLSDILRVNTEITKAPLSASMIKRYDEHHQDLTLLKALVRQQLPEKYKEIFFDQSKNGYAGYIDGGASQEEFYKFIKPILEKMDGTEELLVKLNREDLLRKQRTFDNGSIPHQIHLGELHAILRRQEDFYPFLKDNREKIEKILTFRIPYYVGPLARGNSRFAWMTRKSEETITPWNFEEVVDKGASAQSFIERMTNFDKNLPNEKVLPKHSLLYEYFTVYNELTKVKYVTEGMRKPAFLSGEQKKAIVDLLFKTNRKVTVKQLKEDYFKKIECFDSVEISGVEDRFNASLGTYHDLLKIIKDKDFLDNEENEDILEDIVLTLTLFEDREMIEERLKTYAHLFDDKVMKQLKRRRYTGWGRLSRKLINGIRDKQSGKTILDFLKSDGFANRNFMQLIHDDSLTFKEDIQKAQVSGQGDSLHEHIANLAGSPAIKKGILQTVKVVDELVKVMGRHKPENIVIEMARENQTTQKGQKNSRERMKRIEEGIKELGSQILKEHPVENTQLQNEKLYLYYLQNGRDMYVDQELDINRLSDYDVDHIVPQSFLKDDSIDNKVLTRSDKARGKSDNVPSEEVVKKMKNYWRQLLNAKLITQRKFDNLTKAERGGLSELDKAGFIKRQLVETRQITKHVAQILDSRMNTKYDENDKLIREVKVITLKSKLVSDFRKDFQFYKVREINNYHHAHDAYLNAVVGTALIKKYPKLESEFVYGDYKVYDVRKMIAKSEQEIGKATAKYFFYSNIMNFFKTEITLANGEIRKRPLIETNGETGEIVWDKGRDFATVRKVLSMPQVNIVKKTEVQTGGFSKESILPKRNSDKLIARKKDWDPKKYGGFDSPTVAYSVLVVAKVEKGKSKKLKSVKELLGITIMERSSFEKNPIDFLEAKGYKEVKKDLIIKLPKYSLFELENGRKRMLASAGELQKGNELALPSKYVNFLYLASHYEKLKGSPEDNEQKQLFVEQHKHYLDEIIEQISEFSKRVILADANLDKVLSAYNKHRDKPIREQAENIIHLFTLTNLGAPAAFKYFDTTIDRKRYTSTKEVLDATLIHQSITGLYETRIDLSQLGGDGGEAAAKGGGPAPGGTLGDQGSRGSDPLPEPRVTLTVEGIPTEFLVNTGAEHSVLTKPMGKMGSKRTVVAGATGSKVYPWTTKRLLKIGQKQVTHSFLVIPECPAPLLGRDLLTKLKAQIQFSTEGPQVTWEDRPAMCLVLNLEEEYRLHEKPVPPSIDPSWLQLFPMVWAEKAGMGLANQVPPVVVELKSDASPVAVRQYPMSKEAREGIRPHIQRFLDLGILVPCQSPWNTPLLPVKKPGTNDYRPVQDLREVNKRVQDIHPTVPNPYNLLSSLPPSHTWYSVLDLKDAFFCLKLHPNSQPLFAFEWRDPEKGNTGQLTWTRLPQGFKNSPTLFNEALHRDLASFRALNPQVVMLQYVDDLLVAAPTYRDCKEGTRRLLQELSKLGYRVSAKKAQLCREEVTYLGYLLKGGKRWLTPARKATVMKIPTPTTPRQVREFLGKAGFCRLFIPGFASLAAPLYPLTRPKVPFTWTEAHQEAFGRIKEALLSAPALALPDLTKPFALYVDEKEGVARGVLTQTLGPWRRPVAYLSKKLDPVASGWPTCLKAIAAVALLLKDADKLTLGQNVLVIAPHNLESIVRQPPDRWMTNARMTHYQSLLLNERVSFAPPAILNPATLLPVESDDTPIHICSEILAEETGTRPDLRDQPLPGVPAWYTDGSSFIMDGRRQAGAAIVDNKRTVWASNLPEGTSAQKAELIALTQALRLAEGKSINIYTDSRYAFATAHVHGAIYKQRGWLTSAGKDIKNKEEILALLEAIHLPKRVAIIHCPGHQRGTDPVATGNRKADEAAKQAAQSTRILTETTKNAGKRTADGSEFEKRTADGSEFESPKKKAKVE

SEQ ID NO: 1771 - protein, 2218 aa, synthetic construct
MPAAKRVKLDGGDKKYSIGLDIGTNSVGWAVITDEYKVPSKKFKVLGNTDRHSIKKNLIGALLFDSGETAEATRLKRTARRRYTRRKNRICYLQEIFSNEMAKVDDSFFHRLEESFLVEEDKKHERHPIFGNIVDEVAYHEKYPTIYHLRKKLVDSTDKADLRLIYLALAHMIKFRGHFLIEGDLNPDNSDVDKLFIQLVQTYNQLFEENPINASGVDAKAILSARLSKSRRLENLIAQLPGEKKNGLFGNLIALSLGLTPNFKSNFDLAEDAKLQLSKDTYDDDLDNLLAQIGDQYADLFLAAKNLSDAILLSDILRVNTEITKAPLSASMIKRYDEHHQDLTLLKALVRQQLPEKYKEIFFDQSKNGYAGYIDGGASQEEFYKFIKPILEKMDGTEELLVKLNREDLLRKQRTFDNGSIPHQIHLGELHAILRRQEDFYPFLKDNREKIEKILTFRIPYYVGPLARGNSRFAWMTRKSEETITPWNFEEVVDKGASAQSFIERMTNFDKNLPNEKVLPKHSLLYEYFTVYNELTKVKYVTEGMRKPAFLSGEQKKAIVDLLFKTNRKVTVKQLKEDYFKKIECFDSVEISGVEDRFNASLGTYHDLLKIIKDKDFLDNEENEDILEDIVLTLTLFEDREMIEERLKTYAHLFDDKVMKQLKRRRYTGWGRLSRKLINGIRDKQSGKTILDFLKSDGFANRNFMQLIHDDSLTFKEDIQKAQVSGQGDSLHEHIANLAGSPAIKKGILQTVKVVDELVKVMGRHKPENIVIEMARENQTTQKGQKNSRERMKRIEEGIKELGSQILKEHPVENTQLQNEKLYLYYLQNGRDMYVDQELDINRLSDYDVDHIVPQSFLKDDSIDNKVLTRSDKARGKSDNVPSEEVVKKMKNYWRQLLNAKLITQRKFDNLTKAERGGLSELDKAGFIKRQLVETRQITKHVAQILDSRMNTKYDENDKLIREVKVITLKSKLVSDFRKDFQFYKVREINNYHHAHDAYLNAVVGTALIKKYPKLESEFVYGDYKVYDVRKMIAKSEQEIGKATAKYFFYSNIMNFFKTEITLANGEIRKRPLIETNGETGEIVWDKGRDFATVRKVLSMPQVNIVKKTEVQTGGFSKESILPKRNSDKLIARKKDWDPKKYGGFDSPTVAYSVLVVAKVEKGKSKKLKSVKELLGITIMERSSFEKNPIDFLEAKGYKEVKKDLIIKLPKYSLFELENGRKRMLASAGELQKGNELALPSKYVNFLYLASHYEKLKGSPEDNEQKQLFVEQHKHYLDEIIEQISEFSKRVILADANLDKVLSAYNKHRDKPIREQAENIIHLFTLTNLGAPAAFKYFDTTIDRKRYTSTKEVLDATLIHQSITGLYETRIDLSQLGGDGGGGGEAAAKGGSGGTLGDQGSRGSDPLPEPRVTLTVEGIPTEFLVNTGAEHSVLTKPMGKMGSKRTVVAGATGSKVYPWTTKRLLKIGQKQVTHSFLVIPECPAPLLGRDLLTKLKAQIQFSTEGPQVTWEDRPAMCLVLNLEEEYRLHEKPVPPSIDPSWLQLFPMVWAEKAGMGLANQVPPVVVELKSDASPVAVRQYPMSKEAREGIRPHIQRFLDLGILVPCQSPWNTPLLPVKKPGTNDYRPVQDLREVNKRVQDIHPTVPNPYNLLSSLPPSHTWYSVLDLKDAFFCLKLHPNSQPLFAFEWRDPEKGNTGQLTWTRLPQGFKNSPTLFNEALHRDLASFRALNPQVVMLQYVDDLLVAAPTYRDCKEGTRRLLQELSKLGYRVSAKKAQLCREEVTYLGYLLKGGKRWLTPARKATVMKIPTPTTPRQVREFLGKAGFCRLFIPGFASLAAPLYPLTRPKVPFTWTEAHQEAFGRIKEALLSAPALALPDLTKPFALYVDEKEGVARGVLTQTLGPWRRPVAYLSKKLDPVASGWPTCLKAIAAVALLLKDADKLTLGQNVLVIAPHNLESIVRQPPDRWMTNARMTHYQSLLLNERVSFAPPAILNPATLLPVESDDTPIHICSEILAEETGTRPDLRDQPLPGVPAWYTDGSSFIMDGRRQAGAAIVDNKRTVWASNLPEGTSAQKAELIALTQALRLAEGKSINIYTDSRYAFATAHVHGAIYKQRGWLTSAGKDIKNKEEILALLEAIHLPKRVAIIHCPGHQRGTDPVATGNRKADEAAKQAAQSTRILTETTKNAGKRTADGSEFEKRTADGSEFESPKKKAKVE

SEQ ID NO: 1772 - protein, 2213 aa, synthetic construct
MPAAKRVKLDGGDKKYSIGLDIGTNSVGWAVITDEYKVPSKKFKVLGNTDRHSIKKNLIGALLFDSGETAEATRLKRTARRRYTRRKNRICYLQEIFSNEMAKVDDSFFHRLEESFLVEEDKKHERHPIFGNIVDEVAYHEKYPTIYHLRKKLVDSTDKADLRLIYLALAHMIKFRGHFLIEGDLNPDNSDVDKLFIQLVQTYNQLFEENPINASGVDAKAILSARLSKSRRLENLIAQLPGEKKNGLFGNLIALSLGLTPNFKSNFDLAEDAKLQLSKDTYDDDLDNLLAQIGDQYADLFLAAKNLSDAILLSDILRVNTEITKAPLSASMIKRYDEHHQDLTLLKALVRQQLPEKYKEIFFDQSKNGYAGYIDGGASQEEFYKFIKPILEKMDGTEELLVKLNREDLLRKQRTFDNGSIPHQIHLGELHAILRRQEDFYPFLKDNREKIEKILTFRIPYYVGPLARGNSRFAWMTRKSEETITPWNFEEVVDKGASAQSFIERMTNFDKNLPNEKVLPKHSLLYEYFTVYNELTKVKYVTEGMRKPAFLSGEQKKAIVDLLFKTNRKVTVKQLKEDYFKKIECFDSVEISGVEDRFNASLGTYHDLLKIIKDKDFLDNEENEDILEDIVLTLTLFEDREMIEERLKTYAHLFDDKVMKQLKRRRYTGWGRLSRKLINGIRDKQSGKTILDFLKSDGFANRNFMQLIHDDSLTFKEDIQKAQVSGQGDSLHEHIANLAGSPAIKKGILQTVKVVDELVKVMGRHKPENIVIEMARENQTTQKGQKNSRERMKRIEEGIKELGSQILKEHPVENTQLQNEKLYLYYLQNGRDMYVDQELDINRLSDYDVDHIVPQSFLKDDSIDNKVLTRSDKARGKSDNVPSEEVVKKMKNYWRQLLNAKLITQRKFDNLTKAERGGLSELDKAGFIKRQLVETRQITKHVAQILDSRMNTKYDENDKLIREVKVITLKSKLVSDFRKDFQFYKVREINNYHHAHDAYLNAVVGTALIKKYPKLESEFVYGDYKVYDVRKMIAKSEQEIGKATAKYFFYSNIMNFFKTEITLANGEIRKRPLIETNGETGEIVWDKGRDFATVRKVLSMPQVNIVKKTEVQTGGFSKESILPKRNSDKLIARKKDWDPKKYGGFDSPTVAYSVLVVAKVEKGKSKKLKSVKELLGITIMERSSFEKNPIDFLEAKGYKEVKKDLIIKLPKYSLFELENGRKRMLASAGELQKGNELALPSKYVNFLYLASHYEKLKGSPEDNEQKQLFVEQHKHYLDEIIEQISEFSKRVILADANLDKVLSAYNKHRDKPIREQAENIIHLFTLTNLGAPAAFKYFDTTIDRKRYTSTKEVLDATLIHQSITGLYETRIDLSQLGGDGGGGGGSSGGTLGDQGSRGSDPLPEPRVTLTVEGIPTEFLVNTGAEHSVLTKPMGKMGSKRTVVAGATGSKVYPWTTKRLLKIGQKQVTHSFLVIPECPAPLLGRDLLTKLKAQIQFSTEGPQVTWEDRPAMCLVLNLEEEYRLHEKPVPPSIDPSWLQLFPMVWAEKAGMGLANQVPPVVVELKSDASPVAVRQYPMSKEAREGIRPHIQRFLDLGILVPCQSPWNTPLLPVKKPGTNDYRPVQDLREVNKRVQDIHPTVPNPYNLLSSLPPSHTWYSVLDLKDAFFCLKLHPNSQPLFAFEWRDPEKGNTGQLTWTRLPQGFKNSPTLFNEALHRDLASFRALNPQVVMLQYVDDLLVAAPTYRDCKEGTRRLLQELSKLGYRVSAKKAQLCREEVTYLGYLLKGGKRWLTPARKATVMKIPTPTTPRQVREFLGKAGFCRLFIPGFASLAAPLYPLTRPKVPFTWTEAHQEAFGRIKEALLSAPALALPDLTKPFALYVDEKEGVARGVLTQTLGPWRRPVAYLSKKLDPVASGWPTCLKAIAAVALLLKDADKLTLGQNVLVIAPHNLESIVRQPPDRWMTNARMTHYQSLLLNERVSFAPPAILNPATLLPVESDDTPIHICSEILAEETGTRPDLRDQPLPGVPAWYTDGSSFIMDGRRQAGAAIVDNKRTVWASNLPEGTSAQKAELIALTQALRLAEGKSINIYTDSRYAFATAHVHGAIYKQRGWLTSAGKDIKNKEEILALLEAIHLPKRVAIIHCPGHQRGTDPVATGNRKADEAAKQAAQSTRILTETTKNAGKRTADGSEFEKRTADGSEFESPKKKAKVE

SEQ ID NO: 1773 - protein, 2217 aa, synthetic construct
MPAAKRVKLDGGDKKYSIGLDIGTNSVGWAVITDEYKVPSKKFKVLGNTDRHSIKKNLIGALLFDSGETAEATRLKRTARRRYTRRKNRICYLQEIFSNEMAKVDDSFFHRLEESFLVEEDKKHERHPIFGNIVDEVAYHEKYPTIYHLRKKLVDSTDKADLRLIYLALAHMIKFRGHFLIEGDLNPDNSDVDKLFIQLVQTYNQLFEENPINASGVDAKAILSARLSKSRRLENLIAQLPGEKKNGLFGNLIALSLGLTPNFKSNFDLAEDAKLQLSKDTYDDDLDNLLAQIGDQYADLFLAAKNLSDAILLSDILRVNTEITKAPLSASMIKRYDEHHQDLTLLKALVRQQLPEKYKEIFFDQSKNGYAGYIDGGASQEEFYKFIKPILEKMDGTEELLVKLNREDLLRKQRTFDNGSIPHQIHLGELHAILRRQEDFYPFLKDNREKIEKILTFRIPYYVGPLARGNSRFAWMTRKSEETITPWNFEEVVDKGASAQSFIERMTNFDKNLPNEKVLPKHSLLYEYFTVYNELTKVKYVTEGMRKPAFLSGEQKKAIVDLLFKTNRKVTVKQLKEDYFKKIECFDSVEISGVEDRFNASLGTYHDLLKIIKDKDFLDNEENEDILEDIVLTLTLFEDREMIEERLKTYAHLFDDKVMKQLKRRRYTGWGRLSRKLINGIRDKQSGKTILDFLKSDGFANRNFMQLIHDDSLTFKEDIQKAQVSGQGDSLHEHIANLAGSPAIKKGILQTVKVVDELVKVMGRHKPENIVIEMARENQTTQKGQKNSRERMKRIEEGIKELGSQILKEHPVENTQLQNEKLYLYYLQNGRDMYVDQELDINRLSDYDVDHIVPQSFLKDDSIDNKVLTRSDKARGKSDNVPSEEVVKKMKNYWRQLLNAKLITQRKFDNLTKAERGGLSELDKAGFIKRQLVETRQITKHVAQILDSRMNTKYDENDKLIREVKVITLKSKLVSDFRKDFQFYKVREINNYHHAHDAYLNAVVGTALIKKYPKLESEFVYGDYKVYDVRKMIAKSEQEIGKATAKYFFYSNIMNFFKTEITLANGEIRKRPLIETNGETGEIVWDKGRDFATVRKVLSMPQVNIVKKTEVQTGGFSKESILPKRNSDKLIARKKDWDPKKYGGFDSPTVAYSVLVVAKVEKGKSKKLKSVKELLGITIMERSSFEKNPIDFLEAKGYKEVKKDLIIKLPKYSLFELENGRKRMLASAGELQKGNELALPSKYVNFLYLASHYEKLKGSPEDNEQKQLFVEQHKHYLDEIIEQISEFSKRVILADANLDKVLSAYNKHRDKPIREQAENIIHLFTLTNLGAPAAFKYFDTTIDRKRYTSTKEVLDATLIHQSITGLYETRIDLSQLGGDGGEAAAKEAAAKGGTLGDQGSRGSDPLPEPRVTLTVEGIPTEFLVNTGAEHSVLTKPMGKMGSKRTVVAGATGSKVYPWTTKRLLKIGQKQVTHSFLVIPECPAPLLGRDLLTKLKAQIQFSTEGPQVTWEDRPAMCLVLNLEEEYRLHEKPVPPSIDPSWLQLFPMVWAEKAGMGLANQVPPVVVELKSDASPVAVRQYPMSKEAREGIRPHIQRFLDLGILVPCQSPWNTPLLPVKKPGTNDYRPVQDLREVNKRVQDIHPTVPNPYNLLSSLPPSHTWYSVLDLKDAFFCLKLHPNSQPLFAFEWRDPEKGNTGQLTWTRLPQGFKNSPTLFNEALHRDLASFRALNPQVVMLQYVDDLLVAAPTYRDCKEGTRRLLQELSKLGYRVSAKKAQLCREEVTYLGYLLKGGKRWLTPARKATVMKIPTPTTPRQVREFLGKAGFCRLFIPGFASLAAPLYPLTRPKVPFTWTEAHQEAFGRIKEALLSAPALALPDLTKPFALYVDEKEGVARGVLTQTLGPWRRPVAYLSKKLDPVASGWPTCLKAIAAVALLLKDADKLTLGQNVLVIAPHNLESIVRQPPDRWMTNARMTHYQSLLLNERVSFAPPAILNPATLLPVESDDTPIHICSEILAEETGTRPDLRDQPLPGVPAWYTDGSSFIMDGRRQAGAAIVDNKRTVWASNLPEGTSAQKAELIALTQALRLAEGKSINIYTDSRYAFATAHVHGAIYKQRGWLTSAGKDIKNKEEILALLEAIHLPKRVAIIHCPGHQRGTDPVATGNRKADEAAKQAAQSTRILTETTKNAGKRTADGSEFEKRTADGSEFESPKKKAKVE

SEQ ID NO: 1774 - protein, 2216 aa, synthetic construct
MPAAKRVKLDGGDKKYSIGLDIGTNSVGWAVITDEYKVPSKKFKVLGNTDRHSIKKNLIGALLFDSGETAEATRLKRTARRRYTRRKNRICYLQEIFSNEMAKVDDSFFHRLEESFLVEEDKKHERHPIFGNIVDEVAYHEKYPTIYHLRKKLVDSTDKADLRLIYLALAHMIKFRGHFLIEGDLNPDNSDVDKLFIQLVQTYNQLFEENPINASGVDAKAILSARLSKSRRLENLIAQLPGEKKNGLFGNLIALSLGLTPNFKSNFDLAEDAKLQLSKDTYDDDLDNLLAQIGDQYADLFLAAKNLSDAILLSDILRVNTEITKAPLSASMIKRYDEHHQDLTLLKALVRQQLPEKYKEIFFDQSKNGYAGYIDGGASQEEFYKFIKPILEKMDGTEELLVKLNREDLLRKQRTFDNGSIPHQIHLGELHAILRRQEDFYPFLKDNREKIEKILTFRIPYYVGPLARGNSRFAWMTRKSEETITPWNFEEVVDKGASAQSFIERMTNFDKNLPNEKVLPKHSLLYEYFTVYNELTKVKYVTEGMRKPAFLSGEQKKAIVDLLFKTNRKVTVKQLKEDYFKKIECFDSVEISGVEDRFNASLGTYHDLLKIIKDKDFLDNEENEDILEDIVLTLTLFEDREMIEERLKTYAHLFDDKVMKQLKRRRYTGWGRLSRKLINGIRDKQSGKTILDFLKSDGFANRNFMQLIHDDSLTFKEDIQKAQVSGQGDSLHEHIANLAGSPAIKKGILQTVKVVDELVKVMGRHKPENIVIEMARENQTTQKGQKNSRERMKRIEEGIKELGSQILKEHPVENTQLQNEKLYLYYLQNGRDMYVDQELDINRLSDYDVDHIVPQSFLKDDSIDNKVLTRSDKARGKSDNVPSEEVVKKMKNYWRQLLNAKLITQRKFDNLTKAERGGLSELDKAGFIKRQLVETRQITKHVAQILDSRMNTKYDENDKLIREVKVITLKSKLVSDFRKDFQFYKVREINNYHHAHDAYLNAVVGTALIKKYPKLESEFVYGDYKVYDVRKMIAKSEQEIGKATAKYFFYSNIMNFFKTEITLANGEIRKRPLIETNGETGEIVWDKGRDFATVRKVLSMPQVNIVKKTEVQTGGFSKESILPKRNSDKLIARKKDWDPKKYGGFDSPTVAYSVLVVAKVEKGKSKKLKSVKELLGITIMERSSFEKNPIDFLEAKGYKEVKKDLIIKLPKYSLFELENGRKRMLASAGELQKGNELALPSKYVNFLYLASHYEKLKGSPEDNEQKQLFVEQHKHYLDEIIEQISEFSKRVILADANLDKVLSAYNKHRDKPIREQAENIIHLFTLTNLGAPAAFKYFDTTIDRKRYTSTKEVLDATLIHQSITGLYETRIDLSQLGGDGGPAPGGGGSSGGTLGDQGSRGSDPLPEPRVTLTVEGIPTEFLVNTGAEHSVLTKPMGKMGSKRTVVAGATGSKVYPWTTKRLLKIGQKQVTHSFLVIPECPAPLLGRDLLTKLKAQIQFSTEGPQVTWEDRPAMCLVLNLEEEYRLHEKPVPPSIDPSWLQLFPMVWAEKAGMGLANQVPPVVVELKSDASPVAVRQYPMSKEAREGIRPHIQRFLDLGILVPCQSPWNTPLLPVKKPGTNDYRPVQDLREVNKRVQDIHPTVPNPYNLLSSLPPSHTWYSVLDLKDAFFCLKLHPNSQPLFAFEWRDPEKGNTGQLTWTRLPQGFKNSPTLFNEALHRDLASFRALNPQVVMLQYVDDLLVAAPTYRDCKEGTRRLLQELSKLGYRVSAKKAQLCREEVTYLGYLLKGGKRWLTPARKATVMKIPTPTTPRQVREFLGKAGFCRLFIPGFASLAAPLYPLTRPKVPFTWTEAHQEAFGRIKEALLSAPALALPDLTKPFALYVDEKEGVARGVLTQTLGPWRRPVAYLSKKLDPVASGWPTCLKAIAAVALLLKDADKLTLGQNVLVIAPHNLESIVRQPPDRWMTNARMTHYQSLLLNERVSFAPPAILNPATLLPVESDDTPIHICSEILAEETGTRPDLRDQPLPGVPAWYTDGSSFIMDGRRQAGAAIVDNKRTVWASNLPEGTSAQKAELIALTQALRLAEGKSINIYTDSRYAFATAHVHGAIYKQRGWLTSAGKDIKNKEEILALLEAIHLPKRVAIIHCPGHQRGTDPVATGNRKADEAAKQAAQSTRILTETTKNAGKRTADGSEFEKRTADGSEFESPKKKAKVE

SEQ ID NO: 1775 - protein, 2216 aa, synthetic construct
MPAAKRVKLDGGDKKYSIGLDIGTNSVGWAVITDEYKVPSKKFKVLGNTDRHSIKKNLIGALLFDSGETAEATRLKRTARRRYTRRKNRICYLQEIFSNEMAKVDDSFFHRLEESFLVEEDKKHERHPIFGNIVDEVAYHEKYPTIYHLRKKLVDSTDKADLRLIYLALAHMIKFRGHFLIEGDLNPDNSDVDKLFIQLVQTYNQLFEENPINASGVDAKAILSARLSKSRRLENLIAQLPGEKKNGLFGNLIALSLGLTPNFKSNFDLAEDAKLQLSKDTYDDDLDNLLAQIGDQYADLFLAAKNLSDAILLSDILRVNTEITKAPLSASMIKRYDEHHQDLTLLKALVRQQLPEKYKEIFFDQSKNGYAGYIDGGASQEEFYKFIKPILEKMDGTEELLVKLNREDLLRKQRTFDNGSIPHQIHLGELHAILRRQEDFYPFLKDNREKIEKILTFRIPYYVGPLARGNSRFAWMTRKSEETITPWNFEEVVDKGASAQSFIERMTNFDKNLPNEKVLPKHSLLYEYFTVYNELTKVKYVTEGMRKPAFLSGEQKKAIVDLLFKTNRKVTVKQLKEDYFKKIECFDSVEISGVEDRFNASLGTYHDLLKIIKDKDFLDNEENEDILEDIVLTLTLFEDREMIEERLKTYAHLFDDKVMKQLKRRRYTGWGRLSRKLINGIRDKQSGKTILDFLKSDGFANRNFMQLIHDDSLTFKEDIQKAQVSGQGDSLHEHIANLAGSPAIKKGILQTVKVVDELVKVMGRHKPENIVIEMARENQTTQKGQKNSRERMKRIEEGIKELGSQILKEHPVENTQLQNEKLYLYYLQNGRDMYVDQELDINRLSDYDVDHIVPQSFLKDDSIDNKVLTRSDKARGKSDNVPSEEVVKKMKNYWRQLLNAKLITQRKFDNLTKAERGGLSELDKAGFIKRQLVETRQITKHVAQILDSRMNTKYDENDKLIREVKVITLKSKLVSDFRKDFQFYKVREINNYHHAHDAYLNAVVGTALIKKYPKLESEFVYGDYKVYDVRKMIAKSEQEIGKATAKYFFYSNIMNFFKTEITLANGEIRKRPLIETNGETGEIVWDKGRDFATVRKVLSMPQVNIVKKTEVQTGGFSKESILPKRNSDKLIARKKDWDPKKYGGFDSPTVAYSVLVVAKVEKGKSKKLKSVKELLGITIMERSSFEKNPIDFLEAKGYKEVKKDLIIKLPKYSLFELENGRKRMLASAGELQKGNELALPSKYVNFLYLASHYEKLKGSPEDNEQKQLFVEQHKHYLDEIIEQISEFSKRVILADANLDKVLSAYNKHRDKPIREQAENIIHLFTLTNLGAPAAFKYFDTTIDRKRYTSTKEVLDATLIHQSITGLYETRIDLSQLGGDGGGGGGGSGSSGGTLGDQGSRGSDPLPEPRVTLTVEGIPTEFLVNTGAEHSVLTKPMGKMGSKRTVVAGATGSKVYPWTTKRLLKIGQKQVTHSFLVIPECPAPLLGRDLLTKLKAQIQFSTEGPQVTWEDRPAMCLVLNLEEEYRLHEKPVPPSIDPSWLQLFPMVWAEKAGMGLANQVPPVVVELKSDASPVAVRQYPMSKEAREGIRPHIQRFLDLGILVPCQSPWNTPLLPVKKPGTNDYRPVQDLREVNKRVQDIHPTVPNPYNLLSSLPPSHTWYSVLDLKDAFFCLKLHPNSQPLFAFEWRDPEKGNTGQLTWTRLPQGFKNSPTLFNEALHRDLASFRALNPQVVMLQYVDDLLVAAPTYRDCKEGTRRLLQELSKLGYRVSAKKAQLCREEVTYLGYLLKGGKRWLTPARKATVMKIPTPTTPRQVREFLGKAGFCRLFIPGFASLAAPLYPLTRPKVPFTWTEAHQEAFGRIKEALLSAPALALPDLTKPFALYVDEKEGVARGVLTQTLGPWRRPVAYLSKKLDPVASGWPTCLKAIAAVALLLKDADKLTLGQNVLVIAPHNLESIVRQPPDRWMTNARMTHYQSLLLNERVSFAPPAILNPATLLPVESDDTPIHICSEILAEETGTRPDLRDQPLPGVPAWYTDGSSFIMDGRRQAGAAIVDNKRTVWASNLPEGTSAQKAELIALTQALRLAEGKSINIYTDSRYAFATAHVHGAIYKQRGWLTSAGKDIKNKEEILALLEAIHLPKRVAIIHCPGHQRGTDPVATGNRKADEAAKQAAQSTRILTETTKNAGKRTADGSEFEKRTADGSEFESPKKKAKVE

SEQ ID NO: 1776 - protein, 2210 aa, synthetic construct
MPAAKRVKLDGGDKKYSIGLDIGTNSVGWAVITDEYKVPSKKFKVLGNTDRHSIKKNLIGALLFDSGETAEATRLKRTARRRYTRRKNRICYLQEIFSNEMAKVDDSFFHRLEESFLVEEDKKHERHPIFGNIVDEVAYHEKYPTIYHLRKKLVDSTDKADLRLIYLALAHMIKFRGHFLIEGDLNPDNSDVDKLFIQLVQTYNQLFEENPINASGVDAKAILSARLSKSRRLENLIAQLPGEKKNGLFGNLIALSLGLTPNFKSNFDLAEDAKLQLSKDTYDDDLDNLLAQIGDQYADLFLAAKNLSDAILLSDILRVNTEITKAPLSASMIKRYDEHHQDLTLLKALVRQQLPEKYKEIFFDQSKNGYAGYIDGGASQEEFYKFIKPILEKMDGTEELLVKLNREDLLRKQRTFDNGSIPHQIHLGELHAILRRQEDFYPFLKDNREKIEKILTFRIPYYVGPLARGNSRFAWMTRKSEETITPWNFEEVVDKGASAQSFIERMTNFDKNLPNEKVLPKHSLLYEYFTVYNELTKVKYVTEGMRKPAFLSGEQKKAIVDLLFKTNRKVTVKQLKEDYFKKIECFDSVEISGVEDRFNASLGTYHDLLKIIKDKDFLDNEENEDILEDIVLTLTLFEDREMIEERLKTYAHLFDDKVMKQLKRRRYTGWGRLSRKLINGIRDKQSGKTILDFLKSDGFANRNFMQLIHDDSLTFKEDIQKAQVSGQGDSLHEHIANLAGSPAIKKGILQTVKVVDELVKVMGRHKPENIVIEMARENQTTQKGQKNSRERMKRIEEGIKELGSQILKEHPVENTQLQNEKLYLYYLQNGRDMYVDQELDINRLSDYDVDHIVPQSFLKDDSIDNKVLTRSDKARGKSDNVPSEEVVKKMKNYWRQLLNAKLITQRKFDNLTKAERGGLSELDKAGFIKRQLVETRQITKHVAQILDSRMNTKYDENDKLIREVKVITLKSKLVSDFRKDFQFYKVREINNYHHAHDAYLNAVVGTALIKKYPKLESEFVYGDYKVYDVRKMIAKSEQEIGKATAKYFFYSNIMNFFKTEITLANGEIRKRPLIETNGETGEIVWDKGRDFATVRKVLSMPQVNIVKKTEVQTGGFSKESILPKRNSDKLIARKKDWDPKKYGGFDSPTVAYSVLVVAKVEKGKSKKLKSVKELLGITIMERSSFEKNPIDFLEAKGYKEVKKDLIIKLPKYSLFELENGRKRMLASAGELQKGNELALPSKYVNFLYLASHYEKLKGSPEDNEQKQLFVEQHKHYLDEIIEQISEFSKRVILADANLDKVLSAYNKHRDKPIREQAENIIHLFTLTNLGAPAAFKYFDTTIDRKRYTSTKEVLDATLIHQSITGLYETRIDLSQLGGDGGGSSGGTLGDQGSRGSDPLPEPRVTLTVEGIPTEFLVNTGAEHSVLTKPMGKMGSKRTVVAGATGSKVYPWTTKRLLKIGQKQVTHSFLVIPECPAPLLGRDLLTKLKAQIQFSTEGPQVTWEDRPAMCLVLNLEEEYRLHEKPVPPSIDPSWLQLFPMVWAEKAGMGLANQVPPVVVELKSDASPVAVRQYPMSKEAREGIRPHIQRFLDLGILVPCQSPWNTPLLPVKKPGTNDYRPVQDLREVNKRVQDIHPTVPNPYNLLSSLPPSHTWYSVLDLKDAFFCLKLHPNSQPLFAFEWRDPEKGNTGQLTWTRLPQGFKNSPTLFNEALHRDLASFRALNPQVVMLQYVDDLLVAAPTYRDCKEGTRRLLQELSKLGYRVSAKKAQLCREEVTYLGYLLKGGKRWLTPARKATVMKIPTPTTPRQVREFLGKAGFCRLFIPGFASLAAPLYPLTRPKVPFTWTEAHQEAFGRIKEALLSAPALALPDLTKPFALYVDEKEGVARGVLTQTLGPWRRPVAYLSKKLDPVASGWPTCLKAIAAVALLLKDADKLTLGQNVLVIAPHNLESIVRQPPDRWMTNARMTHYQSLLLNERVSFAPPAILNPATLLPVESDDTPIHICSEILAEETGTRPDLRDQPLPGVPAWYTDGSSFIMDGRRQAGAAIVDNKRTVWASNLPEGTSAQKAELIALTQALRLAEGKSINIYTDSRYAFATAHVHGAIYKQRGWLTSAGKDIKNKEEILALLEAIHLPKRVAIIHCPGHQRGTDPVATGNRKADEAAKQAAQSTRILTETTKNAGKRTADGSEFEKRTADGSEFESPKKKAKVE

SEQ ID NO: 1777 - protein, 2222 aa, synthetic construct
MPAAKRVKLDGGDKKYSIGLDIGTNSVGWAVITDEYKVPSKKFKVLGNTDRHSIKKNLIGALLFDSGETAEATRLKRTARRRYTRRKNRICYLQEIFSNEMAKVDDSFFHRLEESFLVEEDKKHERHPIFGNIVDEVAYHEKYPTIYHLRKKLVDSTDKADLRLIYLALAHMIKFRGHFLIEGDLNPDNSDVDKLFIQLVQTYNQLFEENPINASGVDAKAILSARLSKSRRLENLIAQLPGEKKNGLFGNLIALSLGLTPNFKSNFDLAEDAKLQLSKDTYDDDLDNLLAQIGDQYADLFLAAKNLSDAILLSDILRVNTEITKAPLSASMIKRYDEHHQDLTLLKALVRQQLPEKYKEIFFDQSKNGYAGYIDGGASQEEFYKFIKPILEKMDGTEELLVKLNREDLLRKQRTFDNGSIPHQIHLGELHAILRRQEDFYPFLKDNREKIEKILTFRIPYYVGPLARGNSRFAWMTRKSEETITPWNFEEVVDKGASAQSFIERMTNFDKNLPNEKVLPKHSLLYEYFTVYNELTKVKYVTEGMRKPAFLSGEQKKAIVDLLFKTNRKVTVKQLKEDYFKKIECFDSVEISGVEDRFNASLGTYHDLLKIIKDKDFLDNEENEDILEDIVLTLTLFEDREMIEERLKTYAHLFDDKVMKQLKRRRYTGWGRLSRKLINGIRDKQSGKTILDFLKSDGFANRNFMQLIHDDSLTFKEDIQKAQVSGQGDSLHEHIANLAGSPAIKKGILQTVKVVDELVKVMGRHKPENIVIEMARENQTTQKGQKNSRERMKRIEEGIKELGSQILKEHPVENTQLQNEKLYLYYLQNGRDMYVDQELDINRLSDYDVDHIVPQSFLKDDSIDNKVLTRSDKARGKSDNVPSEEVVKKMKNYWRQLLNAKLITQRKFDNLTKAERGGLSELDKAGFIKRQLVETRQITKHVAQILDSRMNTKYDENDKLIREVKVITLKSKLVSDFRKDFQFYKVREINNYHHAHDAYLNAVVGTALIKKYPKLESEFVYGDYKVYDVRKMIAKSEQEIGKATAKYFFYSNIMNFFKTEITLANGEIRKRPLIETNGETGEIVWDKGRDFATVRKVLSMPQVNIVKKTEVQTGGFSKESILPKRNSDKLIARKKDWDPKKYGGFDSPTVAYSVLVVAKVEKGKSKKLKSVKELLGITIMERSSFEKNPIDFLEAKGYKEVKKDLIIKLPKYSLFELENGRKRMLASAGELQKGNELALPSKYVNFLYLASHYEKLKGSPEDNEQKQLFVEQHKHYLDEIIEQISEFSKRVILADANLDKVLSAYNKHRDKPIREQAENIIHLFTLTNLGAPAAFKYFDTTIDRKRYTSTKEVLDATLIHQSITGLYETRIDLSQLGGDGGGGGGSEAAAKGGGGSGGTLGDQGSRGSDPLPEPRVTLTVEGIPTEFLVNTGAEHSVLTKPMGKMGSKRTVVAGATGSKVYPWTTKRLLKIGQKQVTHSFLVIPECPAPLLGRDLLTKLKAQIQFSTEGPQVTWEDRPAMCLVLNLEEEYRLHEKPVPPSIDPSWLQLFPMVWAEKAGMGLANQVPPVVVELKSDASPVAVRQYPMSKEAREGIRPHIQRFLDLGILVPCQSPWNTPLLPVKKPGTNDYRPVQDLREVNKRVQDIHPTVPNPYNLLSSLPPSHTWYSVLDLKDAFFCLKLHPNSQPLFAFEWRDPEKGNTGQLTWTRLPQGFKNSPTLFNEALHRDLASFRALNPQVVMLQYVDDLLVAAPTYRDCKEGTRRLLQELSKLGYRVSAKKAQLCREEVTYLGYLLKGGKRWLTPARKATVMKIPTPTTPRQVREFLGKAGFCRLFIPGFASLAAPLYPLTRPKVPFTWTEAHQEAFGRIKEALLSAPALALPDLTKPFALYVDEKEGVARGVLTQTLGPWRRPVAYLSKKLDPVASGWPTCLKAIAAVALLLKDADKLTLGQNVLVIAPHNLESIVRQPPDRWMTNARMTHYQSLLLNERVSFAPPAILNPATLLPVESDDTPIHICSEILAEETGTRPDLRDQPLPGVPAWYTDGSSFIMDGRRQAGAAIVDNKRTVWASNLPEGTSAQKAELIALTQALRLAEGKSINIYTDSRYAFATAHVHGAIYKQRGWLTSAGKDIKNKEEILALLEAIHLPKRVAIIHCPGHQRGTDPVATGNRKADEAAKQAAQSTRILTETTKNAGKRTADGSEFEKRTADGSEFESPKKKAKVE

SEQ ID NO: 1778 - protein, 2237 aa, synthetic construct
MPAAKRVKLDGGDKKYSIGLDIGTNSVGWAVITDEYKVPSKKFKVLGNTDRHSIKKNLIGALLFDSGETAEATRLKRTARRRYTRRKNRICYLQEIFSNEMAKVDDSFFHRLEESFLVEEDKKHERHPIFGNIVDEVAYHEKYPTIYHLRKKLVDSTDKADLRLIYLALAHMIKFRGHFLIEGDLNPDNSDVDKLFIQLVQTYNQLFEENPINASGVDAKAILSARLSKSRRLENLIAQLPGEKKNGLFGNLIALSLGLTPNFKSNFDLAEDAKLQLSKDTYDDDLDNLLAQIGDQYADLFLAAKNLSDAILLSDILRVNTEITKAPLSASMIKRYDEHHQDLTLLKALVRQQLPEKYKEIFFDQSKNGYAGYIDGGASQEEFYKFIKPILEKMDGTEELLVKLNREDLLRKQRTFDNGSIPHQIHLGELHAILRRQEDFYPFLKDNREKIEKILTFRIPYYVGPLARGNSRFAWMTRKSEETITPWNFEEVVDKGASAQSFIERMTNFDKNLPNEKVLPKHSLLYEYFTVYNELTKVKYVTEGMRKPAFLSGEQKKAIVDLLFKTNRKVTVKQLKEDYFKKIECFDSVEISGVEDRFNASLGTYHDLLKIIKDKDFLDNEENEDILEDIVLTLTLFEDREMIEERLKTYAHLFDDKVMKQLKRRRYTGWGRLSRKLINGIRDKQSGKTILDFLKSDGFANRNFMQLIHDDSLTFKEDIQKAQVSGQGDSLHEHIANLAGSPAIKKGILQTVKVVDELVKVMGRHKPENIVIEMARENQTTQKGQKNSRERMKRIEEGIKELGSQILKEHPVENTQLQNEKLYLYYLQNGRDMYVDQELDINRLSDYDVDHIVPQSFLKDDSIDNKVLTRSDKARGKSDNVPSEEVVKKMKNYWRQLLNAKLITQRKFDNLTKAERGGLSELDKAGFIKRQLVETRQITKHVAQILDSRMNTKYDENDKLIREVKVITLKSKLVSDFRKDFQFYKVREINNYHHAHDAYLNAVVGTALIKKYPKLESEFVYGDYKVYDVRKMIAKSEQEIGKATAKYFFYSNIMNFFKTEITLANGEIRKRPLIETNGETGEIVWDKGRDFATVRKVLSMPQVNIVKKTEVQTGGFSKESILPKRNSDKLIARKKDWDPKKYGGFDSPTVAYSVLVVAKVEKGKSKKLKSVKELLGITIMERSSFEKNPIDFLEAKGYKEVKKDLIIKLPKYSLFELENGRKRMLASAGELQKGNELALPSKYVNFLYLASHYEKLKGSPEDNEQKQLFVEQHKHYLDEIIEQISEFSKRVILADANLDKVLSAYNKHRDKPIREQAENIIHLFTLTNLGAPAAFKYFDTTIDRKRYTSTKEVLDATLIHQSITGLYETRIDLSQLGGDGGEAAAKEAAAKEAAAKEAAAKEAAAKEAAAKGGTLGDQGSRGSDPLPEPRVTLTVEGIPTEFLVNTGAEHSVLTKPMGKMGSKRTVVAGATGSKVYPWTTKRLLKIGQKQVTHSFLVIPECPAPLLGRDLLTKLKAQIQFSTEGPQVTWEDRPAMCLVLNLEEEYRLHEKPVPPSIDPSWLQLFPMVWAEKAGMGLANQVPPVVVELKSDASPVAVRQYPMSKEAREGIRPHIQRFLDLGILVPCQSPWNTPLLPVKKPGTNDYRPVQDLREVNKRVQDIHPTVPNPYNLLSSLPPSHTWYSVLDLKDAFFCLKLHPNSQPLFAFEWRDPEKGNTGQLTWTRLPQGFKNSPTLFNEALHRDLASFRALNPQVVMLQYVDDLLVAAPTYRDCKEGTRRLLQELSKLGYRVSAKKAQLCREEVTYLGYLLKGGKRWLTPARKATVMKIPTPTTPRQVREFLGKAGFCRLFIPGFASLAAPLYPLTRPKVPFTWTEAHQEAFGRIKEALLSAPALALPDLTKPFALYVDEKEGVARGVLTQTLGPWRRPVAYLSKKLDPVASGWPTCLKAIAAVALLLKDADKLTLGQNVLVIAPHNLESIVRQPPDRWMTNARMTHYQSLLLNERVSFAPPAILNPATLLPVESDDTPIHICSEILAEETGTRPDLRDQPLPGVPAWYTDGSSFIMDGRRQAGAAIVDNKRTVWASNLPEGTSAQKAELIALTQALRLAEGKSINIYTDSRYAFATAHVHGAIYKQRGWLTSAGKDIKNKEEILALLEAIHLPKRVAIIHCPGHQRGTDPVATGNRKADEAAKQAAQSTRILTETTKNAGKRTADGSEFEKRTADGSEFESPKKKAKVE

SEQ ID NO: 1779 - protein, 2216 aa, synthetic construct
MPAAKRVKLDGGDKKYSIGLDIGTNSVGWAVITDEYKVPSKKFKVLGNTDRHSIKKNLIGALLFDSGETAEATRLKRTARRRYTRRKNRICYLQEIFSNEMAKVDDSFFHRLEESFLVEEDKKHERHPIFGNIVDEVAYHEKYPTIYHLRKKLVDSTDKADLRLIYLALAHMIKFRGHFLIEGDLNPDNSDVDKLFIQLVQTYNQLFEENPINASGVDAKAILSARLSKSRRLENLIAQLPGEKKNGLFGNLIALSLGLTPNFKSNFDLAEDAKLQLSKDTYDDDLDNLLAQIGDQYADLFLAAKNLSDAILLSDILRVNTEITKAPLSASMIKRYDEHHQDLTLLKALVRQQLPEKYKEIFFDQSKNGYAGYIDGGASQEEFYKFIKPILEKMDGTEELLVKLNREDLLRKQRTFDNGSIPHQIHLGELHAILRRQEDFYPFLKDNREKIEKILTFRIPYYVGPLARGNSRFAWMTRKSEETITPWNFEEVVDKGASAQSFIERMTNFDKNLPNEKVLPKHSLLYEYFTVYNELTKVKYVTEGMRKPAFLSGEQKKAIVDLLFKTNRKVTVKQLKEDYFKKIECFDSVEISGVEDRFNASLGTYHDLLKIIKDKDFLDNEENEDILEDIVLTLTLFEDREMIEERLKTYAHLFDDKVMKQLKRRRYTGWGRLSRKLINGIRDKQSGKTILDFLKSDGFANRNFMQLIHDDSLTFKEDIQKAQVSGQGDSLHEHIANLAGSPAIKKGILQTVKVVDELVKVMGRHKPENIVIEMARENQTTQKGQKNSRERMKRIEEGIKELGSQILKEHPVENTQLQNEKLYLYYLQNGRDMYVDQELDINRLSDYDVDHIVPQSFLKDDSIDNKVLTRSDKARGKSDNVPSEEVVKKMKNYWRQLLNAKLITQRKFDNLTKAERGGLSELDKAGFIKRQLVETRQITKHVAQILDSRMNTKYDENDKLIREVKVITLKSKLVSDFRKDFQFYKVREINNYHHAHDAYLNAVVGTALIKKYPKLESEFVYGDYKVYDVRKMIAKSEQEIGKATAKYFFYSNIMNFFKTEITLANGEIRKRPLIETNGETGEIVWDKGRDFATVRKVLSMPQVNIVKKTEVQTGGFSKESILPKRNSDKLIARKKDWDPKKYGGFDSPTVAYSVLVVAKVEKGKSKKLKSVKELLGITIMERSSFEKNPIDFLEAKGYKEVKKDLIIKLPKYSLFELENGRKRMLASAGELQKGNELALPSKYVNFLYLASHYEKLKGSPEDNEQKQLFVEQHKHYLDEIIEQISEFSKRVILADANLDKVLSAYNKHRDKPIREQAENIIHLFTLTNLGAPAAFKYFDTTIDRKRYTSTKEVLDATLIHQSITGLYETRIDLSQLGGDGGGGSPAPGGGGGTLGDQGSRGSDPLPEPRVTLTVEGIPTEFLVNTGAEHSVLTKPMGKMGSKRTVVAGATGSKVYPWTTKRLLKIGQKQVTHSFLVIPECPAPLLGRDLLTKLKAQIQFSTEGPQVTWEDRPAMCLVLNLEEEYRLHEKPVPPSIDPSWLQLFPMVWAEKAGMGLANQVPPVVVELKSDASPVAVRQYPMSKEAREGIRPHIQRFLDLGILVPCQSPWNTPLLPVKKPGTNDYRPVQDLREVNKRVQDIHPTVPNPYNLLSSLPPSHTWYSVLDLKDAFFCLKLHPNSQPLFAFEWRDPEKGNTGQLTWTRLPQGFKNSPTLFNEALHRDLASFRALNPQVVMLQYVDDLLVAAPTYRDCKEGTRRLLQELSKLGYRVSAKKAQLCREEVTYLGYLLKGGKRWLTPARKATVMKIPTPTTPRQVREFLGKAGFCRLFIPGFASLAAPLYPLTRPKVPFTWTEAHQEAFGRIKEALLSAPALALPDLTKPFALYVDEKEGVARGVLTQTLGPWRRPVAYLSKKLDPVASGWPTCLKAIAAVALLLKDADKLTLGQNVLVIAPHNLESIVRQPPDRWMTNARMTHYQSLLLNERVSFAPPAILNPATLLPVESDDTPIHICSEILAEETGTRPDLRDQPLPGVPAWYTDGSSFIMDGRRQAGAAIVDNKRTVWASNLPEGTSAQKAELIALTQALRLAEGKSINIYTDSRYAFATAHVHGAIYKQRGWLTSAGKDIKNKEEILALLEAIHLPKRVAIIHCPGHQRGTDPVATGNRKADEAAKQAAQSTRILTETTKNAGKRTADGSEFEKRTADGSEFESPKKKAKVE

SEQ ID NO: 1780 - protein, 2213 aa, synthetic construct
MPAAKRVKLDGGDKKYSIGLDIGTNSVGWAVITDEYKVPSKKFKVLGNTDRHSIKKNLIGALLFDSGETAEATRLKRTARRRYTRRKNRICYLQEIFSNEMAKVDDSFFHRLEESFLVEEDKKHERHPIFGNIVDEVAYHEKYPTIYHLRKKLVDSTDKADLRLIYLALAHMIKFRGHFLIEGDLNPDNSDVDKLFIQLVQTYNQLFEENPINASGVDAKAILSARLSKSRRLENLIAQLPGEKKNGLFGNLIALSLGLTPNFKSNFDLAEDAKLQLSKDTYDDDLDNLLAQIGDQYADLFLAAKNLSDAILLSDILRVNTEITKAPLSASMIKRYDEHHQDLTLLKALVRQQLPEKYKEIFFDQSKNGYAGYIDGGASQEEFYKFIKPILEKMDGTEELLVKLNREDLLRKQRTFDNGSIPHQIHLGELHAILRRQEDFYPFLKDNREKIEKILTFRIPYYVGPLARGNSRFAWMTRKSEETITPWNFEEVVDKGASAQSFIERMTNFDKNLPNEKVLPKHSLLYEYFTVYNELTKVKYVTEGMRKPAFLSGEQKKAIVDLLFKTNRKVTVKQLKEDYFKKIECFDSVEISGVEDRFNASLGTYHDLLKIIKDKDFLDNEENEDILEDIVLTLTLFEDREMIEERLKTYAHLFDDKVMKQLKRRRYTGWGRLSRKLINGIRDKQSGKTILDFLKSDGFANRNFMQLIHDDSLTFKEDIQKAQVSGQGDSLHEHIANLAGSPAIKKGILQTVKVVDELVKVMGRHKPENIVIEMARENQTTQKGQKNSRERMKRIEEGIKELGSQILKEHPVENTQLQNEKLYLYYLQNGRDMYVDQELDINRLSDYDVDHIVPQSFLKDDSIDNKVLTRSDKARGKSDNVPSEEVVKKMKNYWRQLLNAKLITQRKFDNLTKAERGGLSELDKAGFIKRQLVETRQITKHVAQILDSRMNTKYDENDKLIREVKVITLKSKLVSDFRKDFQFYKVREINNYHHAHDAYLNAVVGTALIKKYPKLESEFVYGDYKVYDVRKMIAKSEQEIGKATAKYFFYSNIMNFFKTEITLANGEIRKRPLIETNGETGEIVWDKGRDFATVRKVLSMPQVNIVKKTEVQTGGFSKESILPKRNSDKLIARKKDWDPKKYGGFDSPTVAYSVLVVAKVEKGKSKKLKSVKELLGITIMERSSFEKNPIDFLEAKGYKEVKKDLIIKLPKYSLFELENGRKRMLASAGELQKGNELALPSKYVNFLYLASHYEKLKGSPEDNEQKQLFVEQHKHYLDEIIEQISEFSKRVILADANLDKVLSAYNKHRDKPIREQAENIIHLFTLTNLGAPAAFKYFDTTIDRKRYTSTKEVLDATLIHQSITGLYETRIDLSQLGGDGGPAPGSSGGTLGDQGSRGSDPLPEPRVTLTVEGIPTEFLVNTGAEHSVLTKPMGKMGSKRTVVAGATGSKVYPWTTKRLLKIGQKQVTHSFLVIPECPAPLLGRDLLTKLKAQIQFSTEGPQVTWEDRPAMCLVLNLEEEYRLHEKPVPPSIDPSWLQLFPMVWAEKAGMGLANQVPPVVVELKSDASPVAVRQYPMSKEAREGIRPHIQRFLDLGILVPCQSPWNTPLLPVKKPGTNDYRPVQDLREVNKRVQDIHPTVPNPYNLLSSLPPSHTWYSVLDLKDAFFCLKLHPNSQPLFAFEWRDPEKGNTGQLTWTRLPQGFKNSPTLFNEALHRDLASFRALNPQVVMLQYVDDLLVAAPTYRDCKEGTRRLLQELSKLGYRVSAKKAQLCREEVTYLGYLLKGGKRWLTPARKATVMKIPTPTTPRQVREFLGKAGFCRLFIPGFASLAAPLYPLTRPKVPFTWTEAHQEAFGRIKEALLSAPALALPDLTKPFALYVDEKEGVARGVLTQTLGPWRRPVAYLSKKLDPVASGWPTCLKAIAAVALLLKDADKLTLGQNVLVIAPHNLESIVRQPPDRWMTNARMTHYQSLLLNERVSFAPPAILNPATLLPVESDDTPIHICSEILAEETGTRPDLRDQPLPGVPAWYTDGSSFIMDGRRQAGAAIVDNKRTVWASNLPEGTSAQKAELIALTQALRLAEGKSINIYTDSRYAFATAHVHGAIYKQRGWLTSAGKDIKNKEEILALLEAIHLPKRVAIIHCPGHQRGTDPVATGNRKADEAAKQAAQSTRILTETTKNAGKRTADGSEFEKRTADGSEFESPKKKAKVE

SEQ ID NO: 1781 - protein, 2222 aa, synthetic construct
MPAAKRVKLDGGDKKYSIGLDIGTNSVGWAVITDEYKVPSKKFKVLGNTDRHSIKKNLIGALLFDSGETAEATRLKRTARRRYTRRKNRICYLQEIFSNEMAKVDDSFFHRLEESFLVEEDKKHERHPIFGNIVDEVAYHEKYPTIYHLRKKLVDSTDKADLRLIYLALAHMIKFRGHFLIEGDLNPDNSDVDKLFIQLVQTYNQLFEENPINASGVDAKAILSARLSKSRRLENLIAQLPGEKKNGLFGNLIALSLGLTPNFKSNFDLAEDAKLQLSKDTYDDDLDNLLAQIGDQYADLFLAAKNLSDAILLSDILRVNTEITKAPLSASMIKRYDEHHQDLTLLKALVRQQLPEKYKEIFFDQSKNGYAGYIDGGASQEEFYKFIKPILEKMDGTEELLVKLNREDLLRKQRTFDNGSIPHQIHLGELHAILRRQEDFYPFLKDNREKIEKILTFRIPYYVGPLARGNSRFAWMTRKSEETITPWNFEEVVDKGASAQSFIERMTNFDKNLPNEKVLPKHSLLYEYFTVYNELTKVKYVTEGMRKPAFLSGEQKKAIVDLLFKTNRKVTVKQLKEDYFKKIECFDSVEISGVEDRFNASLGTYHDLLKIIKDKDFLDNEENEDILEDIVLTLTLFEDREMIEERLKTYAHLFDDKVMKQLKRRRYTGWGRLSRKLINGIRDKQSGKTILDFLKSDGFANRNFMQLIHDDSLTFKEDIQKAQVSGQGDSLHEHIANLAGSPAIKKGILQTVKVVDELVKVMGRHKPENIVIEMARENQTTQKGQKNSRERMKRIEEGIKELGSQILKEHPVENTQLQNEKLYLYYLQNGRDMYVDQELDINRLSDYDVDHIVPQSFLKDDSIDNKVLTRSDKARGKSDNVPSEEVVKKMKNYWRQLLNAKLITQRKFDNLTKAERGGLSELDKAGFIKRQLVETRQITKHVAQILDSRMNTKYDENDKLIREVKVITLKSKLVSDFRKDFQFYKVREINNYHHAHDAYLNAVVGTALIKKYPKLESEFVYGDYKVYDVRKMIAKSEQEIGKATAKYFFYSNIMNFFKTEITLANGEIRKRPLIETNGETGEIVWDKGRDFATVRKVLSMPQVNIVKKTEVQTGGFSKESILPKRNSDKLIARKKDWDPKKYGGFDSPTVAYSVLVVAKVEKGKSKKLKSVKELLGITIMERSSFEKNPIDFLEAKGYKEVKKDLIIKLPKYSLFELENGRKRMLASAGELQKGNELALPSKYVNFLYLASHYEKLKGSPEDNEQKQLFVEQHKHYLDEIIEQISEFSKRVILADANLDKVLSAYNKHRDKPIREQAENIIHLFTLTNLGAPAAFKYFDTTIDRKRYTSTKEVLDATLIHQSITGLYETRIDLSQLGGDGGEAAAKGGGGSEAAAKGGTLGDQGSRGSDPLPEPRVTLTVEGIPTEFLVNTGAEHSVLTKPMGKMGSKRTVVAGATGSKVYPWTTKRLLKIGQKQVTHSFLVIPECPAPLLGRDLLTKLKAQIQFSTEGPQVTWEDRPAMCLVLNLEEEYRLHEKPVPPSIDPSWLQLFPMVWAEKAGMGLANQVPPVVVELKSDASPVAVRQYPMSKEAREGIRPHIQRFLDLGILVPCQSPWNTPLLPVKKPGTNDYRPVQDLREVNKRVQDIHPTVPNPYNLLSSLPPSHTWYSVLDLKDAFFCLKLHPNSQPLFAFEWRDPEKGNTGQLTWTRLPQGFKNSPTLFNEALHRDLASFRALNPQVVMLQYVDDLLVAAPTYRDCKEGTRRLLQELSKLGYRVSAKKAQLCREEVTYLGYLLKGGKRWLTPARKATVMKIPTPTTPRQVREFLGKAGFCRLFIPGFASLAAPLYPLTRPKVPFTWTEAHQEAFGRIKEALLSAPALALPDLTKPFALYVDEKEGVARGVLTQTLGPWRRPVAYLSKKLDPVASGWPTCLKAIAAVALLLKDADKLTLGQNVLVIAPHNLESIVRQPPDRWMTNARMTHYQSLLLNERVSFAPPAILNPATLLPVESDDTPIHICSEILAEETGTRPDLRDQPLPGVPAWYTDGSSFIMDGRRQAGAAIVDNKRTVWASNLPEGTSAQKAELIALTQALRLAEGKSINIYTDSRYAFATAHVHGAIYKQRGWLTSAGKDIKNKEEILALLEAIHLPKRVAIIHCPGHQRGTDPVATGNRKADEAAKQAAQSTRILTETTKNAGKRTADGSEFEKRTADGSEFESPKKKAKVE

SEQ ID NO: 1782 - protein, 2219 aa, synthetic construct
MPAAKRVKLDGGDKKYSIGLDIGTNSVGWAVITDEYKVPSKKFKVLGNTDRHSIKKNLIGALLFDSGETAEATRLKRTARRRYTRRKNRICYLQEIFSNEMAKVDDSFFHRLEESFLVEEDKKHERHPIFGNIVDEVAYHEKYPTIYHLRKKLVDSTDKADLRLIYLALAHMIKFRGHFLIEGDLNPDNSDVDKLFIQLVQTYNQLFEENPINASGVDAKAILSARLSKSRRLENLIAQLPGEKKNGLFGNLIALSLGLTPNFKSNFDLAEDAKLQLSKDTYDDDLDNLLAQIGDQYADLFLAAKNLSDAILLSDILRVNTEITKAPLSASMIKRYDEHHQDLTLLKALVRQQLPEKYKEIFFDQSKNGYAGYIDGGASQEEFYKFIKPILEKMDGTEELLVKLNREDLLRKQRTFDNGSIPHQIHLGELHAILRRQEDFYPFLKDNREKIEKILTFRIPYYVGPLARGNSRFAWMTRKSEETITPWNFEEVVDKGASAQSFIERMTNFDKNLPNEKVLPKHSLLYEYFTVYNELTKVKYVTEGMRKPAFLSGEQKKAIVDLLFKTNRKVTVKQLKEDYFKKIECFDSVEISGVEDRFNASLGTYHDLLKIIKDKDFLDNEENEDILEDIVLTLTLFEDREMIEERLKTYAHLFDDKVMKQLKRRRYTGWGRLSRKLINGIRDKQSGKTILDFLKSDGFANRNFMQLIHDDSLTFKEDIQKAQVSGQGDSLHEHIANLAGSPAIKKGILQTVKVVDELVKVMGRHKPENIVIEMARENQTTQKGQKNSRERMKRIEEGIKELGSQILKEHPVENTQLQNEKLYLYYLQNGRDMYVDQELDINRLSDYDVDHIVPQSFLKDDSIDNKVLTRSDKARGKSDNVPSEEVVKKMKNYWRQLLNAKLITQRKFDNLTKAERGGLSELDKAGFIKRQLVETRQITKHVAQILDSRMNTKYDENDKLIREVKVITLKSKLVSDFRKDFQFYKVREINNYHHAHDAYLNAVVGTALIKKYPKLESEFVYGDYKVYDVRKMIAKSEQEIGKATAKYFFYSNIMNFFKTEITLANGEIRKRPLIETNGETGEIVWDKGRDFATVRKVLSMPQVNIVKKTEVQTGGFSKESILPKRNSDKLIARKKDWDPKKYGGFDSPTVAYSVLVVAKVEKGKSKKLKSVKELLGITIMERSSFEKNPIDFLEAKGYKEVKKDLIIKLPKYSLFELENGRKRMLASAGELQKGNELALPSKYVNFLYLASHYEKLKGSPEDNEQKQLFVEQHKHYLDEIIEQISEFSKRVILADANLDKVLSAYNKHRDKPIREQAENIIHLFTLTNLGAPAAFKYFDTTIDRKRYTSTKEVLDATLIHQSITGLYETRIDLSQLGGDGGGSAGSAAGSGEFGGTLGDQGSRGSDPLPEPRVTLTVEGIPTEFLVNTGAEHSVLTKPMGKMGSKRTVVAGATGSKVYPWTTKRLLKIGQKQVTHSFLVIPECPAPLLGRDLLTKLKAQIQFSTEGPQVTWEDRPAMCLVLNLEEEYRLHEKPVPPSIDPSWLQLFPMVWAEKAGMGLANQVPPVVVELKSDASPVAVRQYPMSKEAREGIRPHIQRFLDLGILVPCQSPWNTPLLPVKKPGTNDYRPVQDLREVNKRVQDIHPTVPNPYNLLSSLPPSHTWYSVLDLKDAFFCLKLHPNSQPLFAFEWRDPEKGNTGQLTWTRLPQGFKNSPTLFNEALHRDLASFRALNPQVVMLQYVDDLLVAAPTYRDCKEGTRRLLQELSKLGYRVSAKKAQLCREEVTYLGYLLKGGKRWLTPARKATVMKIPTPTTPRQVREFLGKAGFCRLFIPGFASLAAPLYPLTRPKVPFTWTEAHQEAFGRIKEALLSAPALALPDLTKPFALYVDEKEGVARGVLTQTLGPWRRPVAYLSKKLDPVASGWPTCLKAIAAVALLLKDADKLTLGQNVLVIAPHNLESIVRQPPDRWMTNARMTHYQSLLLNERVSFAPPAILNPATLLPVESDDTPIHICSEILAEETGTRPDLRDQPLPGVPAWYTDGSSFIMDGRRQAGAAIVDNKRTVWASNLPEGTSAQKAELIALTQALRLAEGKSINIYTDSRYAFATAHVHGAIYKQRGWLTSAGKDIKNKEEILALLEAIHLPKRVAIIHCPGHQRGTDPVATGNRKADEAAKQAAQSTRILTETTKNAGKRTADGSEFEKRTADGSEFESPKKKAKVE

SEQ ID NO: 1783 - protein, 2218 aa, synthetic construct
MPAAKRVKLDGGDKKYSIGLDIGTNSVGWAVITDEYKVPSKKFKVLGNTDRHSIKKNLIGALLFDSGETAEATRLKRTARRRYTRRKNRICYLQEIFSNEMAKVDDSFFHRLEESFLVEEDKKHERHPIFGNIVDEVAYHEKYPTIYHLRKKLVDSTDKADLRLIYLALAHMIKFRGHFLIEGDLNPDNSDVDKLFIQLVQTYNQLFEENPINASGVDAKAILSARLSKSRRLENLIAQLPGEKKNGLFGNLIALSLGLTPNFKSNFDLAEDAKLQLSKDTYDDDLDNLLAQIGDQYADLFLAAKNLSDAILLSDILRVNTEITKAPLSASMIKRYDEHHQDLTLLKALVRQQLPEKYKEIFFDQSKNGYAGYIDGGASQEEFYKFIKPILEKMDGTEELLVKLNREDLLRKQRTFDNGSIPHQIHLGELHAILRRQEDFYPFLKDNREKIEKILTFRIPYYVGPLARGNSRFAWMTRKSEETITPWNFEEVVDKGASAQSFIERMTNFDKNLPNEKVLPKHSLLYEYFTVYNELTKVKYVTEGMRKPAFLSGEQKKAIVDLLFKTNRKVTVKQLKEDYFKKIECFDSVEISGVEDRFNASLGTYHDLLKIIKDKDFLDNEENEDILEDIVLTLTLFEDREMIEERLKTYAHLFDDKVMKQLKRRRYTGWGRLSRKLINGIRDKQSGKTILDFLKSDGFANRNFMQLIHDDSLTFKEDIQKAQVSGQGDSLHEHIANLAGSPAIKKGILQTVKVVDELVKVMGRHKPENIVIEMARENQTTQKGQKNSRERMKRIEEGIKELGSQILKEHPVENTQLQNEKLYLYYLQNGRDMYVDQELDINRLSDYDVDHIVPQSFLKDDSIDNKVLTRSDKARGKSDNVPSEEVVKKMKNYWRQLLNAKLITQRKFDNLTKAERGGLSELDKAGFIKRQLVETRQITKHVAQILDSRMNTKYDENDKLIREVKVITLKSKLVSDFRKDFQFYKVREINNYHHAHDAYLNAVVGTALIKKYPKLESEFVYGDYKVYDVRKMIAKSEQEIGKATAKYFFYSNIMNFFKTEITLANGEIRKRPLIETNGETGEIVWDKGRDFATVRKVLSMPQVNIVKKTEVQTGGFSKESILPKRNSDKLIARKKDWDPKKYGGFDSPTVAYSVLVVAKVEKGKSKKLKSVKELLGITIMERSSFEKNPIDFLEAKGYKEVKKDLIIKLPKYSLFELENGRKRMLASAGELQKGNELALPSKYVNFLYLASHYEKLKGSPEDNEQKQLFVEQHKHYLDEIIEQISEFSKRVILADANLDKVLSAYNKHRDKPIREQAENIIHLFTLTNLGAPAAFKYFDTTIDRKRYTSTKEVLDATLIHQSITGLYETRIDLSQLGGDGGPAPAPAPAPAPGGTLGDQGSRGSDPLPEPRVTLTVEGIPTEFLVNTGAEHSVLTKPMGKMGSKRTVVAGATGSKVYPWTTKRLLKIGQKQVTHSFLVIPECPAPLLGRDLLTKLKAQIQFSTEGPQVTWEDRPAMCLVLNLEEEYRLHEKPVPPSIDPSWLQLFPMVWAEKAGMGLANQVPPVVVELKSDASPVAVRQYPMSKEAREGIRPHIQRFLDLGILVPCQSPWNTPLLPVKKPGTNDYRPVQDLREVNKRVQDIHPTVPNPYNLLSSLPPSHTWYSVLDLKDAFFCLKLHPNSQPLFAFEWRDPEKGNTGQLTWTRLPQGFKNSPTLFNEALHRDLASFRALNPQVVMLQYVDDLLVAAPTYRDCKEGTRRLLQELSKLGYRVSAKKAQLCREEVTYLGYLLKGGKRWLTPARKATVMKIPTPTTPRQVREFLGKAGFCRLFIPGFASLAAPLYPLTRPKVPFTWTEAHQEAFGRIKEALLSAPALALPDLTKPFALYVDEKEGVARGVLTQTLGPWRRPVAYLSKKLDPVASGWPTCLKAIAAVALLLKDADKLTLGQNVLVIAPHNLESIVRQPPDRWMTNARMTHYQSLLLNERVSFAPPAILNPATLLPVESDDTPIHICSEILAEETGTRPDLRDQPLPGVPAWYTDGSSFIMDGRRQAGAAIVDNKRTVWASNLPEGTSAQKAELIALTQALRLAEGKSINIYTDSRYAFATAHVHGAIYKQRGWLTSAGKDIKNKEEILALLEAIHLPKRVAIIHCPGHQRGTDPVATGNRKADEAAKQAAQSTRILTETTKNAGKRTADGSEFEKRTADGSEFESPKKKAKVE

SEQ ID NO: 1784 - protein, 2253 aa, synthetic construct
MPAAKRVKLDGGDKKYSIGLDIGTNSVGWAVITDEYKVPSKKFKVLGNTDRHSIKKNLIGALLFDSGETAEATRLKRTARRRYTRRKNRICYLQEIFSNEMAKVDDSFFHRLEESFLVEEDKKHERHPIFGNIVDEVAYHEKYPTIYHLRKKLVDSTDKADLRLIYLALAHMIKFRGHFLIEGDLNPDNSDVDKLFIQLVQTYNQLFEENPINASGVDAKAILSARLSKSRRLENLIAQLPGEKKNGLFGNLIALSLGLTPNFKSNFDLAEDAKLQLSKDTYDDDLDNLLAQIGDQYADLFLAAKNLSDAILLSDILRVNTEITKAPLSASMIKRYDEHHQDLTLLKALVRQQLPEKYKEIFFDQSKNGYAGYIDGGASQEEFYKFIKPILEKMDGTEELLVKLNREDLLRKQRTFDNGSIPHQIHLGELHAILRRQEDFYPFLKDNREKIEKILTFRIPYYVGPLARGNSRFAWMTRKSEETITPWNFEEVVDKGASAQSFIERMTNFDKNLPNEKVLPKHSLLYEYFTVYNELTKVKYVTEGMRKPAFLSGEQKKAIVDLLFKTNRKVTVKQLKEDYFKKIECFDSVEISGVEDRFNASLGTYHDLLKIIKDKDFLDNEENEDILEDIVLTLTLFEDREMIEERLKTYAHLFDDKVMKQLKRRRYTGWGRLSRKLINGIRDKQSGKTILDFLKSDGFANRNFMQLIHDDSLTFKEDIQKAQVSGQGDSLHEHIANLAGSPAIKKGILQTVKVVDELVKVMGRHKPENIVIEMARENQTTQKGQKNSRERMKRIEEGIKELGSQILKEHPVENTQLQNEKLYLYYLQNGRDMYVDQELDINRLSDYDVDHIVPQSFLKDDSIDNKVLTRSDKARGKSDNVPSEEVVKKMKNYWRQLLNAKLITQRKFDNLTKAERGGLSELDKAGFIKRQLVETRQITKHVAQILDSRMNTKYDENDKLIREVKVITLKSKLVSDFRKDFQFYKVREINNYHHAHDAYLNAVVGTALIKKYPKLESEFVYGDYKVYDVRKMIAKSEQEIGKATAKYFFYSNIMNFFKTEITLANGEIRKRPLIETNGETGEIVWDKGRDFATVRKVLSMPQVNIVKKTEVQTGGFSKESILPKRNSDKLIARKKDWDPKKYGGFDSPTVAYSVLVVAKVEKGKSKKLKSVKELLGITIMERSSFEKNPIDFLEAKGYKEVKKDLIIKLPKYSLFELENGRKRMLASAGELQKGNELALPSKYVNFLYLASHYEKLKGSPEDNEQKQLFVEQHKHYLDEIIEQISEFSKRVILADANLDKVLSAYNKHRDKPIREQAENIIHLFTLTNLGAPAAFKYFDTTIDRKRYTSTKEVLDATLIHQSITGLYETRIDLSQLGGDGGAEAAAKEAAAKEAAAKEAAAKALEAEAAAKEAAAKEAAAKEAAAKAGGTLGDQGSRGSDPLPEPRVTLTVEGIPTEFLVNTGAEHSVLTKPMGKMGSKRTVVAGATGSKVYPWTTKRLLKIGQKQVTHSFLVIPECPAPLLGRDLLTKLKAQIQFSTEGPQVTWEDRPAMCLVLNLEEEYRLHEKPVPPSIDPSWLQLFPMVWAEKAGMGLANQVPPVVVELKSDASPVAVRQYPMSKEAREGIRPHIQRFLDLGILVPCQSPWNTPLLPVKKPGTNDYRPVQDLREVNKRVQDIHPTVPNPYNLLSSLPPSHTWYSVLDLKDAFFCLKLHPNSQPLFAFEWRDPEKGNTGQLTWTRLPQGFKNSPTLFNEALHRDLASFRALNPQVVMLQYVDDLLVAAPTYRDCKEGTRRLLQELSKLGYRVSAKKAQLCREEVTYLGYLLKGGKRWLTPARKATVMKIPTPTTPRQVREFLGKAGFCRLFIPGFASLAAPLYPLTRPKVPFTWTEAHQEAFGRIKEALLSAPALALPDLTKPFALYVDEKEGVARGVLTQTLGPWRRPVAYLSKKLDPVASGWPTCLKAIAAVALLLKDADKLTLGQNVLVIAPHNLESIVRQPPDRWMTNARMTHYQSLLLNERVSFAPPAILNPATLLPVESDDTPIHICSEILAEETGTRPDLRDQPLPGVPAWYTDGSSFIMDGRRQAGAAIVDNKRTVWASNLPEGTSAQKAELIALTQALRLAEGKSINIYTDSRYAFATAHVHGAIYKQRGWLTSAGKDIKNKEEILALLEAIHLPKRVAIIHCPGHQRGTDPVATGNRKADEAAKQAAQSTRILTETTKNAGKRTADGSEFEKRTADGSEFESPKKKAKVE

SEQ ID NO: 1785 - protein, 2216 aa, synthetic construct
MPAAKRVKLDGGDKKYSIGLDIGTNSVGWAVITDEYKVPSKKFKVLGNTDRHSIKKNLIGALLFDSGETAEATRLKRTARRRYTRRKNRICYLQEIFSNEMAKVDDSFFHRLEESFLVEEDKKHERHPIFGNIVDEVAYHEKYPTIYHLRKKLVDSTDKADLRLIYLALAHMIKFRGHFLIEGDLNPDNSDVDKLFIQLVQTYNQLFEENPINASGVDAKAILSARLSKSRRLENLIAQLPGEKKNGLFGNLIALSLGLTPNFKSNFDLAEDAKLQLSKDTYDDDLDNLLAQIGDQYADLFLAAKNLSDAILLSDILRVNTEITKAPLSASMIKRYDEHHQDLTLLKALVRQQLPEKYKEIFFDQSKNGYAGYIDGGASQEEFYKFIKPILEKMDGTEELLVKLNREDLLRKQRTFDNGSIPHQIHLGELHAILRRQEDFYPFLKDNREKIEKILTFRIPYYVGPLARGNSRFAWMTRKSEETITPWNFEEVVDKGASAQSFIERMTNFDKNLPNEKVLPKHSLLYEYFTVYNELTKVKYVTEGMRKPAFLSGEQKKAIVDLLFKTNRKVTVKQLKEDYFKKIECFDSVEISGVEDRFNASLGTYHDLLKIIKDKDFLDNEENEDILEDIVLTLTLFEDREMIEERLKTYAHLFDDKVMKQLKRRRYTGWGRLSRKLINGIRDKQSGKTILDFLKSDGFANRNFMQLIHDDSLTFKEDIQKAQVSGQGDSLHEHIANLAGSPAIKKGILQTVKVVDELVKVMGRHKPENIVIEMARENQTTQKGQKNSRERMKRIEEGIKELGSQILKEHPVENTQLQNEKLYLYYLQNGRDMYVDQELDINRLSDYDVDHIVPQSFLKDDSIDNKVLTRSDKARGKSDNVPSEEVVKKMKNYWRQLLNAKLITQRKFDNLTKAERGGLSELDKAGFIKRQLVETRQITKHVAQILDSRMNTKYDENDKLIREVKVITLKSKLVSDFRKDFQFYKVREINNYHHAHDAYLNAVVGTALIKKYPKLESEFVYGDYKVYDVRKMIAKSEQEIGKATAKYFFYSNIMNFFKTEITLANGEIRKRPLIETNGETGEIVWDKGRDFATVRKVLSMPQVNIVKKTEVQTGGFSKESILPKRNSDKLIARKKDWDPKKYGGFDSPTVAYSVLVVAKVEKGKSKKLKSVKELLGITIMERSSFEKNPIDFLEAKGYKEVKKDLIIKLPKYSLFELENGRKRMLASAGELQKGNELALPSKYVNFLYLASHYEKLKGSPEDNEQKQLFVEQHKHYLDEIIEQISEFSKRVILADANLDKVLSAYNKHRDKPIREQAENIIHLFTLTNLGAPAAFKYFDTTIDRKRYTSTKEVLDATLIHQSITGLYETRIDLSQLGGDGGGGSGSSGGGGGTLGDQGSRGSDPLPEPRVTLTVEGIPTEFLVNTGAEHSVLTKPMGKMGSKRTVVAGATGSKVYPWTTKRLLKIGQKQVTHSFLVIPECPAPLLGRDLLTKLKAQIQFSTEGPQVTWEDRPAMCLVLNLEEEYRLHEKPVPPSIDPSWLQLFPMVWAEKAGMGLANQVPPVVVELKSDASPVAVRQYPMSKEAREGIRPHIQRFLDLGILVPCQSPWNTPLLPVKKPGTNDYRPVQDLREVNKRVQDIHPTVPNPYNLLSSLPPSHTWYSVLDLKDAFFCLKLHPNSQPLFAFEWRDPEKGNTGQLTWTRLPQGFKNSPTLFNEALHRDLASFRALNPQVVMLQYVDDLLVAAPTYRDCKEGTRRLLQELSKLGYRVSAKKAQLCREEVTYLGYLLKGGKRWLTPARKATVMKIPTPTTPRQVREFLGKAGFCRLFIPGFASLAAPLYPLTRPKVPFTWTEAHQEAFGRIKEALLSAPALALPDLTKPFALYVDEKEGVARGVLTQTLGPWRRPVAYLSKKLDPVASGWPTCLKAIAAVALLLKDADKLTLGQNVLVIAPHNLESIVRQPPDRWMTNARMTHYQSLLLNERVSFAPPAILNPATLLPVESDDTPIHICSEILAEETGTRPDLRDQPLPGVPAWYTDGSSFIMDGRRQAGAAIVDNKRTVWASNLPEGTSAQKAELIALTQALRLAEGKSINIYTDSRYAFATAHVHGAIYKQRGWLTSAGKDIKNKEEILALLEAIHLPKRVAIIHCPGHQRGTDPVATGNRKADEAAKQAAQSTRILTETTKNAGKRTADGSEFEKRTADGSEFESPKKKAKVE

SEQ ID NO: 1786 - protein, 2218 aa, synthetic construct
MPAAKRVKLDGGDKKYSIGLDIGTNSVGWAVITDEYKVPSKKFKVLGNTDRHSIKKNLIGALLFDSGETAEATRLKRTARRRYTRRKNRICYLQEIFSNEMAKVDDSFFHRLEESFLVEEDKKHERHPIFGNIVDEVAYHEKYPTIYHLRKKLVDSTDKADLRLIYLALAHMIKFRGHFLIEGDLNPDNSDVDKLFIQLVQTYNQLFEENPINASGVDAKAILSARLSKSRRLENLIAQLPGEKKNGLFGNLIALSLGLTPNFKSNFDLAEDAKLQLSKDTYDDDLDNLLAQIGDQYADLFLAAKNLSDAILLSDILRVNTEITKAPLSASMIKRYDEHHQDLTLLKALVRQQLPEKYKEIFFDQSKNGYAGYIDGGASQEEFYKFIKPILEKMDGTEELLVKLNREDLLRKQRTFDNGSIPHQIHLGELHAILRRQEDFYPFLKDNREKIEKILTFRIPYYVGPLARGNSRFAWMTRKSEETITPWNFEEVVDKGASAQSFIERMTNFDKNLPNEKVLPKHSLLYEYFTVYNELTKVKYVTEGMRKPAFLSGEQKKAIVDLLFKTNRKVTVKQLKEDYFKKIECFDSVEISGVEDRFNASLGTYHDLLKIIKDKDFLDNEENEDILEDIVLTLTLFEDREMIEERLKTYAHLFDDKVMKQLKRRRYTGWGRLSRKLINGIRDKQSGKTILDFLKSDGFANRNFMQLIHDDSLTFKEDIQKAQVSGQGDSLHEHIANLAGSPAIKKGILQTVKVVDELVKVMGRHKPENIVIEMARENQTTQKGQKNSRERMKRIEEGIKELGSQILKEHPVENTQLQNEKLYLYYLQNGRDMYVDQELDINRLSDYDVDHIVPQSFLKDDSIDNKVLTRSDKARGKSDNVPSEEVVKKMKNYWRQLLNAKLITQRKFDNLTKAERGGLSELDKAGFIKRQLVETRQITKHVAQILDSRMNTKYDENDKLIREVKVITLKSKLVSDFRKDFQFYKVREINNYHHAHDAYLNAVVGTALIKKYPKLESEFVYGDYKVYDVRKMIAKSEQEIGKATAKYFFYSNIMNFFKTEITLANGEIRKRPLIETNGETGEIVWDKGRDFATVRKVLSMPQVNIVKKTEVQTGGFSKESILPKRNSDKLIARKKDWDPKKYGGFDSPTVAYSVLVVAKVEKGKSKKLKSVKELLGITIMERSSFEKNPIDFLEAKGYKEVKKDLIIKLPKYSLFELENGRKRMLASAGELQKGNELALPSKYVNFLYLASHYEKLKGSPEDNEQKQLFVEQHKHYLDEIIEQISEFSKRVILADANLDKVLSAYNKHRDKPIREQAENIIHLFTLTNLGAPAAFKYFDTTIDRKRYTSTKEVLDATLIHQSITGLYETRIDLSQLGGDGGEAAAKPAPGGSGGTLGDQGSRGSDPLPEPRVTLTVEGIPTEFLVNTGAEHSVLTKPMGKMGSKRTVVAGATGSKVYPWTTKRLLKIGQKQVTHSFLVIPECPAPLLGRDLLTKLKAQIQFSTEGPQVTWEDRPAMCLVLNLEEEYRLHEKPVPPSIDPSWLQLFPMVWAEKAGMGLANQVPPVVVELKSDASPVAVRQYPMSKEAREGIRPHIQRFLDLGILVPCQSPWNTPLLPVKKPGTNDYRPVQDLREVNKRVQDIHPTVPNPYNLLSSLPPSHTWYSVLDLKDAFFCLKLHPNSQPLFAFEWRDPEKGNTGQLTWTRLPQGFKNSPTLFNEALHRDLASFRALNPQVVMLQYVDDLLVAAPTYRDCKEGTRRLLQELSKLGYRVSAKKAQLCREEVTYLGYLLKGGKRWLTPARKATVMKIPTPTTPRQVREFLGKAGFCRLFIPGFASLAAPLYPLTRPKVPFTWTEAHQEAFGRIKEALLSAPALALPDLTKPFALYVDEKEGVARGVLTQTLGPWRRPVAYLSKKLDPVASGWPTCLKAIAAVALLLKDADKLTLGQNVLVIAPHNLESIVRQPPDRWMTNARMTHYQSLLLNERVSFAPPAILNPATLLPVESDDTPIHICSEILAEETGTRPDLRDQPLPGVPAWYTDGSSFIMDGRRQAGAAIVDNKRTVWASNLPEGTSAQKAELIALTQALRLAEGKSINIYTDSRYAFATAHVHGAIYKQRGWLTSAGKDIKNKEEILALLEAIHLPKRVAIIHCPGHQRGTDPVATGNRKADEAAKQAAQSTRILTETTKNAGKRTADGSEFEKRTADGSEFESPKKKAKVE

SEQ ID NO: 1787 - protein, 2218 aa, synthetic construct
MPAAKRVKLDGGDKKYSIGLDIGTNSVGWAVITDEYKVPSKKFKVLGNTDRHSIKKNLIGALLFDSGETAEATRLKRTARRRYTRRKNRICYLQEIFSNEMAKVDDSFFHRLEESFLVEEDKKHERHPIFGNIVDEVAYHEKYPTIYHLRKKLVDSTDKADLRLIYLALAHMIKFRGHFLIEGDLNPDNSDVDKLFIQLVQTYNQLFEENPINASGVDAKAILSARLSKSRRLENLIAQLPGEKKNGLFGNLIALSLGLTPNFKSNFDLAEDAKLQLSKDTYDDDLDNLLAQIGDQYADLFLAAKNLSDAILLSDILRVNTEITKAPLSASMIKRYDEHHQDLTLLKALVRQQLPEKYKEIFFDQSKNGYAGYIDGGASQEEFYKFIKPILEKMDGTEELLVKLNREDLLRKQRTFDNGSIPHQIHLGELHAILRRQEDFYPFLKDNREKIEKILTFRIPYYVGPLARGNSRFAWMTRKSEETITPWNFEEVVDKGASAQSFIERMTNFDKNLPNEKVLPKHSLLYEYFTVYNELTKVKYVTEGMRKPAFLSGEQKKAIVDLLFKTNRKVTVKQLKEDYFKKIECFDSVEISGVEDRFNASLGTYHDLLKIIKDKDFLDNEENEDILEDIVLTLTLFEDREMIEERLKTYAHLFDDKVMKQLKRRRYTGWGRLSRKLINGIRDKQSGKTILDFLKSDGFANRNFMQLIHDDSLTFKEDIQKAQVSGQGDSLHEHIANLAGSPAIKKGILQTVKVVDELVKVMGRHKPENIVIEMARENQTTQKGQKNSRERMKRIEEGIKELGSQILKEHPVENTQLQNEKLYLYYLQNGRDMYVDQELDINRLSDYDVDHIVPQSFLKDDSIDNKVLTRSDKARGKSDNVPSEEVVKKMKNYWRQLLNAKLITQRKFDNLTKAERGGLSELDKAGFIKRQLVETRQITKHVAQILDSRMNTKYDENDKLIREVKVITLKSKLVSDFRKDFQFYKVREINNYHHAHDAYLNAVVGTALIKKYPKLESEFVYGDYKVYDVRKMIAKSEQEIGKATAKYFFYSNIMNFFKTEITLANGEIRKRPLIETNGETGEIVWDKGRDFATVRKVLSMPQVNIVKKTEVQTGGFSKESILPKRNSDKLIARKKDWDPKKYGGFDSPTVAYSVLVVAKVEKGKSKKLKSVKELLGITIMERSSFEKNPIDFLEAKGYKEVKKDLIIKLPKYSLFELENGRKRMLASAGELQKGNELALPSKYVNFLYLASHYEKLKGSPEDNEQKQLFVEQHKHYLDEIIEQISEFSKRVILADANLDKVLSAYNKHRDKPIREQAENIIHLFTLTNLGAPAAFKYFDTTIDRKRYTSTKEVLDATLIHQSITGLYETRIDLSQLGGDGGGGSPAPEAAAKGGTLGDQGSRGSDPLPEPRVTLTVEGIPTEFLVNTGAEHSVLTKPMGKMGSKRTVVAGATGSKVYPWTTKRLLKIGQKQVTHSFLVIPECPAPLLGRDLLTKLKAQIQFSTEGPQVTWEDRPAMCLVLNLEEEYRLHEKPVPPSIDPSWLQLFPMVWAEKAGMGLANQVPPVVVELKSDASPVAVRQYPMSKEAREGIRPHIQRFLDLGILVPCQSPWNTPLLPVKKPGTNDYRPVQDLREVNKRVQDIHPTVPNPYNLLSSLPPSHTWYSVLDLKDAFFCLKLHPNSQPLFAFEWRDPEKGNTGQLTWTRLPQGFKNSPTLFNEALHRDLASFRALNPQVVMLQYVDDLLVAAPTYRDCKEGTRRLLQELSKLGYRVSAKKAQLCREEVTYLGYLLKGGKRWLTPARKATVMKIPTPTTPRQVREFLGKAGFCRLFIPGFASLAAPLYPLTRPKVPFTWTEAHQEAFGRIKEALLSAPALALPDLTKPFALYVDEKEGVARGVLTQTLGPWRRPVAYLSKKLDPVASGWPTCLKAIAAVALLLKDADKLTLGQNVLVIAPHNLESIVRQPPDRWMTNARMTHYQSLLLNERVSFAPPAILNPATLLPVESDDTPIHICSEILAEETGTRPDLRDQPLPGVPAWYTDGSSFIMDGRRQAGAAIVDNKRTVWASNLPEGTSAQKAELIALTQALRLAEGKSINIYTDSRYAFATAHVHGAIYKQRGWLTSAGKDIKNKEEILALLEAIHLPKRVAIIHCPGHQRGTDPVATGNRKADEAAKQAAQSTRILTETTKNAGKRTADGSEFEKRTADGSEFESPKKKAKVE

SEQ ID NO: 1788 - protein, 2212 aa, synthetic construct
MPAAKRVKLDGGDKKYSIGLDIGTNSVGWAVITDEYKVPSKKFKVLGNTDRHSIKKNLIGALLFDSGETAEATRLKRTARRRYTRRKNRICYLQEIFSNEMAKVDDSFFHRLEESFLVEEDKKHERHPIFGNIVDEVAYHEKYPTIYHLRKKLVDSTDKADLRLIYLALAHMIKFRGHFLIEGDLNPDNSDVDKLFIQLVQTYNQLFEENPINASGVDAKAILSARLSKSRRLENLIAQLPGEKKNGLFGNLIALSLGLTPNFKSNFDLAEDAKLQLSKDTYDDDLDNLLAQIGDQYADLFLAAKNLSDAILLSDILRVNTEITKAPLSASMIKRYDEHHQDLTLLKALVRQQLPEKYKEIFFDQSKNGYAGYIDGGASQEEFYKFIKPILEKMDGTEELLVKLNREDLLRKQRTFDNGSIPHQIHLGELHAILRRQEDFYPFLKDNREKIEKILTFRIPYYVGPLARGNSRFAWMTRKSEETITPWNFEEVVDKGASAQSFIERMTNFDKNLPNEKVLPKHSLLYEYFTVYNELTKVKYVTEGMRKPAFLSGEQKKAIVDLLFKTNRKVTVKQLKEDYFKKIECFDSVEISGVEDRFNASLGTYHDLLKIIKDKDFLDNEENEDILEDIVLTLTLFEDREMIEERLKTYAHLFDDKVMKQLKRRRYTGWGRLSRKLINGIRDKQSGKTILDFLKSDGFANRNFMQLIHDDSLTFKEDIQKAQVSGQGDSLHEHIANLAGSPAIKKGILQTVKVVDELVKVMGRHKPENIVIEMARENQTTQKGQKNSRERMKRIEEGIKELGSQILKEHPVENTQLQNEKLYLYYLQNGRDMYVDQELDINRLSDYDVDHIVPQSFLKDDSIDNKVLTRSDKARGKSDNVPSEEVVKKMKNYWRQLLNAKLITQRKFDNLTKAERGGLSELDKAGFIKRQLVETRQITKHVAQILDSRMNTKYDENDKLIREVKVITLKSKLVSDFRKDFQFYKVREINNYHHAHDAYLNAVVGTALIKKYPKLESEFVYGDYKVYDVRKMIAKSEQEIGKATAKYFFYSNIMNFFKTEITLANGEIRKRPLIETNGETGEIVWDKGRDFATVRKVLSMPQVNIVKKTEVQTGGFSKESILPKRNSDKLIARKKDWDPKKYGGFDSPTVAYSVLVVAKVEKGKSKKLKSVKELLGITIMERSSFEKNPIDFLEAKGYKEVKKDLIIKLPKYSLFELENGRKRMLASAGELQKGNELALPSKYVNFLYLASHYEKLKGSPEDNEQKQLFVEQHKHYLDEIIEQISEFSKRVILADANLDKVLSAYNKHRDKPIREQAENIIHLFTLTNLGAPAAFKYFDTTIDRKRYTSTKEVLDATLIHQSITGLYETRIDLSQLGGDGGGGGGSGGTLGDQGSRGSDPLPEPRVTLTVEGIPTEFLVNTGAEHSVLTKPMGKMGSKRTVVAGATGSKVYPWTTKRLLKIGQKQVTHSFLVIPECPAPLLGRDLLTKLKAQIQFSTEGPQVTWEDRPAMCLVLNLEEEYRLHEKPVPPSIDPSWLQLFPMVWAEKAGMGLANQVPPVVVELKSDASPVAVRQYPMSKEAREGIRPHIQRFLDLGILVPCQSPWNTPLLPVKKPGTNDYRPVQDLREVNKRVQDIHPTVPNPYNLLSSLPPSHTWYSVLDLKDAFFCLKLHPNSQPLFAFEWRDPEKGNTGQLTWTRLPQGFKNSPTLFNEALHRDLASFRALNPQVVMLQYVDDLLVAAPTYRDCKEGTRRLLQELSKLGYRVSAKKAQLCREEVTYLGYLLKGGKRWLTPARKATVMKIPTPTTPRQVREFLGKAGFCRLFIPGFASLAAPLYPLTRPKVPFTWTEAHQEAFGRIKEALLSAPALALPDLTKPFALYVDEKEGVARGVLTQTLGPWRRPVAYLSKKLDPVASGWPTCLKAIAAVALLLKDADKLTLGQNVLVIAPHNLESIVRQPPDRWMTNARMTHYQSLLLNERVSFAPPAILNPATLLPVESDDTPIHICSEILAEETGTRPDLRDQPLPGVPAWYTDGSSFIMDGRRQAGAAIVDNKRTVWASNLPEGTSAQKAELIALTQALRLAEGKSINIYTDSRYAFATAHVHGAIYKQRGWLTSAGKDIKNKEEILALLEAIHLPKRVAIIHCPGHQRGTDPVATGNRKADEAAKQAAQSTRILTETTKNAGKRTADGSEFEKRTADGSEFESPKKKAKVE

SEQ ID NO: 1789 - protein, 2218 aa, synthetic construct
MPAAKRVKLDGGDKKYSIGLDIGTNSVGWAVITDEYKVPSKKFKVLGNTDRHSIKKNLIGALLFDSGETAEATRLKRTARRRYTRRKNRICYLQEIFSNEMAKVDDSFFHRLEESFLVEEDKKHERHPIFGNIVDEVAYHEKYPTIYHLRKKLVDSTDKADLRLIYLALAHMIKFRGHFLIEGDLNPDNSDVDKLFIQLVQTYNQLFEENPINASGVDAKAILSARLSKSRRLENLIAQLPGEKKNGLFGNLIALSLGLTPNFKSNFDLAEDAKLQLSKDTYDDDLDNLLAQIGDQYADLFLAAKNLSDAILLSDILRVNTEITKAPLSASMIKRYDEHHQDLTLLKALVRQQLPEKYKEIFFDQSKNGYAGYIDGGASQEEFYKFIKPILEKMDGTEELLVKLNREDLLRKQRTFDNGSIPHQIHLGELHAILRRQEDFYPFLKDNREKIEKILTFRIPYYVGPLARGNSRFAWMTRKSEETITPWNFEEVVDKGASAQSFIERMTNFDKNLPNEKVLPKHSLLYEYFTVYNELTKVKYVTEGMRKPAFLSGEQKKAIVDLLFKTNRKVTVKQLKEDYFKKIECFDSVEISGVEDRFNASLGTYHDLLKIIKDKDFLDNEENEDILEDIVLTLTLFEDREMIEERLKTYAHLFDDKVMKQLKRRRYTGWGRLSRKLINGIRDKQSGKTILDFLKSDGFANRNFMQLIHDDSLTFKEDIQKAQVSGQGDSLHEHIANLAGSPAIKKGILQTVKVVDELVKVMGRHKPENIVIEMARENQTTQKGQKNSRERMKRIEEGIKELGSQILKEHPVENTQLQNEKLYLYYLQNGRDMYVDQELDINRLSDYDVDHIVPQSFLKDDSIDNKVLTRSDKARGKSDNVPSEEVVKKMKNYWRQLLNAKLITQRKFDNLTKAERGGLSELDKAGFIKRQLVETRQITKHVAQILDSRMNTKYDENDKLIREVKVITLKSKLVSDFRKDFQFYKVREINNYHHAHDAYLNAVVGTALIKKYPKLESEFVYGDYKVYDVRKMIAKSEQEIGKATAKYFFYSNIMNFFKTEITLANGEIRKRPLIETNGETGEIVWDKGRDFATVRKVLSMPQVNIVKKTEVQTGGFSKESILPKRNSDKLIARKKDWDPKKYGGFDSPTVAYSVLVVAKVEKGKSKKLKSVKELLGITIMERSSFEKNPIDFLEAKGYKEVKKDLIIKLPKYSLFELENGRKRMLASAGELQKGNELALPSKYVNFLYLASHYEKLKGSPEDNEQKQLFVEQHKHYLDEIIEQISEFSKRVILADANLDKVLSAYNKHRDKPIREQAENIIHLFTLTNLGAPAAFKYFDTTIDRKRYTSTKEVLDATLIHQSITGLYETRIDLSQLGGDGGGGGEAAAKPAPGGTLGDQGSRGSDPLPEPRVTLTVEGIPTEFLVNTGAEHSVLTKPMGKMGSKRTVVAGATGSKVYPWTTKRLLKIGQKQVTHSFLVIPECPAPLLGRDLLTKLKAQIQFSTEGPQVTWEDRPAMCLVLNLEEEYRLHEKPVPPSIDPSWLQLFPMVWAEKAGMGLANQVPPVVVELKSDASPVAVRQYPMSKEAREGIRPHIQRFLDLGILVPCQSPWNTPLLPVKKPGTNDYRPVQDLREVNKRVQDIHPTVPNPYNLLSSLPPSHTWYSVLDLKDAFFCLKLHPNSQPLFAFEWRDPEKGNTGQLTWTRLPQGFKNSPTLFNEALHRDLASFRALNPQVVMLQYVDDLLVAAPTYRDCKEGTRRLLQELSKLGYRVSAKKAQLCREEVTYLGYLLKGGKRWLTPARKATVMKIPTPTTPRQVREFLGKAGFCRLFIPGFASLAAPLYPLTRPKVPFTWTEAHQEAFGRIKEALLSAPALALPDLTKPFALYVDEKEGVARGVLTQTLGPWRRPVAYLSKKLDPVASGWPTCLKAIAAVALLLKDADKLTLGQNVLVIAPHNLESIVRQPPDRWMTNARMTHYQSLLLNERVSFAPPAILNPATLLPVESDDTPIHICSEILAEETGTRPDLRDQPLPGVPAWYTDGSSFIMDGRRQAGAAIVDNKRTVWASNLPEGTSAQKAELIALTQALRLAEGKSINIYTDSRYAFATAHVHGAIYKQRGWLTSAGKDIKNKEEILALLEAIHLPKRVAIIHCPGHQRGTDPVATGNRKADEAAKQAAQSTRILTETTKNAGKRTADGSEFEKRTADGSEFESPKKKAKVE

SEQ ID NO: 1790 - protein, 2214 aa, synthetic construct
MPAAKRVKLDGGDKKYSIGLDIGTNSVGWAVITDEYKVPSKKFKVLGNTDRHSIKKNLIGALLFDSGETAEATRLKRTARRRYTRRKNRICYLQEIFSNEMAKVDDSFFHRLEESFLVEEDKKHERHPIFGNIVDEVAYHEKYPTIYHLRKKLVDSTDKADLRLIYLALAHMIKFRGHFLIEGDLNPDNSDVDKLFIQLVQTYNQLFEENPINASGVDAKAILSARLSKSRRLENLIAQLPGEKKNGLFGNLIALSLGLTPNFKSNFDLAEDAKLQLSKDTYDDDLDNLLAQIGDQYADLFLAAKNLSDAILLSDILRVNTEITKAPLSASMIKRYDEHHQDLTLLKALVRQQLPEKYKEIFFDQSKNGYAGYIDGGASQEEFYKFIKPILEKMDGTEELLVKLNREDLLRKQRTFDNGSIPHQIHLGELHAILRRQEDFYPFLKDNREKIEKILTFRIPYYVGPLARGNSRFAWMTRKSEETITPWNFEEVVDKGASAQSFIERMTNFDKNLPNEKVLPKHSLLYEYFTVYNELTKVKYVTEGMRKPAFLSGEQKKAIVDLLFKTNRKVTVKQLKEDYFKKIECFDSVEISGVEDRFNASLGTYHDLLKIIKDKDFLDNEENEDILEDIVLTLTLFEDREMIEERLKTYAHLFDDKVMKQLKRRRYTGWGRLSRKLINGIRDKQSGKTILDFLKSDGFANRNFMQLIHDDSLTFKEDIQKAQVSGQGDSLHEHIANLAGSPAIKKGILQTVKVVDELVKVMGRHKPENIVIEMARENQTTQKGQKNSRERMKRIEEGIKELGSQILKEHPVENTQLQNEKLYLYYLQNGRDMYVDQELDINRLSDYDVDHIVPQSFLKDDSIDNKVLTRSDKARGKSDNVPSEEVVKKMKNYWRQLLNAKLITQRKFDNLTKAERGGLSELDKAGFIKRQLVETRQITKHVAQILDSRMNTKYDENDKLIREVKVITLKSKLVSDFRKDFQFYKVREINNYHHAHDAYLNAVVGTALIKKYPKLESEFVYGDYKVYDVRKMIAKSEQEIGKATAKYFFYSNIMNFFKTEITLANGEIRKRPLIETNGETGEIVWDKGRDFATVRKVLSMPQVNIVKKTEVQTGGFSKESILPKRNSDKLIARKKDWDPKKYGGFDSPTVAYSVLVVAKVEKGKSKKLKSVKELLGITIMERSSFEKNPIDFLEAKGYKEVKKDLIIKLPKYSLFELENGRKRMLASAGELQKGNELALPSKYVNFLYLASHYEKLKGSPEDNEQKQLFVEQHKHYLDEIIEQISEFSKRVILADANLDKVLSAYNKHRDKPIREQAENIIHLFTLTNLGAPAAFKYFDTTIDRKRYTSTKEVLDATLIHQSITGLYETRIDLSQLGGDGGGGGGGGGGGTLGDQGSRGSDPLPEPRVTLTVEGIPTEFLVNTGAEHSVLTKPMGKMGSKRTVVAGATGSKVYPWTTKRLLKIGQKQVTHSFLVIPECPAPLLGRDLLTKLKAQIQFSTEGPQVTWEDRPAMCLVLNLEEEYRLHEKPVPPSIDPSWLQLFPMVWAEKAGMGLANQVPPVVVELKSDASPVAVRQYPMSKEAREGIRPHIQRFLDLGILVPCQSPWNTPLLPVKKPGTNDYRPVQDLREVNKRVQDIHPTVPNPYNLLSSLPPSHTWYSVLDLKDAFFCLKLHPNSQPLFAFEWRDPEKGNTGQLTWTRLPQGFKNSPTLFNEALHRDLASFRALNPQVVMLQYVDDLLVAAPTYRDCKEGTRRLLQELSKLGYRVSAKKAQLCREEVTYLGYLLKGGKRWLTPARKATVMKIPTPTTPRQVREFLGKAGFCRLFIPGFASLAAPLYPLTRPKVPFTWTEAHQEAFGRIKEALLSAPALALPDLTKPFALYVDEKEGVARGVLTQTLGPWRRPVAYLSKKLDPVASGWPTCLKAIAAVALLLKDADKLTLGQNVLVIAPHNLESIVRQPPDRWMTNARMTHYQSLLLNERVSFAPPAILNPATLLPVESDDTPIHICSEILAEETGTRPDLRDQPLPGVPAWYTDGSSFIMDGRRQAGAAIVDNKRTVWASNLPEGTSAQKAELIALTQALRLAEGKSINIYTDSRYAFATAHVHGAIYKQRGWLTSAGKDIKNKEEILALLEAIHLPKRVAIIHCPGHQRGTDPVATGNRKADEAAKQAAQSTRILTETTKNAGKRTADGSEFEKRTADGSEFESPKKKAKVE

SEQ ID NO: 1791 - protein, 2210 aa, synthetic construct
MPAAKRVKLDGGDKKYSIGLDIGTNSVGWAVITDEYKVPSKKFKVLGNTDRHSIKKNLIGALLFDSGETAEATRLKRTARRRYTRRKNRICYLQEIFSNEMAKVDDSFFHRLEESFLVEEDKKHERHPIFGNIVDEVAYHEKYPTIYHLRKKLVDSTDKADLRLIYLALAHMIKFRGHFLIEGDLNPDNSDVDKLFIQLVQTYNQLFEENPINASGVDAKAILSARLSKSRRLENLIAQLPGEKKNGLFGNLIALSLGLTPNFKSNFDLAEDAKLQLSKDTYDDDLDNLLAQIGDQYADLFLAAKNLSDAILLSDILRVNTEITKAPLSASMIKRYDEHHQDLTLLKALVRQQLPEKYKEIFFDQSKNGYAGYIDGGASQEEFYKFIKPILEKMDGTEELLVKLNREDLLRKQRTFDNGSIPHQIHLGELHAILRRQEDFYPFLKDNREKIEKILTFRIPYYVGPLARGNSRFAWMTRKSEETITPWNFEEVVDKGASAQSFIERMTNFDKNLPNEKVLPKHSLLYEYFTVYNELTKVKYVTEGMRKPAFLSGEQKKAIVDLLFKTNRKVTVKQLKEDYFKKIECFDSVEISGVEDRFNASLGTYHDLLKIIKDKDFLDNEENEDILEDIVLTLTLFEDREMIEERLKTYAHLFDDKVMKQLKRRRYTGWGRLSRKLINGIRDKQSGKTILDFLKSDGFANRNFMQLIHDDSLTFKEDIQKAQVSGQGDSLHEHIANLAGSPAIKKGILQTVKVVDELVKVMGRHKPENIVIEMARENQTTQKGQKNSRERMKRIEEGIKELGSQILKEHPVENTQLQNEKLYLYYLQNGRDMYVDQELDINRLSDYDVDHIVPQSFLKDDSIDNKVLTRSDKARGKSDNVPSEEVVKKMKNYWRQLLNAKLITQRKFDNLTKAERGGLSELDKAGFIKRQLVETRQITKHVAQILDSRMNTKYDENDKLIREVKVITLKSKLVSDFRKDFQFYKVREINNYHHAHDAYLNAVVGTALIKKYPKLESEFVYGDYKVYDVRKMIAKSEQEIGKATAKYFFYSNIMNFFKTEITLANGEIRKRPLIETNGETGEIVWDKGRDFATVRKVLSMPQVNIVKKTEVQTGGFSKESILPKRNSDKLIARKKDWDPKKYGGFDSPTVAYSVLVVAKVEKGKSKKLKSVKELLGITIMERSSFEKNPIDFLEAKGYKEVKKDLIIKLPKYSLFELENGRKRMLASAGELQKGNELALPSKYVNFLYLASHYEKLKGSPEDNEQKQLFVEQHKHYLDEIIEQISEFSKRVILADANLDKVLSAYNKHRDKPIREQAENIIHLFTLTNLGAPAAFKYFDTTIDRKRYTSTKEVLDATLIHQSITGLYETRIDLSQLGGDGGGGSGGTLGDQGSRGSDPLPEPRVTLTVEGIPTEFLVNTGAEHSVLTKPMGKMGSKRTVVAGATGSKVYPWTTKRLLKIGQKQVTHSFLVIPECPAPLLGRDLLTKLKAQIQFSTEGPQVTWEDRPAMCLVLNLEEEYRLHEKPVPPSIDPSWLQLFPMVWAEKAGMGLANQVPPVVVELKSDASPVAVRQYPMSKEAREGIRPHIQRFLDLGILVPCQSPWNTPLLPVKKPGTNDYRPVQDLREVNKRVQDIHPTVPNPYNLLSSLPPSHTWYSVLDLKDAFFCLKLHPNSQPLFAFEWRDPEKGNTGQLTWTRLPQGFKNSPTLFNEALHRDLASFRALNPQVVMLQYVDDLLVAAPTYRDCKEGTRRLLQELSKLGYRVSAKKAQLCREEVTYLGYLLKGGKRWLTPARKATVMKIPTPTTPRQVREFLGKAGFCRLFIPGFASLAAPLYPLTRPKVPFTWTEAHQEAFGRIKEALLSAPALALPDLTKPFALYVDEKEGVARGVLTQTLGPWRRPVAYLSKKLDPVASGWPTCLKAIAAVALLLKDADKLTLGQNVLVIAPHNLESIVRQPPDRWMTNARMTHYQSLLLNERVSFAPPAILNPATLLPVESDDTPIHICSEILAEETGTRPDLRDQPLPGVPAWYTDGSSFIMDGRRQAGAAIVDNKRTVWASNLPEGTSAQKAELIALTQALRLAEGKSINIYTDSRYAFATAHVHGAIYKQRGWLTSAGKDIKNKEEILALLEAIHLPKRVAIIHCPGHQRGTDPVATGNRKADEAAKQAAQSTRILTETTKNAGKRTADGSEFEKRTADGSEFESPKKKAKVE

SEQ ID NO: 1792 - protein, 2216 aa, synthetic construct
MPAAKRVKLDGGDKKYSIGLDIGTNSVGWAVITDEYKVPSKKFKVLGNTDRHSIKKNLIGALLFDSGETAEATRLKRTARRRYTRRKNRICYLQEIFSNEMAKVDDSFFHRLEESFLVEEDKKHERHPIFGNIVDEVAYHEKYPTIYHLRKKLVDSTDKADLRLIYLALAHMIKFRGHFLIEGDLNPDNSDVDKLFIQLVQTYNQLFEENPINASGVDAKAILSARLSKSRRLENLIAQLPGEKKNGLFGNLIALSLGLTPNFKSNFDLAEDAKLQLSKDTYDDDLDNLLAQIGDQYADLFLAAKNLSDAILLSDILRVNTEITKAPLSASMIKRYDEHHQDLTLLKALVRQQLPEKYKEIFFDQSKNGYAGYIDGGASQEEFYKFIKPILEKMDGTEELLVKLNREDLLRKQRTFDNGSIPHQIHLGELHAILRRQEDFYPFLKDNREKIEKILTFRIPYYVGPLARGNSRFAWMTRKSEETITPWNFEEVVDKGASAQSFIERMTNFDKNLPNEKVLPKHSLLYEYFTVYNELTKVKYVTEGMRKPAFLSGEQKKAIVDLLFKTNRKVTVKQLKEDYFKKIECFDSVEISGVEDRFNASLGTYHDLLKIIKDKDFLDNEENEDILEDIVLTLTLFEDREMIEERLKTYAHLFDDKVMKQLKRRRYTGWGRLSRKLINGIRDKQSGKTILDFLKSDGFANRNFMQLIHDDSLTFKEDIQKAQVSGQGDSLHEHIANLAGSPAIKKGILQTVKVVDELVKVMGRHKPENIVIEMARENQTTQKGQKNSRERMKRIEEGIKELGSQILKEHPVENTQLQNEKLYLYYLQNGRDMYVDQELDINRLSDYDVDHIVPQSFLKDDSIDNKVLTRSDKARGKSDNVPSEEVVKKMKNYWRQLLNAKLITQRKFDNLTKAERGGLSELDKAGFIKRQLVETRQITKHVAQILDSRMNTKYDENDKLIREVKVITLKSKLVSDFRKDFQFYKVREINNYHHAHDAYLNAVVGTALIKKYPKLESEFVYGDYKVYDVRKMIAKSEQEIGKATAKYFFYSNIMNFFKTEITLANGEIRKRPLIETNGETGEIVWDKGRDFATVRKVLSMPQVNIVKKTEVQTGGFSKESILPKRNSDKLIARKKDWDPKKYGGFDSPTVAYSVLVVAKVEKGKSKKLKSVKELLGITIMERSSFEKNPIDFLEAKGYKEVKKDLIIKLPKYSLFELENGRKRMLASAGELQKGNELALPSKYVNFLYLASHYEKLKGSPEDNEQKQLFVEQHKHYLDEIIEQISEFSKRVILADANLDKVLSAYNKHRDKPIREQAENIIHLFTLTNLGAPAAFKYFDTTIDRKRYTSTKEVLDATLIHQSITGLYETRIDLSQLGGDGGPAPGGSGGGGGTLGDQGSRGSDPLPEPRVTLTVEGIPTEFLVNTGAEHSVLTKPMGKMGSKRTVVAGATGSKVYPWTTKRLLKIGQKQVTHSFLVIPECPAPLLGRDLLTKLKAQIQFSTEGPQVTWEDRPAMCLVLNLEEEYRLHEKPVPPSIDPSWLQLFPMVWAEKAGMGLANQVPPVVVELKSDASPVAVRQYPMSKEAREGIRPHIQRFLDLGILVPCQSPWNTPLLPVKKPGTNDYRPVQDLREVNKRVQDIHPTVPNPYNLLSSLPPSHTWYSVLDLKDAFFCLKLHPNSQPLFAFEWRDPEKGNTGQLTWTRLPQGFKNSPTLFNEALHRDLASFRALNPQVVMLQYVDDLLVAAPTYRDCKEGTRRLLQELSKLGYRVSAKKAQLCREEVTYLGYLLKGGKRWLTPARKATVMKIPTPTTPRQVREFLGKAGFCRLFIPGFASLAAPLYPLTRPKVPFTWTEAHQEAFGRIKEALLSAPALALPDLTKPFALYVDEKEGVARGVLTQTLGPWRRPVAYLSKKLDPVASGWPTCLKAIAAVALLLKDADKLTLGQNVLVIAPHNLESIVRQPPDRWMTNARMTHYQSLLLNERVSFAPPAILNPATLLPVESDDTPIHICSEILAEETGTRPDLRDQPLPGVPAWYTDGSSFIMDGRRQAGAAIVDNKRTVWASNLPEGTSAQKAELIALTQALRLAEGKSINIYTDSRYAFATAHVHGAIYKQRGWLTSAGKDIKNKEEILALLEAIHLPKRVAIIHCPGHQRGTDPVATGNRKADEAAKQAAQSTRILTETTKNAGKRTADGSEFEKRTADGSEFESPKKKAKVE

SEQ ID NO: 1793 - protein, 2220 aa, synthetic construct
MPAAKRVKLDGGDKKYSIGLDIGTNSVGWAVITDEYKVPSKKFKVLGNTDRHSIKKNLIGALLFDSGETAEATRLKRTARRRYTRRKNRICYLQEIFSNEMAKVDDSFFHRLEESFLVEEDKKHERHPIFGNIVDEVAYHEKYPTIYHLRKKLVDSTDKADLRLIYLALAHMIKFRGHFLIEGDLNPDNSDVDKLFIQLVQTYNQLFEENPINASGVDAKAILSARLSKSRRLENLIAQLPGEKKNGLFGNLIALSLGLTPNFKSNFDLAEDAKLQLSKDTYDDDLDNLLAQIGDQYADLFLAAKNLSDAILLSDILRVNTEITKAPLSASMIKRYDEHHQDLTLLKALVRQQLPEKYKEIFFDQSKNGYAGYIDGGASQEEFYKFIKPILEKMDGTEELLVKLNREDLLRKQRTFDNGSIPHQIHLGELHAILRRQEDFYPFLKDNREKIEKILTFRIPYYVGPLARGNSRFAWMTRKSEETITPWNFEEVVDKGASAQSFIERMTNFDKNLPNEKVLPKHSLLYEYFTVYNELTKVKYVTEGMRKPAFLSGEQKKAIVDLLFKTNRKVTVKQLKEDYFKKIECFDSVEISGVEDRFNASLGTYHDLLKIIKDKDFLDNEENEDILEDIVLTLTLFEDREMIEERLKTYAHLFDDKVMKQLKRRRYTGWGRLSRKLINGIRDKQSGKTILDFLKSDGFANRNFMQLIHDDSLTFKEDIQKAQVSGQGDSLHEHIANLAGSPAIKKGILQTVKVVDELVKVMGRHKPENIVIEMARENQTTQKGQKNSRERMKRIEEGIKELGSQILKEHPVENTQLQNEKLYLYYLQNGRDMYVDQELDINRLSDYDVDHIVPQSFLKDDSIDNKVLTRSDKARGKSDNVPSEEVVKKMKNYWRQLLNAKLITQRKFDNLTKAERGGLSELDKAGFIKRQLVETRQITKHVAQILDSRMNTKYDENDKLIREVKVITLKSKLVSDFRKDFQFYKVREINNYHHAHDAYLNAVVGTALIKKYPKLESEFVYGDYKVYDVRKMIAKSEQEIGKATAKYFFYSNIMNFFKTEITLANGEIRKRPLIETNGETGEIVWDKGRDFATVRKVLSMPQVNIVKKTEVQTGGFSKESILPKRNSDKLIARKKDWDPKKYGGFDSPTVAYSVLVVAKVEKGKSKKLKSVKELLGITIMERSSFEKNPIDFLEAKGYKEVKKDLIIKLPKYSLFELENGRKRMLASAGELQKGNELALPSKYVNFLYLASHYEKLKGSPEDNEQKQLFVEQHKHYLDEIIEQISEFSKRVILADANLDKVLSAYNKHRDKPIREQAENIIHLFTLTNLGAPAAFKYFDTTIDRKRYTSTKEVLDATLIHQSITGLYETRIDLSQLGGDGGPAPAPAPAPAPAPGGTLGDQGSRGSDPLPEPRVTLTVEGIPTEFLVNTGAEHSVLTKPMGKMGSKRTVVAGATGSKVYPWTTKRLLKIGQKQVTHSFLVIPECPAPLLGRDLLTKLKAQIQFSTEGPQVTWEDRPAMCLVLNLEEEYRLHEKPVPPSIDPSWLQLFPMVWAEKAGMGLANQVPPVVVELKSDASPVAVRQYPMSKEAREGIRPHIQRFLDLGILVPCQSPWNTPLLPVKKPGTNDYRPVQDLREVNKRVQDIHPTVPNPYNLLSSLPPSHTWYSVLDLKDAFFCLKLHPNSQPLFAFEWRDPEKGNTGQLTWTRLPQGFKNSPTLFNEALHRDLASFRALNPQVVMLQYVDDLLVAAPTYRDCKEGTRRLLQELSKLGYRVSAKKAQLCREEVTYLGYLLKGGKRWLTPARKATVMKIPTPTTPRQVREFLGKAGFCRLFIPGFASLAAPLYPLTRPKVPFTWTEAHQEAFGRIKEALLSAPALALPDLTKPFALYVDEKEGVARGVLTQTLGPWRRPVAYLSKKLDPVASGWPTCLKAIAAVALLLKDADKLTLGQNVLVIAPHNLESIVRQPPDRWMTNARMTHYQSLLLNERVSFAPPAILNPATLLPVESDDTPIHICSEILAEETGTRPDLRDQPLPGVPAWYTDGSSFIMDGRRQAGAAIVDNKRTVWASNLPEGTSAQKAELIALTQALRLAEGKSINIYTDSRYAFATAHVHGAIYKQRGWLTSAGKDIKNKEEILALLEAIHLPKRVAIIHCPGHQRGTDPVATGNRKADEAAKQAAQSTRILTETTKNAGKRTADGSEFEKRTADGSEFESPKKKAKVE

SEQ ID NO: 1794 - protein, 2213 aa, synthetic construct
MPAAKRVKLDGGDKKYSIGLDIGTNSVGWAVITDEYKVPSKKFKVLGNTDRHSIKKNLIGALLFDSGETAEATRLKRTARRRYTRRKNRICYLQEIFSNEMAKVDDSFFHRLEESFLVEEDKKHERHPIFGNIVDEVAYHEKYPTIYHLRKKLVDSTDKADLRLIYLALAHMIKFRGHFLIEGDLNPDNSDVDKLFIQLVQTYNQLFEENPINASGVDAKAILSARLSKSRRLENLIAQLPGEKKNGLFGNLIALSLGLTPNFKSNFDLAEDAKLQLSKDTYDDDLDNLLAQIGDQYADLFLAAKNLSDAILLSDILRVNTEITKAPLSASMIKRYDEHHQDLTLLKALVRQQLPEKYKEIFFDQSKNGYAGYIDGGASQEEFYKFIKPILEKMDGTEELLVKLNREDLLRKQRTFDNGSIPHQIHLGELHAILRRQEDFYPFLKDNREKIEKILTFRIPYYVGPLARGNSRFAWMTRKSEETITPWNFEEVVDKGASAQSFIERMTNFDKNLPNEKVLPKHSLLYEYFTVYNELTKVKYVTEGMRKPAFLSGEQKKAIVDLLFKTNRKVTVKQLKEDYFKKIECFDSVEISGVEDRFNASLGTYHDLLKIIKDKDFLDNEENEDILEDIVLTLTLFEDREMIEERLKTYAHLFDDKVMKQLKRRRYTGWGRLSRKLINGIRDKQSGKTILDFLKSDGFANRNFMQLIHDDSLTFKEDIQKAQVSGQGDSLHEHIANLAGSPAIKKGILQTVKVVDELVKVMGRHKPENIVIEMARENQTTQKGQKNSRERMKRIEEGIKELGSQILKEHPVENTQLQNEKLYLYYLQNGRDMYVDQELDINRLSDYDVDHIVPQSFLKDDSIDNKVLTRSDKARGKSDNVPSEEVVKKMKNYWRQLLNAKLITQRKFDNLTKAERGGLSELDKAGFIKRQLVETRQITKHVAQILDSRMNTKYDENDKLIREVKVITLKSKLVSDFRKDFQFYKVREINNYHHAHDAYLNAVVGTALIKKYPKLESEFVYGDYKVYDVRKMIAKSEQEIGKATAKYFFYSNIMNFFKTEITLANGEIRKRPLIETNGETGEIVWDKGRDFATVRKVLSMPQVNIVKKTEVQTGGFSKESILPKRNSDKLIARKKDWDPKKYGGFDSPTVAYSVLVVAKVEKGKSKKLKSVKELLGITIMERSSFEKNPIDFLEAKGYKEVKKDLIIKLPKYSLFELENGRKRMLASAGELQKGNELALPSKYVNFLYLASHYEKLKGSPEDNEQKQLFVEQHKHYLDEIIEQISEFSKRVILADANLDKVLSAYNKHRDKPIREQAENIIHLFTLTNLGAPAAFKYFDTTIDRKRYTSTKEVLDATLIHQSITGLYETRIDLSQLGGDGGPAPGGGGGTLGDQGSRGSDPLPEPRVTLTVEGIPTEFLVNTGAEHSVLTKPMGKMGSKRTVVAGATGSKVYPWTTKRLLKIGQKQVTHSFLVIPECPAPLLGRDLLTKLKAQIQFSTEGPQVTWEDRPAMCLVLNLEEEYRLHEKPVPPSIDPSWLQLFPMVWAEKAGMGLANQVPPVVVELKSDASPVAVRQYPMSKEAREGIRPHIQRFLDLGILVPCQSPWNTPLLPVKKPGTNDYRPVQDLREVNKRVQDIHPTVPNPYNLLSSLPPSHTWYSVLDLKDAFFCLKLHPNSQPLFAFEWRDPEKGNTGQLTWTRLPQGFKNSPTLFNEALHRDLASFRALNPQVVMLQYVDDLLVAAPTYRDCKEGTRRLLQELSKLGYRVSAKKAQLCREEVTYLGYLLKGGKRWLTPARKATVMKIPTPTTPRQVREFLGKAGFCRLFIPGFASLAAPLYPLTRPKVPFTWTEAHQEAFGRIKEALLSAPALALPDLTKPFALYVDEKEGVARGVLTQTLGPWRRPVAYLSKKLDPVASGWPTCLKAIAAVALLLKDADKLTLGQNVLVIAPHNLESIVRQPPDRWMTNARMTHYQSLLLNERVSFAPPAILNPATLLPVESDDTPIHICSEILAEETGTRPDLRDQPLPGVPAWYTDGSSFIMDGRRQAGAAIVDNKRTVWASNLPEGTSAQKAELIALTQALRLAEGKSINIYTDSRYAFATAHVHGAIYKQRGWLTSAGKDIKNKEEILALLEAIHLPKRVAIIHCPGHQRGTDPVATGNRKADEAAKQAAQSTRILTETTKNAGKRTADGSEFEKRTADGSEFESPKKKAKVE

SEQ ID NO: 1795 - protein, 2218 aa, synthetic construct
MPAAKRVKLDGGDKKYSIGLDIGTNSVGWAVITDEYKVPSKKFKVLGNTDRHSIKKNLIGALLFDSGETAEATRLKRTARRRYTRRKNRICYLQEIFSNEMAKVDDSFFHRLEESFLVEEDKKHERHPIFGNIVDEVAYHEKYPTIYHLRKKLVDSTDKADLRLIYLALAHMIKFRGHFLIEGDLNPDNSDVDKLFIQLVQTYNQLFEENPINASGVDAKAILSARLSKSRRLENLIAQLPGEKKNGLFGNLIALSLGLTPNFKSNFDLAEDAKLQLSKDTYDDDLDNLLAQIGDQYADLFLAAKNLSDAILLSDILRVNTEITKAPLSASMIKRYDEHHQDLTLLKALVRQQLPEKYKEIFFDQSKNGYAGYIDGGASQEEFYKFIKPILEKMDGTEELLVKLNREDLLRKQRTFDNGSIPHQIHLGELHAILRRQEDFYPFLKDNREKIEKILTFRIPYYVGPLARGNSRFAWMTRKSEETITPWNFEEVVDKGASAQSFIERMTNFDKNLPNEKVLPKHSLLYEYFTVYNELTKVKYVTEGMRKPAFLSGEQKKAIVDLLFKTNRKVTVKQLKEDYFKKIECFDSVEISGVEDRFNASLGTYHDLLKIIKDKDFLDNEENEDILEDIVLTLTLFEDREMIEERLKTYAHLFDDKVMKQLKRRRYTGWGRLSRKLINGIRDKQSGKTILDFLKSDGFANRNFMQLIHDDSLTFKEDIQKAQVSGQGDSLHEHIANLAGSPAIKKGILQTVKVVDELVKVMGRHKPENIVIEMARENQTTQKGQKNSRERMKRIEEGIKELGSQILKEHPVENTQLQNEKLYLYYLQNGRDMYVDQELDINRLSDYDVDHIVPQSFLKDDSIDNKVLTRSDKARGKSDNVPSEEVVKKMKNYWRQLLNAKLITQRKFDNLTKAERGGLSELDKAGFIKRQLVETRQITKHVAQILDSRMNTKYDENDKLIREVKVITLKSKLVSDFRKDFQFYKVREINNYHHAHDAYLNAVVGTALIKKYPKLESEFVYGDYKVYDVRKMIAKSEQEIGKATAKYFFYSNIMNFFKTEITLANGEIRKRPLIETNGETGEIVWDKGRDFATVRKVLSMPQVNIVKKTEVQTGGFSKESILPKRNSDKLIARKKDWDPKKYGGFDSPTVAYSVLVVAKVEKGKSKKLKSVKELLGITIMERSSFEKNPIDFLEAKGYKEVKKDLIIKLPKYSLFELENGRKRMLASAGELQKGNELALPSKYVNFLYLASHYEKLKGSPEDNEQKQLFVEQHKHYLDEIIEQISEFSKRVILADANLDKVLSAYNKHRDKPIREQAENIIHLFTLTNLGAPAAFKYFDTTIDRKRYTSTKEVLDATLIHQSITGLYETRIDLSQLGGDGGGSSPAPEAAAKGGTLGDQGSRGSDPLPEPRVTLTVEGIPTEFLVNTGAEHSVLTKPMGKMGSKRTVVAGATGSKVYPWTTKRLLKIGQKQVTHSFLVIPECPAPLLGRDLLTKLKAQIQFSTEGPQVTWEDRPAMCLVLNLEEEYRLHEKPVPPSIDPSWLQLFPMVWAEKAGMGLANQVPPVVVELKSDASPVAVRQYPMSKEAREGIRPHIQRFLDLGILVPCQSPWNTPLLPVKKPGTNDYRPVQDLREVNKRVQDIHPTVPNPYNLLSSLPPSHTWYSVLDLKDAFFCLKLHPNSQPLFAFEWRDPEKGNTGQLTWTRLPQGFKNSPTLFNEALHRDLASFRALNPQVVMLQYVDDLLVAAPTYRDCKEGTRRLLQELSKLGYRVSAKKAQLCREEVTYLGYLLKGGKRWLTPARKATVMKIPTPTTPRQVREFLGKAGFCRLFIPGFASLAAPLYPLTRPKVPFTWTEAHQEAFGRIKEALLSAPALALPDLTKPFALYVDEKEGVARGVLTQTLGPWRRPVAYLSKKLDPVASGWPTCLKAIAAVALLLKDADKLTLGQNVLVIAPHNLESIVRQPPDRWMTNARMTHYQSLLLNERVSFAPPAILNPATLLPVESDDTPIHICSEILAEETGTRPDLRDQPLPGVPAWYTDGSSFIMDGRRQAGAAIVDNKRTVWASNLPEGTSAQKAELIALTQALRLAEGKSINIYTDSRYAFATAHVHGAIYKQRGWLTSAGKDIKNKEEILALLEAIHLPKRVAIIHCPGHQRGTDPVATGNRKADEAAKQAAQSTRILTETTKNAGKRTADGSEFEKRTADGSEFESPKKKAKVE

SEQ ID NO: 1796 - protein, 2218 aa, synthetic construct
MPAAKRVKLDGGDKKYSIGLDIGTNSVGWAVITDEYKVPSKKFKVLGNTDRHSIKKNLIGALLFDSGETAEATRLKRTARRRYTRRKNRICYLQEIFSNEMAKVDDSFFHRLEESFLVEEDKKHERHPIFGNIVDEVAYHEKYPTIYHLRKKLVDSTDKADLRLIYLALAHMIKFRGHFLIEGDLNPDNSDVDKLFIQLVQTYNQLFEENPINASGVDAKAILSARLSKSRRLENLIAQLPGEKKNGLFGNLIALSLGLTPNFKSNFDLAEDAKLQLSKDTYDDDLDNLLAQIGDQYADLFLAAKNLSDAILLSDILRVNTEITKAPLSASMIKRYDEHHQDLTLLKALVRQQLPEKYKEIFFDQSKNGYAGYIDGGASQEEFYKFIKPILEKMDGTEELLVKLNREDLLRKQRTFDNGSIPHQIHLGELHAILRRQEDFYPFLKDNREKIEKILTFRIPYYVGPLARGNSRFAWMTRKSEETITPWNFEEVVDKGASAQSFIERMTNFDKNLPNEKVLPKHSLLYEYFTVYNELTKVKYVTEGMRKPAFLSGEQKKAIVDLLFKTNRKVTVKQLKEDYFKKIECFDSVEISGVEDRFNASLGTYHDLLKIIKDKDFLDNEENEDILEDIVLTLTLFEDREMIEERLKTYAHLFDDKVMKQLKRRRYTGWGRLSRKLINGIRDKQSGKTILDFLKSDGFANRNFMQLIHDDSLTFKEDIQKAQVSGQGDSLHEHIANLAGSPAIKKGILQTVKVVDELVKVMGRHKPENIVIEMARENQTTQKGQKNSRERMKRIEEGIKELGSQILKEHPVENTQLQNEKLYLYYLQNGRDMYVDQELDINRLSDYDVDHIVPQSFLKDDSIDNKVLTRSDKARGKSDNVPSEEVVKKMKNYWRQLLNAKLITQRKFDNLTKAERGGLSELDKAGFIKRQLVETRQITKHVAQILDSRMNTKYDENDKLIREVKVITLKSKLVSDFRKDFQFYKVREINNYHHAHDAYLNAVVGTALIKKYPKLESEFVYGDYKVYDVRKMIAKSEQEIGKATAKYFFYSNIMNFFKTEITLANGEIRKRPLIETNGETGEIVWDKGRDFATVRKVLSMPQVNIVKKTEVQTGGFSKESILPKRNSDKLIARKKDWDPKKYGGFDSPTVAYSVLVVAKVEKGKSKKLKSVKELLGITIMERSSFEKNPIDFLEAKGYKEVKKDLIIKLPKYSLFELENGRKRMLASAGELQKGNELALPSKYVNFLYLASHYEKLKGSPEDNEQKQLFVEQHKHYLDEIIEQISEFSKRVILADANLDKVLSAYNKHRDKPIREQAENIIHLFTLTNLGAPAAFKYFDTTIDRKRYTSTKEVLDATLIHQSITGLYETRIDLSQLGGDGGGGGEAAAKGSSGGTLGDQGSRGSDPLPEPRVTLTVEGIPTEFLVNTGAEHSVLTKPMGKMGSKRTVVAGATGSKVYPWTTKRLLKIGQKQVTHSFLVIPECPAPLLGRDLLTKLKAQIQFSTEGPQVTWEDRPAMCLVLNLEEEYRLHEKPVPPSIDPSWLQLFPMVWAEKAGMGLANQVPPVVVELKSDASPVAVRQYPMSKEAREGIRPHIQRFLDLGILVPCQSPWNTPLLPVKKPGTNDYRPVQDLREVNKRVQDIHPTVPNPYNLLSSLPPSHTWYSVLDLKDAFFCLKLHPNSQPLFAFEWRDPEKGNTGQLTWTRLPQGFKNSPTLFNEALHRDLASFRALNPQVVMLQYVDDLLVAAPTYRDCKEGTRRLLQELSKLGYRVSAKKAQLCREEVTYLGYLLKGGKRWLTPARKATVMKIPTPTTPRQVREFLGKAGFCRLFIPGFASLAAPLYPLTRPKVPFTWTEAHQEAFGRIKEALLSAPALALPDLTKPFALYVDEKEGVARGVLTQTLGPWRRPVAYLSKKLDPVASGWPTCLKAIAAVALLLKDADKLTLGQNVLVIAPHNLESIVRQPPDRWMTNARMTHYQSLLLNERVSFAPPAILNPATLLPVESDDTPIHICSEILAEETGTRPDLRDQPLPGVPAWYTDGSSFIMDGRRQAGAAIVDNKRTVWASNLPEGTSAQKAELIALTQALRLAEGKSINIYTDSRYAFATAHVHGAIYKQRGWLTSAGKDIKNKEEILALLEAIHLPKRVAIIHCPGHQRGTDPVATGNRKADEAAKQAAQSTRILTETTKNAGKRTADGSEFEKRTADGSEFESPKKKAKVE

SEQ ID NO: 1797 - protein, 2215 aa, synthetic construct
MPAAKRVKLDGGDKKYSIGLDIGTNSVGWAVITDEYKVPSKKFKVLGNTDRHSIKKNLIGALLFDSGETAEATRLKRTARRRYTRRKNRICYLQEIFSNEMAKVDDSFFHRLEESFLVEEDKKHERHPIFGNIVDEVAYHEKYPTIYHLRKKLVDSTDKADLRLIYLALAHMIKFRGHFLIEGDLNPDNSDVDKLFIQLVQTYNQLFEENPINASGVDAKAILSARLSKSRRLENLIAQLPGEKKNGLFGNLIALSLGLTPNFKSNFDLAEDAKLQLSKDTYDDDLDNLLAQIGDQYADLFLAAKNLSDAILLSDILRVNTEITKAPLSASMIKRYDEHHQDLTLLKALVRQQLPEKYKEIFFDQSKNGYAGYIDGGASQEEFYKFIKPILEKMDGTEELLVKLNREDLLRKQRTFDNGSIPHQIHLGELHAILRRQEDFYPFLKDNREKIEKILTFRIPYYVGPLARGNSRFAWMTRKSEETITPWNFEEVVDKGASAQSFIERMTNFDKNLPNEKVLPKHSLLYEYFTVYNELTKVKYVTEGMRKPAFLSGEQKKAIVDLLFKTNRKVTVKQLKEDYFKKIECFDSVEISGVEDRFNASLGTYHDLLKIIKDKDFLDNEENEDILEDIVLTLTLFEDREMIEERLKTYAHLFDDKVMKQLKRRRYTGWGRLSRKLINGIRDKQSGKTILDFLKSDGFANRNFMQLIHDDSLTFKEDIQKAQVSGQGDSLHEHIANLAGSPAIKKGILQTVKVVDELVKVMGRHKPENIVIEMARENQTTQKGQKNSRERMKRIEEGIKELGSQILKEHPVENTQLQNEKLYLYYLQNGRDMYVDQELDINRLSDYDVDHIVPQSFLKDDSIDNKVLTRSDKARGKSDNVPSEEVVKKMKNYWRQLLNAKLITQRKFDNLTKAERGGLSELDKAGFIKRQLVETRQITKHVAQILDSRMNTKYDENDKLIREVKVITLKSKLVSDFRKDFQFYKVREINNYHHAHDAYLNAVVGTALIKKYPKLESEFVYGDYKVYDVRKMIAKSEQEIGKATAKYFFYSNIMNFFKTEITLANGEIRKRPLIETNGETGEIVWDKGRDFATVRKVLSMPQVNIVKKTEVQTGGFSKESILPKRNSDKLIARKKDWDPKKYGGFDSPTVAYSVLVVAKVEKGKSKKLKSVKELLGITIMERSSFEKNPIDFLEAKGYKEVKKDLIIKLPKYSLFELENGRKRMLASAGELQKGNELALPSKYVNFLYLASHYEKLKGSPEDNEQKQLFVEQHKHYLDEIIEQISEFSKRVILADANLDKVLSAYNKHRDKPIREQAENIIHLFTLTNLGAPAAFKYFDTTIDRKRYTSTKEVLDATLIHQSITGLYETRIDLSQLGGDGGGSSEAAAKGGTLGDQGSRGSDPLPEPRVTLTVEGIPTEFLVNTGAEHSVLTKPMGKMGSKRTVVAGATGSKVYPWTTKRLLKIGQKQVTHSFLVIPECPAPLLGRDLLTKLKAQIQFSTEGPQVTWEDRPAMCLVLNLEEEYRLHEKPVPPSIDPSWLQLFPMVWAEKAGMGLANQVPPVVVELKSDASPVAVRQYPMSKEAREGIRPHIQRFLDLGILVPCQSPWNTPLLPVKKPGTNDYRPVQDLREVNKRVQDIHPTVPNPYNLLSSLPPSHTWYSVLDLKDAFFCLKLHPNSQPLFAFEWRDPEKGNTGQLTWTRLPQGFKNSPTLFNEALHRDLASFRALNPQVVMLQYVDDLLVAAPTYRDCKEGTRRLLQELSKLGYRVSAKKAQLCREEVTYLGYLLKGGKRWLTPARKATVMKIPTPTTPRQVREFLGKAGFCRLFIPGFASLAAPLYPLTRPKVPFTWTEAHQEAFGRIKEALLSAPALALPDLTKPFALYVDEKEGVARGVLTQTLGPWRRPVAYLSKKLDPVASGWPTCLKAIAAVALLLKDADKLTLGQNVLVIAPHNLESIVRQPPDRWMTNARMTHYQSLLLNERVSFAPPAILNPATLLPVESDDTPIHICSEILAEETGTRPDLRDQPLPGVPAWYTDGSSFIMDGRRQAGAAIVDNKRTVWASNLPEGTSAQKAELIALTQALRLAEGKSINIYTDSRYAFATAHVHGAIYKQRGWLTSAGKDIKNKEEILALLEAIHLPKRVAIIHCPGHQRGTDPVATGNRKADEAAKQAAQSTRILTETTKNAGKRTADGSEFEKRTADGSEFESPKKKAKVE

SEQ ID NO: 1798 - protein, 2211 aa, synthetic construct
MPAAKRVKLDGGDKKYSIGLDIGTNSVGWAVITDEYKVPSKKFKVLGNTDRHSIKKNLIGALLFDSGETAEATRLKRTARRRYTRRKNRICYLQEIFSNEMAKVDDSFFHRLEESFLVEEDKKHERHPIFGNIVDEVAYHEKYPTIYHLRKKLVDSTDKADLRLIYLALAHMIKFRGHFLIEGDLNPDNSDVDKLFIQLVQTYNQLFEENPINASGVDAKAILSARLSKSRRLENLIAQLPGEKKNGLFGNLIALSLGLTPNFKSNFDLAEDAKLQLSKDTYDDDLDNLLAQIGDQYADLFLAAKNLSDAILLSDILRVNTEITKAPLSASMIKRYDEHHQDLTLLKALVRQQLPEKYKEIFFDQSKNGYAGYIDGGASQEEFYKFIKPILEKMDGTEELLVKLNREDLLRKQRTFDNGSIPHQIHLGELHAILRRQEDFYPFLKDNREKIEKILTFRIPYYVGPLARGNSRFAWMTRKSEETITPWNFEEVVDKGASAQSFIERMTNFDKNLPNEKVLPKHSLLYEYFTVYNELTKVKYVTEGMRKPAFLSGEQKKAIVDLLFKTNRKVTVKQLKEDYFKKIECFDSVEISGVEDRFNASLGTYHDLLKIIKDKDFLDNEENEDILEDIVLTLTLFEDREMIEERLKTYAHLFDDKVMKQLKRRRYTGWGRLSRKLINGIRDKQSGKTILDFLKSDGFANRNFMQLIHDDSLTFKEDIQKAQVSGQGDSLHEHIANLAGSPAIKKGILQTVKVVDELVKVMGRHKPENIVIEMARENQTTQKGQKNSRERMKRIEEGIKELGSQILKEHPVENTQLQNEKLYLYYLQNGRDMYVDQELDINRLSDYDVDHIVPQSFLKDDSIDNKVLTRSDKARGKSDNVPSEEVVKKMKNYWRQLLNAKLITQRKFDNLTKAERGGLSELDKAGFIKRQLVETRQITKHVAQILDSRMNTKYDENDKLIREVKVITLKSKLVSDFRKDFQFYKVREINNYHHAHDAYLNAVVGTALIKKYPKLESEFVYGDYKVYDVRKMIAKSEQEIGKATAKYFFYSNIMNFFKTEITLANGEIRKRPLIETNGETGEIVWDKGRDFATVRKVLSMPQVNIVKKTEVQTGGFSKESILPKRNSDKLIARKKDWDPKKYGGFDSPTVAYSVLVVAKVEKGKSKKLKSVKELLGITIMERSSFEKNPIDFLEAKGYKEVKKDLIIKLPKYSLFELENGRKRMLASAGELQKGNELALPSKYVNFLYLASHYEKLKGSPEDNEQKQLFVEQHKHYLDEIIEQISEFSKRVILADANLDKVLSAYNKHRDKPIREQAENIIHLFTLTNLGAPAAFKYFDTTIDRKRYTSTKEVLDATLIHQSITGLYETRIDLSQLGGDGGGGGGGGTLGDQGSRGSDPLPEPRVTLTVEGIPTEFLVNTGAEHSVLTKPMGKMGSKRTVVAGATGSKVYPWTTKRLLKIGQKQVTHSFLVIPECPAPLLGRDLLTKLKAQIQFSTEGPQVTWEDRPAMCLVLNLEEEYRLHEKPVPPSIDPSWLQLFPMVWAEKAGMGLANQVPPVVVELKSDASPVAVRQYPMSKEAREGIRPHIQRFLDLGILVPCQSPWNTPLLPVKKPGTNDYRPVQDLREVNKRVQDIHPTVPNPYNLLSSLPPSHTWYSVLDLKDAFFCLKLHPNSQPLFAFEWRDPEKGNTGQLTWTRLPQGFKNSPTLFNEALHRDLASFRALNPQVVMLQYVDDLLVAAPTYRDCKEGTRRLLQELSKLGYRVSAKKAQLCREEVTYLGYLLKGGKRWLTPARKATVMKIPTPTTPRQVREFLGKAGFCRLFIPGFASLAAPLYPLTRPKVPFTWTEAHQEAFGRIKEALLSAPALALPDLTKPFALYVDEKEGVARGVLTQTLGPWRRPVAYLSKKLDPVASGWPTCLKAIAAVALLLKDADKLTLGQNVLVIAPHNLESIVRQPPDRWMTNARMTHYQSLLLNERVSFAPPAILNPATLLPVESDDTPIHICSEILAEETGTRPDLRDQPLPGVPAWYTDGSSFIMDGRRQAGAAIVDNKRTVWASNLPEGTSAQKAELIALTQALRLAEGKSINIYTDSRYAFATAHVHGAIYKQRGWLTSAGKDIKNKEEILALLEAIHLPKRVAIIHCPGHQRGTDPVATGNRKADEAAKQAAQSTRILTETTKNAGKRTADGSEFEKRTADGSEFESPKKKAKVE

SEQ ID NO: 1799 - protein, 2215 aa, synthetic construct
MPAAKRVKLDGGDKKYSIGLDIGTNSVGWAVITDEYKVPSKKFKVLGNTDRHSIKKNLIGALLFDSGETAEATRLKRTARRRYTRRKNRICYLQEIFSNEMAKVDDSFFHRLEESFLVEEDKKHERHPIFGNIVDEVAYHEKYPTIYHLRKKLVDSTDKADLRLIYLALAHMIKFRGHFLIEGDLNPDNSDVDKLFIQLVQTYNQLFEENPINASGVDAKAILSARLSKSRRLENLIAQLPGEKKNGLFGNLIALSLGLTPNFKSNFDLAEDAKLQLSKDTYDDDLDNLLAQIGDQYADLFLAAKNLSDAILLSDILRVNTEITKAPLSASMIKRYDEHHQDLTLLKALVRQQLPEKYKEIFFDQSKNGYAGYIDGGASQEEFYKFIKPILEKMDGTEELLVKLNREDLLRKQRTFDNGSIPHQIHLGELHAILRRQEDFYPFLKDNREKIEKILTFRIPYYVGPLARGNSRFAWMTRKSEETITPWNFEEVVDKGASAQSFIERMTNFDKNLPNEKVLPKHSLLYEYFTVYNELTKVKYVTEGMRKPAFLSGEQKKAIVDLLFKTNRKVTVKQLKEDYFKKIECFDSVEISGVEDRFNASLGTYHDLLKIIKDKDFLDNEENEDILEDIVLTLTLFEDREMIEERLKTYAHLFDDKVMKQLKRRRYTGWGRLSRKLINGIRDKQSGKTILDFLKSDGFANRNFMQLIHDDSLTFKEDIQKAQVSGQGDSLHEHIANLAGSPAIKKGILQTVKVVDELVKVMGRHKPENIVIEMARENQTTQKGQKNSRERMKRIEEGIKELGSQILKEHPVENTQLQNEKLYLYYLQNGRDMYVDQELDINRLSDYDVDHIVPQSFLKDDSIDNKVLTRSDKARGKSDNVPSEEVVKKMKNYWRQLLNAKLITQRKFDNLTKAERGGLSELDKAGFIKRQLVETRQITKHVAQILDSRMNTKYDENDKLIREVKVITLKSKLVSDFRKDFQFYKVREINNYHHAHDAYLNAVVGTALIKKYPKLESEFVYGDYKVYDVRKMIAKSEQEIGKATAKYFFYSNIMNFFKTEITLANGEIRKRPLIETNGETGEIVWDKGRDFATVRKVLSMPQVNIVKKTEVQTGGFSKESILPKRNSDKLIARKKDWDPKKYGGFDSPTVAYSVLVVAKVEKGKSKKLKSVKELLGITIMERSSFEKNPIDFLEAKGYKEVKKDLIIKLPKYSLFELENGRKRMLASAGELQKGNELALPSKYVNFLYLASHYEKLKGSPEDNEQKQLFVEQHKHYLDEIIEQISEFSKRVILADANLDKVLSAYNKHRDKPIREQAENIIHLFTLTNLGAPAAFKYFDTTIDRKRYTSTKEVLDATLIHQSITGLYETRIDLSQLGGDGGGGGGGGGGGGTLGDQGSRGSDPLPEPRVTLTVEGIPTEFLVNTGAEHSVLTKPMGKMGSKRTVVAGATGSKVYPWTTKRLLKIGQKQVTHSFLVIPECPAPLLGRDLLTKLKAQIQFSTEGPQVTWEDRPAMCLVLNLEEEYRLHEKPVPPSIDPSWLQLFPMVWAEKAGMGLANQVPPVVVELKSDASPVAVRQYPMSKEAREGIRPHIQRFLDLGILVPCQSPWNTPLLPVKKPGTNDYRPVQDLREVNKRVQDIHPTVPNPYNLLSSLPPSHTWYSVLDLKDAFFCLKLHPNSQPLFAFEWRDPEKGNTGQLTWTRLPQGFKNSPTLFNEALHRDLASFRALNPQVVMLQYVDDLLVAAPTYRDCKEGTRRLLQELSKLGYRVSAKKAQLCREEVTYLGYLLKGGKRWLTPARKATVMKIPTPTTPRQVREFLGKAGFCRLFIPGFASLAAPLYPLTRPKVPFTWTEAHQEAFGRIKEALLSAPALALPDLTKPFALYVDEKEGVARGVLTQTLGPWRRPVAYLSKKLDPVASGWPTCLKAIAAVALLLKDADKLTLGQNVLVIAPHNLESIVRQPPDRWMTNARMTHYQSLLLNERVSFAPPAILNPATLLPVESDDTPIHICSEILAEETGTRPDLRDQPLPGVPAWYTDGSSFIMDGRRQAGAAIVDNKRTVWASNLPEGTSAQKAELIALTQALRLAEGKSINIYTDSRYAFATAHVHGAIYKQRGWLTSAGKDIKNKEEILALLEAIHLPKRVAIIHCPGHQRGTDPVATGNRKADEAAKQAAQSTRILTETTKNAGKRTADGSEFEKRTADGSEFESPKKKAKVE

SEQ ID NO: 1800 - protein, 2223 aa, synthetic construct
MPAAKRVKLDGGDKKYSIGLDIGTNSVGWAVITDEYKVPSKKFKVLGNTDRHSIKKNLIGALLFDSGETAEATRLKRTARRRYTRRKNRICYLQEIFSNEMAKVDDSFFHRLEESFLVEEDKKHERHPIFGNIVDEVAYHEKYPTIYHLRKKLVDSTDKADLRLIYLALAHMIKFRGHFLIEGDLNPDNSDVDKLFIQLVQTYNQLFEENPINASGVDAKAILSARLSKSRRLENLIAQLPGEKKNGLFGNLIALSLGLTPNFKSNFDLAEDAKLQLSKDTYDDDLDNLLAQIGDQYADLFLAAKNLSDAILLSDILRVNTEITKAPLSASMIKRYDEHHQDLTLLKALVRQQLPEKYKEIFFDQSKNGYAGYIDGGASQEEFYKFIKPILEKMDGTEELLVKLNREDLLRKQRTFDNGSIPHQIHLGELHAILRRQEDFYPFLKDNREKIEKILTFRIPYYVGPLARGNSRFAWMTRKSEETITPWNFEEVVDKGASAQSFIERMTNFDKNLPNEKVLPKHSLLYEYFTVYNELTKVKYVTEGMRKPAFLSGEQKKAIVDLLFKTNRKVTVKQLKEDYFKKIECFDSVEISGVEDRFNASLGTYHDLLKIIKDKDFLDNEENEDILEDIVLTLTLFEDREMIEERLKTYAHLFDDKVMKQLKRRRYTGWGRLSRKLINGIRDKQSGKTILDFLKSDGFANRNFMQLIHDDSLTFKEDIQKAQVSGQGDSLHEHIANLAGSPAIKKGILQTVKVVDELVKVMGRHKPENIVIEMARENQTTQKGQKNSRERMKRIEEGIKELGSQILKEHPVENTQLQNEKLYLYYLQNGRDMYVDQELDINRLSDYDVDHIVPQSFLKDDSIDNKVLTRSDKARGKSDNVPSEEVVKKMKNYWRQLLNAKLITQRKFDNLTKAERGGLSELDKAGFIKRQLVETRQITKHVAQILDSRMNTKYDENDKLIREVKVITLKSKLVSDFRKDFQFYKVREINNYHHAHDAYLNAVVGTALIKKYPKLESEFVYGDYKVYDVRKMIAKSEQEIGKATAKYFFYSNIMNFFKTEITLANGEIRKRPLIETNGETGEIVWDKGRDFATVRKVLSMPQVNIVKKTEVQTGGFSKESILPKRNSDKLIARKKDWDPKKYGGFDSPTVAYSVLVVAKVEKGKSKKLKSVKELLGITIMERSSFEKNPIDFLEAKGYKEVKKDLIIKLPKYSLFELENGRKRMLASAGELQKGNELALPSKYVNFLYLASHYEKLKGSPEDNEQKQLFVEQHKHYLDEIIEQISEFSKRVILADANLDKVLSAYNKHRDKPIREQAENIIHLFTLTNLGAPAAFKYFDTTIDRKRYTSTKEVLDATLIHQSITGLYETRIDLSQLGGDGGSGSETPGTSESATPESGGTLGDQGSRGSDPLPEPRVTLTVEGIPTEFLVNTGAEHSVLTKPMGKMGSKRTVVAGATGSKVYPWTTKRLLKIGQKQVTHSFLVIPECPAPLLGRDLLTKLKAQIQFSTEGPQVTWEDRPAMCLVLNLEEEYRLHEKPVPPSIDPSWLQLFPMVWAEKAGMGLANQVPPVVVELKSDASPVAVRQYPMSKEAREGIRPHIQRFLDLGILVPCQSPWNTPLLPVKKPGTNDYRPVQDLREVNKRVQDIHPTVPNPYNLLSSLPPSHTWYSVLDLKDAFFCLKLHPNSQPLFAFEWRDPEKGNTGQLTWTRLPQGFKNSPTLFNEALHRDLASFRALNPQVVMLQYVDDLLVAAPTYRDCKEGTRRLLQELSKLGYRVSAKKAQLCREEVTYLGYLLKGGKRWLTPARKATVMKIPTPTTPRQVREFLGKAGFCRLFIPGFASLAAPLYPLTRPKVPFTWTEAHQEAFGRIKEALLSAPALALPDLTKPFALYVDEKEGVARGVLTQTLGPWRRPVAYLSKKLDPVASGWPTCLKAIAAVALLLKDADKLTLGQNVLVIAPHNLESIVRQPPDRWMTNARMTHYQSLLLNERVSFAPPAILNPATLLPVESDDTPIHICSEILAEETGTRPDLRDQPLPGVPAWYTDGSSFIMDGRRQAGAAIVDNKRTVWASNLPEGTSAQKAELIALTQALRLAEGKSINIYTDSRYAFATAHVHGAIYKQRGWLTSAGKDIKNKEEILALLEAIHLPKRVAIIHCPGHQRGTDPVATGNRKADEAAKQAAQSTRILTETTKNAGKRTADGSEFEKRTADGSEFESPKKKAKVE

SEQ ID NO: 1801 - protein, 2218 aa, synthetic construct
MPAAKRVKLDGGDKKYSIGLDIGTNSVGWAVITDEYKVPSKKFKVLGNTDRHSIKKNLIGALLFDSGETAEATRLKRTARRRYTRRKNRICYLQEIFSNEMAKVDDSFFHRLEESFLVEEDKKHERHPIFGNIVDEVAYHEKYPTIYHLRKKLVDSTDKADLRLIYLALAHMIKFRGHFLIEGDLNPDNSDVDKLFIQLVQTYNQLFEENPINASGVDAKAILSARLSKSRRLENLIAQLPGEKKNGLFGNLIALSLGLTPNFKSNFDLAEDAKLQLSKDTYDDDLDNLLAQIGDQYADLFLAAKNLSDAILLSDILRVNTEITKAPLSASMIKRYDEHHQDLTLLKALVRQQLPEKYKEIFFDQSKNGYAGYIDGGASQEEFYKFIKPILEKMDGTEELLVKLNREDLLRKQRTFDNGSIPHQIHLGELHAILRRQEDFYPFLKDNREKIEKILTFRIPYYVGPLARGNSRFAWMTRKSEETITPWNFEEVVDKGASAQSFIERMTNFDKNLPNEKVLPKHSLLYEYFTVYNELTKVKYVTEGMRKPAFLSGEQKKAIVDLLFKTNRKVTVKQLKEDYFKKIECFDSVEISGVEDRFNASLGTYHDLLKIIKDKDFLDNEENEDILEDIVLTLTLFEDREMIEERLKTYAHLFDDKVMKQLKRRRYTGWGRLSRKLINGIRDKQSGKTILDFLKSDGFANRNFMQLIHDDSLTFKEDIQKAQVSGQGDSLHEHIANLAGSPAIKKGILQTVKVVDELVKVMGRHKPENIVIEMARENQTTQKGQKNSRERMKRIEEGIKELGSQILKEHPVENTQLQNEKLYLYYLQNGRDMYVDQELDINRLSDYDVDHIVPQSFLKDDSIDNKVLTRSDKARGKSDNVPSEEVVKKMKNYWRQLLNAKLITQRKFDNLTKAERGGLSELDKAGFIKRQLVETRQITKHVAQILDSRMNTKYDENDKLIREVKVITLKSKLVSDFRKDFQFYKVREINNYHHAHDAYLNAVVGTALIKKYPKLESEFVYGDYKVYDVRKMIAKSEQEIGKATAKYFFYSNIMNFFKTEITLANGEIRKRPLIETNGETGEIVWDKGRDFATVRKVLSMPQVNIVKKTEVQTGGFSKESILPKRNSDKLIARKKDWDPKKYGGFDSPTVAYSVLVVAKVEKGKSKKLKSVKELLGITIMERSSFEKNPIDFLEAKGYKEVKKDLIIKLPKYSLFELENGRKRMLASAGELQKGNELALPSKYVNFLYLASHYEKLKGSPEDNEQKQLFVEQHKHYLDEIIEQISEFSKRVILADANLDKVLSAYNKHRDKPIREQAENIIHLFTLTNLGAPAAFKYFDTTIDRKRYTSTKEVLDATLIHQSITGLYETRIDLSQLGGDGGGSSGGSEAAAKGGTLGDQGSRGSDPLPEPRVTLTVEGIPTEFLVNTGAEHSVLTKPMGKMGSKRTVVAGATGSKVYPWTTKRLLKIGQKQVTHSFLVIPECPAPLLGRDLLTKLKAQIQFSTEGPQVTWEDRPAMCLVLNLEEEYRLHEKPVPPSIDPSWLQLFPMVWAEKAGMGLANQVPPVVVELKSDASPVAVRQYPMSKEAREGIRPHIQRFLDLGILVPCQSPWNTPLLPVKKPGTNDYRPVQDLREVNKRVQDIHPTVPNPYNLLSSLPPSHTWYSVLDLKDAFFCLKLHPNSQPLFAFEWRDPEKGNTGQLTWTRLPQGFKNSPTLFNEALHRDLASFRALNPQVVMLQYVDDLLVAAPTYRDCKEGTRRLLQELSKLGYRVSAKKAQLCREEVTYLGYLLKGGKRWLTPARKATVMKIPTPTTPRQVREFLGKAGFCRLFIPGFASLAAPLYPLTRPKVPFTWTEAHQEAFGRIKEALLSAPALALPDLTKPFALYVDEKEGVARGVLTQTLGPWRRPVAYLSKKLDPVASGWPTCLKAIAAVALLLKDADKLTLGQNVLVIAPHNLESIVRQPPDRWMTNARMTHYQSLLLNERVSFAPPAILNPATLLPVESDDTPIHICSEILAEETGTRPDLRDQPLPGVPAWYTDGSSFIMDGRRQAGAAIVDNKRTVWASNLPEGTSAQKAELIALTQALRLAEGKSINIYTDSRYAFATAHVHGAIYKQRGWLTSAGKDIKNKEEILALLEAIHLPKRVAIIHCPGHQRGTDPVATGNRKADEAAKQAAQSTRILTETTKNAGKRTADGSEFEKRTADGSEFESPKKKAKVE

SEQ ID NO: 1802 - protein, 2216 aa, synthetic construct
MPAAKRVKLDGGDKKYSIGLDIGTNSVGWAVITDEYKVPSKKFKVLGNTDRHSIKKNLIGALLFDSGETAEATRLKRTARRRYTRRKNRICYLQEIFSNEMAKVDDSFFHRLEESFLVEEDKKHERHPIFGNIVDEVAYHEKYPTIYHLRKKLVDSTDKADLRLIYLALAHMIKFRGHFLIEGDLNPDNSDVDKLFIQLVQTYNQLFEENPINASGVDAKAILSARLSKSRRLENLIAQLPGEKKNGLFGNLIALSLGLTPNFKSNFDLAEDAKLQLSKDTYDDDLDNLLAQIGDQYADLFLAAKNLSDAILLSDILRVNTEITKAPLSASMIKRYDEHHQDLTLLKALVRQQLPEKYKEIFFDQSKNGYAGYIDGGASQEEFYKFIKPILEKMDGTEELLVKLNREDLLRKQRTFDNGSIPHQIHLGELHAILRRQEDFYPFLKDNREKIEKILTFRIPYYVGPLARGNSRFAWMTRKSEETITPWNFEEVVDKGASAQSFIERMTNFDKNLPNEKVLPKHSLLYEYFTVYNELTKVKYVTEGMRKPAFLSGEQKKAIVDLLFKTNRKVTVKQLKEDYFKKIECFDSVEISGVEDRFNASLGTYHDLLKIIKDKDFLDNEENEDILEDIVLTLTLFEDREMIEERLKTYAHLFDDKVMKQLKRRRYTGWGRLSRKLINGIRDKQSGKTILDFLKSDGFANRNFMQLIHDDSLTFKEDIQKAQVSGQGDSLHEHIANLAGSPAIKKGILQTVKVVDELVKVMGRHKPENIVIEMARENQTTQKGQKNSRERMKRIEEGIKELGSQILKEHPVENTQLQNEKLYLYYLQNGRDMYVDQELDINRLSDYDVDHIVPQSFLKDDSIDNKVLTRSDKARGKSDNVPSEEVVKKMKNYWRQLLNAKLITQRKFDNLTKAERGGLSELDKAGFIKRQLVETRQITKHVAQILDSRMNTKYDENDKLIREVKVITLKSKLVSDFRKDFQFYKVREINNYHHAHDAYLNAVVGTALIKKYPKLESEFVYGDYKVYDVRKMIAKSEQEIGKATAKYFFYSNIMNFFKTEITLANGEIRKRPLIETNGETGEIVWDKGRDFATVRKVLSMPQVNIVKKTEVQTGGFSKESILPKRNSDKLIARKKDWDPKKYGGFDSPTVAYSVLVVAKVEKGKSKKLKSVKELLGITIMERSSFEKNPIDFLEAKGYKEVKKDLIIKLPKYSLFELENGRKRMLASAGELQKGNELALPSKYVNFLYLASHYEKLKGSPEDNEQKQLFVEQHKHYLDEIIEQISEFSKRVILADANLDKVLSAYNKHRDKPIREQAENIIHLFTLTNLGAPAAFKYFDTTIDRKRYTSTKEVLDATLIHQSITGLYETRIDLSQLGGDGGGGSPAPGSSGGTLGDQGSRGSDPLPEPRVTLTVEGIPTEFLVNTGAEHSVLTKPMGKMGSKRTVVAGATGSKVYPWTTKRLLKIGQKQVTHSFLVIPECPAPLLGRDLLTKLKAQIQFSTEGPQVTWEDRPAMCLVLNLEEEYRLHEKPVPPSIDPSWLQLFPMVWAEKAGMGLANQVPPVVVELKSDASPVAVRQYPMSKEAREGIRPHIQRFLDLGILVPCQSPWNTPLLPVKKPGTNDYRPVQDLREVNKRVQDIHPTVPNPYNLLSSLPPSHTWYSVLDLKDAFFCLKLHPNSQPLFAFEWRDPEKGNTGQLTWTRLPQGFKNSPTLFNEALHRDLASFRALNPQVVMLQYVDDLLVAAPTYRDCKEGTRRLLQELSKLGYRVSAKKAQLCREEVTYLGYLLKGGKRWLTPARKATVMKIPTPTTPRQVREFLGKAGFCRLFIPGFASLAAPLYPLTRPKVPFTWTEAHQEAFGRIKEALLSAPALALPDLTKPFALYVDEKEGVARGVLTQTLGPWRRPVAYLSKKLDPVASGWPTCLKAIAAVALLLKDADKLTLGQNVLVIAPHNLESIVRQPPDRWMTNARMTHYQSLLLNERVSFAPPAILNPATLLPVESDDTPIHICSEILAEETGTRPDLRDQPLPGVPAWYTDGSSFIMDGRRQAGAAIVDNKRTVWASNLPEGTSAQKAELIALTQALRLAEGKSINIYTDSRYAFATAHVHGAIYKQRGWLTSAGKDIKNKEEILALLEAIHLPKRVAIIHCPGHQRGTDPVATGNRKADEAAKQAAQSTRILTETTKNAGKRTADGSEFEKRTADGSEFESPKKKAKVE

SEQ ID NO: 1803 - protein, 2237 aa, synthetic construct
MPAAKRVKLDGGDKKYSIGLDIGTNSVGWAVITDEYKVPSKKFKVLGNTDRHSIKKNLIGALLFDSGETAEATRLKRTARRRYTRRKNRICYLQEIFSNEMAKVDDSFFHRLEESFLVEEDKKHERHPIFGNIVDEVAYHEKYPTIYHLRKKLVDSTDKADLRLIYLALAHMIKFRGHFLIEGDLNPDNSDVDKLFIQLVQTYNQLFEENPINASGVDAKAILSARLSKSRRLENLIAQLPGEKKNGLFGNLIALSLGLTPNFKSNFDLAEDAKLQLSKDTYDDDLDNLLAQIGDQYADLFLAAKNLSDAILLSDILRVNTEITKAPLSASMIKRYDEHHQDLTLLKALVRQQLPEKYKEIFFDQSKNGYAGYIDGGASQEEFYKFIKPILEKMDGTEELLVKLNREDLLRKQRTFDNGSIPHQIHLGELHAILRRQEDFYPFLKDNREKIEKILTFRIPYYVGPLARGNSRFAWMTRKSEETITPWNFEEVVDKGASAQSFIERMTNFDKNLPNEKVLPKHSLLYEYFTVYNELTKVKYVTEGMRKPAFLSGEQKKAIVDLLFKTNRKVTVKQLKEDYFKKIECFDSVEISGVEDRFNASLGTYHDLLKIIKDKDFLDNEENEDILEDIVLTLTLFEDREMIEERLKTYAHLFDDKVMKQLKRRRYTGWGRLSRKLINGIRDKQSGKTILDFLKSDGFANRNFMQLIHDDSLTFKEDIQKAQVSGQGDSLHEHIANLAGSPAIKKGILQTVKVVDELVKVMGRHKPENIVIEMARENQTTQKGQKNSRERMKRIEEGIKELGSQILKEHPVENTQLQNEKLYLYYLQNGRDMYVDQELDINRLSDYDVDHIVPQSFLKDDSIDNKVLTRSDKARGKSDNVPSEEVVKKMKNYWRQLLNAKLITQRKFDNLTKAERGGLSELDKAGFIKRQLVETRQITKHVAQILDSRMNTKYDENDKLIREVKVITLKSKLVSDFRKDFQFYKVREINNYHHAHDAYLNAVVGTALIKKYPKLESEFVYGDYKVYDVRKMIAKSEQEIGKATAKYFFYSNIMNFFKTEITLANGEIRKRPLIETNGETGEIVWDKGRDFATVRKVLSMPQVNIVKKTEVQTGGFSKESILPKRNSDKLIARKKDWDPKKYGGFDSPTVAYSVLVVAKVEKGKSKKLKSVKELLGITIMERSSFEKNPIDFLEAKGYKEVKKDLIIKLPKYSLFELENGRKRMLASAGELQKGNELALPSKYVNFLYLASHYEKLKGSPEDNEQKQLFVEQHKHYLDEIIEQISEFSKRVILADANLDKVLSAYNKHRDKPIREQAENIIHLFTLTNLGAPAAFKYFDTTIDRKRYTSTKEVLDATLIHQSITGLYETRIDLSQLGGDGGGGGGSGGGGSGGGGSGGGGSGGGGSGGGGSGGTLGDQGSRGSDPLPEPRVTLTVEGIPTEFLVNTGAEHSVLTKPMGKMGSKRTVVAGATGSKVYPWTTKRLLKIGQKQVTHSFLVIPECPAPLLGRDLLTKLKAQIQFSTEGPQVTWEDRPAMCLVLNLEEEYRLHEKPVPPSIDPSWLQLFPMVWAEKAGMGLANQVPPVVVELKSDASPVAVRQYPMSKEAREGIRPHIQRFLDLGILVPCQSPWNTPLLPVKKPGTNDYRPVQDLREVNKRVQDIHPTVPNPYNLLSSLPPSHTWYSVLDLKDAFFCLKLHPNSQPLFAFEWRDPEKGNTGQLTWTRLPQGFKNSPTLFNEALHRDLASFRALNPQVVMLQYVDDLLVAAPTYRDCKEGTRRLLQELSKLGYRVSAKKAQLCREEVTYLGYLLKGGKRWLTPARKATVMKIPTPTTPRQVREFLGKAGFCRLFIPGFASLAAPLYPLTRPKVPFTWTEAHQEAFGRIKEALLSAPALALPDLTKPFALYVDEKEGVARGVLTQTLGPWRRPVAYLSKKLDPVASGWPTCLKAIAAVALLLKDADKLTLGQNVLVIAPHNLESIVRQPPDRWMTNARMTHYQSLLLNERVSFAPPAILNPATLLPVESDDTPIHICSEILAEETGTRPDLRDQPLPGVPAWYTDGSSFIMDGRRQAGAAIVDNKRTVWASNLPEGTSAQKAELIALTQALRLAEGKSINIYTDSRYAFATAHVHGAIYKQRGWLTSAGKDIKNKEEILALLEAIHLPKRVAIIHCPGHQRGTDPVATGNRKADEAAKQAAQSTRILTETTKNAGKRTADGSEFEKRTADGSEFESPKKKAKVE

SEQ ID NO: 1804 - protein, 2218 aa, synthetic construct
MPAAKRVKLDGGDKKYSIGLDIGTNSVGWAVITDEYKVPSKKFKVLGNTDRHSIKKNLIGALLFDSGETAEATRLKRTARRRYTRRKNRICYLQEIFSNEMAKVDDSFFHRLEESFLVEEDKKHERHPIFGNIVDEVAYHEKYPTIYHLRKKLVDSTDKADLRLIYLALAHMIKFRGHFLIEGDLNPDNSDVDKLFIQLVQTYNQLFEENPINASGVDAKAILSARLSKSRRLENLIAQLPGEKKNGLFGNLIALSLGLTPNFKSNFDLAEDAKLQLSKDTYDDDLDNLLAQIGDQYADLFLAAKNLSDAILLSDILRVNTEITKAPLSASMIKRYDEHHQDLTLLKALVRQQLPEKYKEIFFDQSKNGYAGYIDGGASQEEFYKFIKPILEKMDGTEELLVKLNREDLLRKQRTFDNGSIPHQIHLGELHAILRRQEDFYPFLKDNREKIEKILTFRIPYYVGPLARGNSRFAWMTRKSEETITPWNFEEVVDKGASAQSFIERMTNFDKNLPNEKVLPKHSLLYEYFTVYNELTKVKYVTEGMRKPAFLSGEQKKAIVDLLFKTNRKVTVKQLKEDYFKKIECFDSVEISGVEDRFNASLGTYHDLLKIIKDKDFLDNEENEDILEDIVLTLTLFEDREMIEERLKTYAHLFDDKVMKQLKRRRYTGWGRLSRKLINGIRDKQSGKTILDFLKSDGFANRNFMQLIHDDSLTFKEDIQKAQVSGQGDSLHEHIANLAGSPAIKKGILQTVKVVDELVKVMGRHKPENIVIEMARENQTTQKGQKNSRERMKRIEEGIKELGSQILKEHPVENTQLQNEKLYLYYLQNGRDMYVDQELDINRLSDYDVDHIVPQSFLKDDSIDNKVLTRSDKARGKSDNVPSEEVVKKMKNYWRQLLNAKLITQRKFDNLTKAERGGLSELDKAGFIKRQLVETRQITKHVAQILDSRMNTKYDENDKLIREVKVITLKSKLVSDFRKDFQFYKVREINNYHHAHDAYLNAVVGTALIKKYPKLESEFVYGDYKVYDVRKMIAKSEQEIGKATAKYFFYSNIMNFFKTEITLANGEIRKRPLIETNGETGEIVWDKGRDFATVRKVLSMPQVNIVKKTEVQTGGFSKESILPKRNSDKLIARKKDWDPKKYGGFDSPTVAYSVLVVAKVEKGKSKKLKSVKELLGITIMERSSFEKNPIDFLEAKGYKEVKKDLIIKLPKYSLFELENGRKRMLASAGELQKGNELALPSKYVNFLYLASHYEKLKGSPEDNEQKQLFVEQHKHYLDEIIEQISEFSKRVILADANLDKVLSAYNKHRDKPIREQAENIIHLFTLTNLGAPAAFKYFDTTIDRKRYTSTKEVLDATLIHQSITGLYETRIDLSQLGGDGGEAAAKGSSPAPGGTLGDQGSRGSDPLPEPRVTLTVEGIPTEFLVNTGAEHSVLTKPMGKMGSKRTVVAGATGSKVYPWTTKRLLKIGQKQVTHSFLVIPECPAPLLGRDLLTKLKAQIQFSTEGPQVTWEDRPAMCLVLNLEEEYRLHEKPVPPSIDPSWLQLFPMVWAEKAGMGLANQVPPVVVELKSDASPVAVRQYPMSKEAREGIRPHIQRFLDLGILVPCQSPWNTPLLPVKKPGTNDYRPVQDLREVNKRVQDIHPTVPNPYNLLSSLPPSHTWYSVLDLKDAFFCLKLHPNSQPLFAFEWRDPEKGNTGQLTWTRLPQGFKNSPTLFNEALHRDLASFRALNPQVVMLQYVDDLLVAAPTYRDCKEGTRRLLQELSKLGYRVSAKKAQLCREEVTYLGYLLKGGKRWLTPARKATVMKIPTPTTPRQVREFLGKAGFCRLFIPGFASLAAPLYPLTRPKVPFTWTEAHQEAFGRIKEALLSAPALALPDLTKPFALYVDEKEGVARGVLTQTLGPWRRPVAYLSKKLDPVASGWPTCLKAIAAVALLLKDADKLTLGQNVLVIAPHNLESIVRQPPDRWMTNARMTHYQSLLLNERVSFAPPAILNPATLLPVESDDTPIHICSEILAEETGTRPDLRDQPLPGVPAWYTDGSSFIMDGRRQAGAAIVDNKRTVWASNLPEGTSAQKAELIALTQALRLAEGKSINIYTDSRYAFATAHVHGAIYKQRGWLTSAGKDIKNKEEILALLEAIHLPKRVAIIHCPGHQRGTDPVATGNRKADEAAKQAAQSTRILTETTKNAGKRTADGSEFEKRTADGSEFESPKKKAKVE

SEQ ID NO: 1805 - protein, 2218 aa, synthetic construct
MPAAKRVKLDGGDKKYSIGLDIGTNSVGWAVITDEYKVPSKKFKVLGNTDRHSIKKNLIGALLFDSGETAEATRLKRTARRRYTRRKNRICYLQEIFSNEMAKVDDSFFHRLEESFLVEEDKKHERHPIFGNIVDEVAYHEKYPTIYHLRKKLVDSTDKADLRLIYLALAHMIKFRGHFLIEGDLNPDNSDVDKLFIQLVQTYNQLFEENPINASGVDAKAILSARLSKSRRLENLIAQLPGEKKNGLFGNLIALSLGLTPNFKSNFDLAEDAKLQLSKDTYDDDLDNLLAQIGDQYADLFLAAKNLSDAILLSDILRVNTEITKAPLSASMIKRYDEHHQDLTLLKALVRQQLPEKYKEIFFDQSKNGYAGYIDGGASQEEFYKFIKPILEKMDGTEELLVKLNREDLLRKQRTFDNGSIPHQIHLGELHAILRRQEDFYPFLKDNREKIEKILTFRIPYYVGPLARGNSRFAWMTRKSEETITPWNFEEVVDKGASAQSFIERMTNFDKNLPNEKVLPKHSLLYEYFTVYNELTKVKYVTEGMRKPAFLSGEQKKAIVDLLFKTNRKVTVKQLKEDYFKKIECFDSVEISGVEDRFNASLGTYHDLLKIIKDKDFLDNEENEDILEDIVLTLTLFEDREMIEERLKTYAHLFDDKVMKQLKRRRYTGWGRLSRKLINGIRDKQSGKTILDFLKSDGFANRNFMQLIHDDSLTFKEDIQKAQVSGQGDSLHEHIANLAGSPAIKKGILQTVKVVDELVKVMGRHKPENIVIEMARENQTTQKGQKNSRERMKRIEEGIKELGSQILKEHPVENTQLQNEKLYLYYLQNGRDMYVDQELDINRLSDYDVDHIVPQSFLKDDSIDNKVLTRSDKARGKSDNVPSEEVVKKMKNYWRQLLNAKLITQRKFDNLTKAERGGLSELDKAGFIKRQLVETRQITKHVAQILDSRMNTKYDENDKLIREVKVITLKSKLVSDFRKDFQFYKVREINNYHHAHDAYLNAVVGTALIKKYPKLESEFVYGDYKVYDVRKMIAKSEQEIGKATAKYFFYSNIMNFFKTEITLANGEIRKRPLIETNGETGEIVWDKGRDFATVRKVLSMPQVNIVKKTEVQTGGFSKESILPKRNSDKLIARKKDWDPKKYGGFDSPTVAYSVLVVAKVEKGKSKKLKSVKELLGITIMERSSFEKNPIDFLEAKGYKEVKKDLIIKLPKYSLFELENGRKRMLASAGELQKGNELALPSKYVNFLYLASHYEKLKGSPEDNEQKQLFVEQHKHYLDEIIEQISEFSKRVILADANLDKVLSAYNKHRDKPIREQAENIIHLFTLTNLGAPAAFKYFDTTIDRKRYTSTKEVLDATLIHQSITGLYETRIDLSQLGGDGGGGSGSSEAAAKGGTLGDQGSRGSDPLPEPRVTLTVEGIPTEFLVNTGAEHSVLTKPMGKMGSKRTVVAGATGSKVYPWTTKRLLKIGQKQVTHSFLVIPECPAPLLGRDLLTKLKAQIQFSTEGPQVTWEDRPAMCLVLNLEEEYRLHEKPVPPSIDPSWLQLFPMVWAEKAGMGLANQVPPVVVELKSDASPVAVRQYPMSKEAREGIRPHIQRFLDLGILVPCQSPWNTPLLPVKKPGTNDYRPVQDLREVNKRVQDIHPTVPNPYNLLSSLPPSHTWYSVLDLKDAFFCLKLHPNSQPLFAFEWRDPEKGNTGQLTWTRLPQGFKNSPTLFNEALHRDLASFRALNPQVVMLQYVDDLLVAAPTYRDCKEGTRRLLQELSKLGYRVSAKKAQLCREEVTYLGYLLKGGKRWLTPARKATVMKIPTPTTPRQVREFLGKAGFCRLFIPGFASLAAPLYPLTRPKVPFTWTEAHQEAFGRIKEALLSAPALALPDLTKPFALYVDEKEGVARGVLTQTLGPWRRPVAYLSKKLDPVASGWPTCLKAIAAVALLLKDADKLTLGQNVLVIAPHNLESIVRQPPDRWMTNARMTHYQSLLLNERVSFAPPAILNPATLLPVESDDTPIHICSEILAEETGTRPDLRDQPLPGVPAWYTDGSSFIMDGRRQAGAAIVDNKRTVWASNLPEGTSAQKAELIALTQALRLAEGKSINIYTDSRYAFATAHVHGAIYKQRGWLTSAGKDIKNKEEILALLEAIHLPKRVAIIHCPGHQRGTDPVATGNRKADEAAKQAAQSTRILTETTKNAGKRTADGSEFEKRTADGSEFESPKKKAKVE

SEQ ID NO: 1806 - protein, 2216 aa, synthetic construct
MPAAKRVKLDGGDKKYSIGLDIGTNSVGWAVITDEYKVPSKKFKVLGNTDRHSIKKNLIGALLFDSGETAEATRLKRTARRRYTRRKNRICYLQEIFSNEMAKVDDSFFHRLEESFLVEEDKKHERHPIFGNIVDEVAYHEKYPTIYHLRKKLVDSTDKADLRLIYLALAHMIKFRGHFLIEGDLNPDNSDVDKLFIQLVQTYNQLFEENPINASGVDAKAILSARLSKSRRLENLIAQLPGEKKNGLFGNLIALSLGLTPNFKSNFDLAEDAKLQLSKDTYDDDLDNLLAQIGDQYADLFLAAKNLSDAILLSDILRVNTEITKAPLSASMIKRYDEHHQDLTLLKALVRQQLPEKYKEIFFDQSKNGYAGYIDGGASQEEFYKFIKPILEKMDGTEELLVKLNREDLLRKQRTFDNGSIPHQIHLGELHAILRRQEDFYPFLKDNREKIEKILTFRIPYYVGPLARGNSRFAWMTRKSEETITPWNFEEVVDKGASAQSFIERMTNFDKNLPNEKVLPKHSLLYEYFTVYNELTKVKYVTEGMRKPAFLSGEQKKAIVDLLFKTNRKVTVKQLKEDYFKKIECFDSVEISGVEDRFNASLGTYHDLLKIIKDKDFLDNEENEDILEDIVLTLTLFEDREMIEERLKTYAHLFDDKVMKQLKRRRYTGWGRLSRKLINGIRDKQSGKTILDFLKSDGFANRNFMQLIHDDSLTFKEDIQKAQVSGQGDSLHEHIANLAGSPAIKKGILQTVKVVDELVKVMGRHKPENIVIEMARENQTTQKGQKNSRERMKRIEEGIKELGSQILKEHPVENTQLQNEKLYLYYLQNGRDMYVDQELDINRLSDYDVDHIVPQSFLKDDSIDNKVLTRSDKARGKSDNVPSEEVVKKMKNYWRQLLNAKLITQRKFDNLTKAERGGLSELDKAGFIKRQLVETRQITKHVAQILDSRMNTKYDENDKLIREVKVITLKSKLVSDFRKDFQFYKVREINNYHHAHDAYLNAVVGTALIKKYPKLESEFVYGDYKVYDVRKMIAKSEQEIGKATAKYFFYSNIMNFFKTEITLANGEIRKRPLIETNGETGEIVWDKGRDFATVRKVLSMPQVNIVKKTEVQTGGFSKESILPKRNSDKLIARKKDWDPKKYGGFDSPTVAYSVLVVAKVEKGKSKKLKSVKELLGITIMERSSFEKNPIDFLEAKGYKEVKKDLIIKLPKYSLFELENGRKRMLASAGELQKGNELALPSKYVNFLYLASHYEKLKGSPEDNEQKQLFVEQHKHYLDEIIEQISEFSKRVILADANLDKVLSAYNKHRDKPIREQAENIIHLFTLTNLGAPAAFKYFDTTIDRKRYTSTKEVLDATLIHQSITGLYETRIDLSQLGGDGGPAPGSSGGGGGTLGDQGSRGSDPLPEPRVTLTVEGIPTEFLVNTGAEHSVLTKPMGKMGSKRTVVAGATGSKVYPWTTKRLLKIGQKQVTHSFLVIPECPAPLLGRDLLTKLKAQIQFSTEGPQVTWEDRPAMCLVLNLEEEYRLHEKPVPPSIDPSWLQLFPMVWAEKAGMGLANQVPPVVVELKSDASPVAVRQYPMSKEAREGIRPHIQRFLDLGILVPCQSPWNTPLLPVKKPGTNDYRPVQDLREVNKRVQDIHPTVPNPYNLLSSLPPSHTWYSVLDLKDAFFCLKLHPNSQPLFAFEWRDPEKGNTGQLTWTRLPQGFKNSPTLFNEALHRDLASFRALNPQVVMLQYVDDLLVAAPTYRDCKEGTRRLLQELSKLGYRVSAKKAQLCREEVTYLGYLLKGGKRWLTPARKATVMKIPTPTTPRQVREFLGKAGFCRLFIPGFASLAAPLYPLTRPKVPFTWTEAHQEAFGRIKEALLSAPALALPDLTKPFALYVDEKEGVARGVLTQTLGPWRRPVAYLSKKLDPVASGWPTCLKAIAAVALLLKDADKLTLGQNVLVIAPHNLESIVRQPPDRWMTNARMTHYQSLLLNERVSFAPPAILNPATLLPVESDDTPIHICSEILAEETGTRPDLRDQPLPGVPAWYTDGSSFIMDGRRQAGAAIVDNKRTVWASNLPEGTSAQKAELIALTQALRLAEGKSINIYTDSRYAFATAHVHGAIYKQRGWLTSAGKDIKNKEEILALLEAIHLPKRVAIIHCPGHQRGTDPVATGNRKADEAAKQAAQSTRILTETTKNAGKRTADGSEFEKRTADGSEFESPKKKAKVE

SEQ ID NO: 1807 - protein, 2213 aa, synthetic construct
MPAAKRVKLDGGDKKYSIGLDIGTNSVGWAVITDEYKVPSKKFKVLGNTDRHSIKKNLIGALLFDSGETAEATRLKRTARRRYTRRKNRICYLQEIFSNEMAKVDDSFFHRLEESFLVEEDKKHERHPIFGNIVDEVAYHEKYPTIYHLRKKLVDSTDKADLRLIYLALAHMIKFRGHFLIEGDLNPDNSDVDKLFIQLVQTYNQLFEENPINASGVDAKAILSARLSKSRRLENLIAQLPGEKKNGLFGNLIALSLGLTPNFKSNFDLAEDAKLQLSKDTYDDDLDNLLAQIGDQYADLFLAAKNLSDAILLSDILRVNTEITKAPLSASMIKRYDEHHQDLTLLKALVRQQLPEKYKEIFFDQSKNGYAGYIDGGASQEEFYKFIKPILEKMDGTEELLVKLNREDLLRKQRTFDNGSIPHQIHLGELHAILRRQEDFYPFLKDNREKIEKILTFRIPYYVGPLARGNSRFAWMTRKSEETITPWNFEEVVDKGASAQSFIERMTNFDKNLPNEKVLPKHSLLYEYFTVYNELTKVKYVTEGMRKPAFLSGEQKKAIVDLLFKTNRKVTVKQLKEDYFKKIECFDSVEISGVEDRFNASLGTYHDLLKIIKDKDFLDNEENEDILEDIVLTLTLFEDREMIEERLKTYAHLFDDKVMKQLKRRRYTGWGRLSRKLINGIRDKQSGKTILDFLKSDGFANRNFMQLIHDDSLTFKEDIQKAQVSGQGDSLHEHIANLAGSPAIKKGILQTVKVVDELVKVMGRHKPENIVIEMARENQTTQKGQKNSRERMKRIEEGIKELGSQILKEHPVENTQLQNEKLYLYYLQNGRDMYVDQELDINRLSDYDVDHIVPQSFLKDDSIDNKVLTRSDKARGKSDNVPSEEVVKKMKNYWRQLLNAKLITQRKFDNLTKAERGGLSELDKAGFIKRQLVETRQITKHVAQILDSRMNTKYDENDKLIREVKVITLKSKLVSDFRKDFQFYKVREINNYHHAHDAYLNAVVGTALIKKYPKLESEFVYGDYKVYDVRKMIAKSEQEIGKATAKYFFYSNIMNFFKTEITLANGEIRKRPLIETNGETGEIVWDKGRDFATVRKVLSMPQVNIVKKTEVQTGGFSKESILPKRNSDKLIARKKDWDPKKYGGFDSPTVAYSVLVVAKVEKGKSKKLKSVKELLGITIMERSSFEKNPIDFLEAKGYKEVKKDLIIKLPKYSLFELENGRKRMLASAGELQKGNELALPSKYVNFLYLASHYEKLKGSPEDNEQKQLFVEQHKHYLDEIIEQISEFSKRVILADANLDKVLSAYNKHRDKPIREQAENIIHLFTLTNLGAPAAFKYFDTTIDRKRYTSTKEVLDATLIHQSITGLYETRIDLSQLGGDGGGGGPAPGGTLGDQGSRGSDPLPEPRVTLTVEGIPTEFLVNTGAEHSVLTKPMGKMGSKRTVVAGATGSKVYPWTTKRLLKIGQKQVTHSFLVIPECPAPLLGRDLLTKLKAQIQFSTEGPQVTWEDRPAMCLVLNLEEEYRLHEKPVPPSIDPSWLQLFPMVWAEKAGMGLANQVPPVVVELKSDASPVAVRQYPMSKEAREGIRPHIQRFLDLGILVPCQSPWNTPLLPVKKPGTNDYRPVQDLREVNKRVQDIHPTVPNPYNLLSSLPPSHTWYSVLDLKDAFFCLKLHPNSQPLFAFEWRDPEKGNTGQLTWTRLPQGFKNSPTLFNEALHRDLASFRALNPQVVMLQYVDDLLVAAPTYRDCKEGTRRLLQELSKLGYRVSAKKAQLCREEVTYLGYLLKGGKRWLTPARKATVMKIPTPTTPRQVREFLGKAGFCRLFIPGFASLAAPLYPLTRPKVPFTWTEAHQEAFGRIKEALLSAPALALPDLTKPFALYVDEKEGVARGVLTQTLGPWRRPVAYLSKKLDPVASGWPTCLKAIAAVALLLKDADKLTLGQNVLVIAPHNLESIVRQPPDRWMTNARMTHYQSLLLNERVSFAPPAILNPATLLPVESDDTPIHICSEILAEETGTRPDLRDQPLPGVPAWYTDGSSFIMDGRRQAGAAIVDNKRTVWASNLPEGTSAQKAELIALTQALRLAEGKSINIYTDSRYAFATAHVHGAIYKQRGWLTSAGKDIKNKEEILALLEAIHLPKRVAIIHCPGHQRGTDPVATGNRKADEAAKQAAQSTRILTETTKNAGKRTADGSEFEKRTADGSEFESPKKKAKVE

SEQ ID NO: 1808 - protein, 2213 aa, synthetic construct
MPAAKRVKLDGGDKKYSIGLDIGTNSVGWAVITDEYKVPSKKFKVLGNTDRHSIKKNLIGALLFDSGETAEATRLKRTARRRYTRRKNRICYLQEIFSNEMAKVDDSFFHRLEESFLVEEDKKHERHPIFGNIVDEVAYHEKYPTIYHLRKKLVDSTDKADLRLIYLALAHMIKFRGHFLIEGDLNPDNSDVDKLFIQLVQTYNQLFEENPINASGVDAKAILSARLSKSRRLENLIAQLPGEKKNGLFGNLIALSLGLTPNFKSNFDLAEDAKLQLSKDTYDDDLDNLLAQIGDQYADLFLAAKNLSDAILLSDILRVNTEITKAPLSASMIKRYDEHHQDLTLLKALVRQQLPEKYKEIFFDQSKNGYAGYIDGGASQEEFYKFIKPILEKMDGTEELLVKLNREDLLRKQRTFDNGSIPHQIHLGELHAILRRQEDFYPFLKDNREKIEKILTFRIPYYVGPLARGNSRFAWMTRKSEETITPWNFEEVVDKGASAQSFIERMTNFDKNLPNEKVLPKHSLLYEYFTVYNELTKVKYVTEGMRKPAFLSGEQKKAIVDLLFKTNRKVTVKQLKEDYFKKIECFDSVEISGVEDRFNASLGTYHDLLKIIKDKDFLDNEENEDILEDIVLTLTLFEDREMIEERLKTYAHLFDDKVMKQLKRRRYTGWGRLSRKLINGIRDKQSGKTILDFLKSDGFANRNFMQLIHDDSLTFKEDIQKAQVSGQGDSLHEHIANLAGSPAIKKGILQTVKVVDELVKVMGRHKPENIVIEMARENQTTQKGQKNSRERMKRIEEGIKELGSQILKEHPVENTQLQNEKLYLYYLQNGRDMYVDQELDINRLSDYDVDHIVPQSFLKDDSIDNKVLTRSDKARGKSDNVPSEEVVKKMKNYWRQLLNAKLITQRKFDNLTKAERGGLSELDKAGFIKRQLVETRQITKHVAQILDSRMNTKYDENDKLIREVKVITLKSKLVSDFRKDFQFYKVREINNYHHAHDAYLNAVVGTALIKKYPKLESEFVYGDYKVYDVRKMIAKSEQEIGKATAKYFFYSNIMNFFKTEITLANGEIRKRPLIETNGETGEIVWDKGRDFATVRKVLSMPQVNIVKKTEVQTGGFSKESILPKRNSDKLIARKKDWDPKKYGGFDSPTVAYSVLVVAKVEKGKSKKLKSVKELLGITIMERSSFEKNPIDFLEAKGYKEVKKDLIIKLPKYSLFELENGRKRMLASAGELQKGNELALPSKYVNFLYLASHYEKLKGSPEDNEQKQLFVEQHKHYLDEIIEQISEFSKRVILADANLDKVLSAYNKHRDKPIREQAENIIHLFTLTNLGAPAAFKYFDTTIDRKRYTSTKEVLDATLIHQSITGLYETRIDLSQLGGDGGGGSGSSGGTLGDQGSRGSDPLPEPRVTLTVEGIPTEFLVNTGAEHSVLTKPMGKMGSKRTVVAGATGSKVYPWTTKRLLKIGQKQVTHSFLVIPECPAPLLGRDLLTKLKAQIQFSTEGPQVTWEDRPAMCLVLNLEEEYRLHEKPVPPSIDPSWLQLFPMVWAEKAGMGLANQVPPVVVELKSDASPVAVRQYPMSKEAREGIRPHIQRFLDLGILVPCQSPWNTPLLPVKKPGTNDYRPVQDLREVNKRVQDIHPTVPNPYNLLSSLPPSHTWYSVLDLKDAFFCLKLHPNSQPLFAFEWRDPEKGNTGQLTWTRLPQGFKNSPTLFNEALHRDLASFRALNPQVVMLQYVDDLLVAAPTYRDCKEGTRRLLQELSKLGYRVSAKKAQLCREEVTYLGYLLKGGKRWLTPARKATVMKIPTPTTPRQVREFLGKAGFCRLFIPGFASLAAPLYPLTRPKVPFTWTEAHQEAFGRIKEALLSAPALALPDLTKPFALYVDEKEGVARGVLTQTLGPWRRPVAYLSKKLDPVASGWPTCLKAIAAVALLLKDADKLTLGQNVLVIAPHNLESIVRQPPDRWMTNARMTHYQSLLLNERVSFAPPAILNPATLLPVESDDTPIHICSEILAEETGTRPDLRDQPLPGVPAWYTDGSSFIMDGRRQAGAAIVDNKRTVWASNLPEGTSAQKAELIALTQALRLAEGKSINIYTDSRYAFATAHVHGAIYKQRGWLTSAGKDIKNKEEILALLEAIHLPKRVAIIHCPGHQRGTDPVATGNRKADEAAKQAAQSTRILTETTKNAGKRTADGSEFEKRTADGSEFESPKKKAKVE

SEQ ID NO: 1809 - protein, 2227 aa, synthetic construct
MPAAKRVKLDGGDKKYSIGLDIGTNSVGWAVITDEYKVPSKKFKVLGNTDRHSIKKNLIGALLFDSGETAEATRLKRTARRRYTRRKNRICYLQEIFSNEMAKVDDSFFHRLEESFLVEEDKKHERHPIFGNIVDEVAYHEKYPTIYHLRKKLVDSTDKADLRLIYLALAHMIKFRGHFLIEGDLNPDNSDVDKLFIQLVQTYNQLFEENPINASGVDAKAILSARLSKSRRLENLIAQLPGEKKNGLFGNLIALSLGLTPNFKSNFDLAEDAKLQLSKDTYDDDLDNLLAQIGDQYADLFLAAKNLSDAILLSDILRVNTEITKAPLSASMIKRYDEHHQDLTLLKALVRQQLPEKYKEIFFDQSKNGYAGYIDGGASQEEFYKFIKPILEKMDGTEELLVKLNREDLLRKQRTFDNGSIPHQIHLGELHAILRRQEDFYPFLKDNREKIEKILTFRIPYYVGPLARGNSRFAWMTRKSEETITPWNFEEVVDKGASAQSFIERMTNFDKNLPNEKVLPKHSLLYEYFTVYNELTKVKYVTEGMRKPAFLSGEQKKAIVDLLFKTNRKVTVKQLKEDYFKKIECFDSVEISGVEDRFNASLGTYHDLLKIIKDKDFLDNEENEDILEDIVLTLTLFEDREMIEERLKTYAHLFDDKVMKQLKRRRYTGWGRLSRKLINGIRDKQSGKTILDFLKSDGFANRNFMQLIHDDSLTFKEDIQKAQVSGQGDSLHEHIANLAGSPAIKKGILQTVKVVDELVKVMGRHKPENIVIEMARENQTTQKGQKNSRERMKRIEEGIKELGSQILKEHPVENTQLQNEKLYLYYLQNGRDMYVDQELDINRLSDYDVDHIVPQSFLKDDSIDNKVLTRSDKARGKSDNVPSEEVVKKMKNYWRQLLNAKLITQRKFDNLTKAERGGLSELDKAGFIKRQLVETRQITKHVAQILDSRMNTKYDENDKLIREVKVITLKSKLVSDFRKDFQFYKVREINNYHHAHDAYLNAVVGTALIKKYPKLESEFVYGDYKVYDVRKMIAKSEQEIGKATAKYFFYSNIMNFFKTEITLANGEIRKRPLIETNGETGEIVWDKGRDFATVRKVLSMPQVNIVKKTEVQTGGFSKESILPKRNSDKLIARKKDWDPKKYGGFDSPTVAYSVLVVAKVEKGKSKKLKSVKELLGITIMERSSFEKNPIDFLEAKGYKEVKKDLIIKLPKYSLFELENGRKRMLASAGELQKGNELALPSKYVNFLYLASHYEKLKGSPEDNEQKQLFVEQHKHYLDEIIEQISEFSKRVILADANLDKVLSAYNKHRDKPIREQAENIIHLFTLTNLGAPAAFKYFDTTIDRKRYTSTKEVLDATLIHQSITGLYETRIDLSQLGGDGGEAAAKEAAAKEAAAKEAAAKGGTLGDQGSRGSDPLPEPRVTLTVEGIPTEFLVNTGAEHSVLTKPMGKMGSKRTVVAGATGSKVYPWTTKRLLKIGQKQVTHSFLVIPECPAPLLGRDLLTKLKAQIQFSTEGPQVTWEDRPAMCLVLNLEEEYRLHEKPVPPSIDPSWLQLFPMVWAEKAGMGLANQVPPVVVELKSDASPVAVRQYPMSKEAREGIRPHIQRFLDLGILVPCQSPWNTPLLPVKKPGTNDYRPVQDLREVNKRVQDIHPTVPNPYNLLSSLPPSHTWYSVLDLKDAFFCLKLHPNSQPLFAFEWRDPEKGNTGQLTWTRLPQGFKNSPTLFNEALHRDLASFRALNPQVVMLQYVDDLLVAAPTYRDCKEGTRRLLQELSKLGYRVSAKKAQLCREEVTYLGYLLKGGKRWLTPARKATVMKIPTPTTPRQVREFLGKAGFCRLFIPGFASLAAPLYPLTRPKVPFTWTEAHQEAFGRIKEALLSAPALALPDLTKPFALYVDEKEGVARGVLTQTLGPWRRPVAYLSKKLDPVASGWPTCLKAIAAVALLLKDADKLTLGQNVLVIAPHNLESIVRQPPDRWMTNARMTHYQSLLLNERVSFAPPAILNPATLLPVESDDTPIHICSEILAEETGTRPDLRDQPLPGVPAWYTDGSSFIMDGRRQAGAAIVDNKRTVWASNLPEGTSAQKAELIALTQALRLAEGKSINIYTDSRYAFATAHVHGAIYKQRGWLTSAGKDIKNKEEILALLEAIHLPKRVAIIHCPGHQRGTDPVATGNRKADEAAKQAAQSTRILTETTKNAGKRTADGSEFEKRTADGSEFESPKKKAKVE

SEQ ID NO: 1810 - protein, 2218 aa, synthetic construct
MPAAKRVKLDGGDKKYSIGLDIGTNSVGWAVITDEYKVPSKKFKVLGNTDRHSIKKNLIGALLFDSGETAEATRLKRTARRRYTRRKNRICYLQEIFSNEMAKVDDSFFHRLEESFLVEEDKKHERHPIFGNIVDEVAYHEKYPTIYHLRKKLVDSTDKADLRLIYLALAHMIKFRGHFLIEGDLNPDNSDVDKLFIQLVQTYNQLFEENPINASGVDAKAILSARLSKSRRLENLIAQLPGEKKNGLFGNLIALSLGLTPNFKSNFDLAEDAKLQLSKDTYDDDLDNLLAQIGDQYADLFLAAKNLSDAILLSDILRVNTEITKAPLSASMIKRYDEHHQDLTLLKALVRQQLPEKYKEIFFDQSKNGYAGYIDGGASQEEFYKFIKPILEKMDGTEELLVKLNREDLLRKQRTFDNGSIPHQIHLGELHAILRRQEDFYPFLKDNREKIEKILTFRIPYYVGPLARGNSRFAWMTRKSEETITPWNFEEVVDKGASAQSFIERMTNFDKNLPNEKVLPKHSLLYEYFTVYNELTKVKYVTEGMRKPAFLSGEQKKAIVDLLFKTNRKVTVKQLKEDYFKKIECFDSVEISGVEDRFNASLGTYHDLLKIIKDKDFLDNEENEDILEDIVLTLTLFEDREMIEERLKTYAHLFDDKVMKQLKRRRYTGWGRLSRKLINGIRDKQSGKTILDFLKSDGFANRNFMQLIHDDSLTFKEDIQKAQVSGQGDSLHEHIANLAGSPAIKKGILQTVKVVDELVKVMGRHKPENIVIEMARENQTTQKGQKNSRERMKRIEEGIKELGSQILKEHPVENTQLQNEKLYLYYLQNGRDMYVDQELDINRLSDYDVDHIVPQSFLKDDSIDNKVLTRSDKARGKSDNVPSEEVVKKMKNYWRQLLNAKLITQRKFDNLTKAERGGLSELDKAGFIKRQLVETRQITKHVAQILDSRMNTKYDENDKLIREVKVITLKSKLVSDFRKDFQFYKVREINNYHHAHDAYLNAVVGTALIKKYPKLESEFVYGDYKVYDVRKMIAKSEQEIGKATAKYFFYSNIMNFFKTEITLANGEIRKRPLIETNGETGEIVWDKGRDFATVRKVLSMPQVNIVKKTEVQTGGFSKESILPKRNSDKLIARKKDWDPKKYGGFDSPTVAYSVLVVAKVEKGKSKKLKSVKELLGITIMERSSFEKNPIDFLEAKGYKEVKKDLIIKLPKYSLFELENGRKRMLASAGELQKGNELALPSKYVNFLYLASHYEKLKGSPEDNEQKQLFVEQHKHYLDEIIEQISEFSKRVILADANLDKVLSAYNKHRDKPIREQAENIIHLFTLTNLGAPAAFKYFDTTIDRKRYTSTKEVLDATLIHQSITGLYETRIDLSQLGGDGGPAPGGSEAAAKGGTLGDQGSRGSDPLPEPRVTLTVEGIPTEFLVNTGAEHSVLTKPMGKMGSKRTVVAGATGSKVYPWTTKRLLKIGQKQVTHSFLVIPECPAPLLGRDLLTKLKAQIQFSTEGPQVTWEDRPAMCLVLNLEEEYRLHEKPVPPSIDPSWLQLFPMVWAEKAGMGLANQVPPVVVELKSDASPVAVRQYPMSKEAREGIRPHIQRFLDLGILVPCQSPWNTPLLPVKKPGTNDYRPVQDLREVNKRVQDIHPTVPNPYNLLSSLPPSHTWYSVLDLKDAFFCLKLHPNSQPLFAFEWRDPEKGNTGQLTWTRLPQGFKNSPTLFNEALHRDLASFRALNPQVVMLQYVDDLLVAAPTYRDCKEGTRRLLQELSKLGYRVSAKKAQLCREEVTYLGYLLKGGKRWLTPARKATVMKIPTPTTPRQVREFLGKAGFCRLFIPGFASLAAPLYPLTRPKVPFTWTEAHQEAFGRIKEALLSAPALALPDLTKPFALYVDEKEGVARGVLTQTLGPWRRPVAYLSKKLDPVASGWPTCLKAIAAVALLLKDADKLTLGQNVLVIAPHNLESIVRQPPDRWMTNARMTHYQSLLLNERVSFAPPAILNPATLLPVESDDTPIHICSEILAEETGTRPDLRDQPLPGVPAWYTDGSSFIMDGRRQAGAAIVDNKRTVWASNLPEGTSAQKAELIALTQALRLAEGKSINIYTDSRYAFATAHVHGAIYKQRGWLTSAGKDIKNKEEILALLEAIHLPKRVAIIHCPGHQRGTDPVATGNRKADEAAKQAAQSTRILTETTKNAGKRTADGSEFEKRTADGSEFESPKKKAKVE

SEQ ID NO: 1811 - protein, 2213 aa, synthetic construct
MPAAKRVKLDGGDKKYSIGLDIGTNSVGWAVITDEYKVPSKKFKVLGNTDRHSIKKNLIGALLFDSGETAEATRLKRTARRRYTRRKNRICYLQEIFSNEMAKVDDSFFHRLEESFLVEEDKKHERHPIFGNIVDEVAYHEKYPTIYHLRKKLVDSTDKADLRLIYLALAHMIKFRGHFLIEGDLNPDNSDVDKLFIQLVQTYNQLFEENPINASGVDAKAILSARLSKSRRLENLIAQLPGEKKNGLFGNLIALSLGLTPNFKSNFDLAEDAKLQLSKDTYDDDLDNLLAQIGDQYADLFLAAKNLSDAILLSDILRVNTEITKAPLSASMIKRYDEHHQDLTLLKALVRQQLPEKYKEIFFDQSKNGYAGYIDGGASQEEFYKFIKPILEKMDGTEELLVKLNREDLLRKQRTFDNGSIPHQIHLGELHAILRRQEDFYPFLKDNREKIEKILTFRIPYYVGPLARGNSRFAWMTRKSEETITPWNFEEVVDKGASAQSFIERMTNFDKNLPNEKVLPKHSLLYEYFTVYNELTKVKYVTEGMRKPAFLSGEQKKAIVDLLFKTNRKVTVKQLKEDYFKKIECFDSVEISGVEDRFNASLGTYHDLLKIIKDKDFLDNEENEDILEDIVLTLTLFEDREMIEERLKTYAHLFDDKVMKQLKRRRYTGWGRLSRKLINGIRDKQSGKTILDFLKSDGFANRNFMQLIHDDSLTFKEDIQKAQVSGQGDSLHEHIANLAGSPAIKKGILQTVKVVDELVKVMGRHKPENIVIEMARENQTTQKGQKNSRERMKRIEEGIKELGSQILKEHPVENTQLQNEKLYLYYLQNGRDMYVDQELDINRLSDYDVDHIVPQSFLKDDSIDNKVLTRSDKARGKSDNVPSEEVVKKMKNYWRQLLNAKLITQRKFDNLTKAERGGLSELDKAGFIKRQLVETRQITKHVAQILDSRMNTKYDENDKLIREVKVITLKSKLVSDFRKDFQFYKVREINNYHHAHDAYLNAVVGTALIKKYPKLESEFVYGDYKVYDVRKMIAKSEQEIGKATAKYFFYSNIMNFFKTEITLANGEIRKRPLIETNGETGEIVWDKGRDFATVRKVLSMPQVNIVKKTEVQTGGFSKESILPKRNSDKLIARKKDWDPKKYGGFDSPTVAYSVLVVAKVEKGKSKKLKSVKELLGITIMERSSFEKNPIDFLEAKGYKEVKKDLIIKLPKYSLFELENGRKRMLASAGELQKGNELALPSKYVNFLYLASHYEKLKGSPEDNEQKQLFVEQHKHYLDEIIEQISEFSKRVILADANLDKVLSAYNKHRDKPIREQAENIIHLFTLTNLGAPAAFKYFDTTIDRKRYTSTKEVLDATLIHQSITGLYETRIDLSQLGGDGGPAPGGSGGTLGDQGSRGSDPLPEPRVTLTVEGIPTEFLVNTGAEHSVLTKPMGKMGSKRTVVAGATGSKVYPWTTKRLLKIGQKQVTHSFLVIPECPAPLLGRDLLTKLKAQIQFSTEGPQVTWEDRPAMCLVLNLEEEYRLHEKPVPPSIDPSWLQLFPMVWAEKAGMGLANQVPPVVVELKSDASPVAVRQYPMSKEAREGIRPHIQRFLDLGILVPCQSPWNTPLLPVKKPGTNDYRPVQDLREVNKRVQDIHPTVPNPYNLLSSLPPSHTWYSVLDLKDAFFCLKLHPNSQPLFAFEWRDPEKGNTGQLTWTRLPQGFKNSPTLFNEALHRDLASFRALNPQVVMLQYVDDLLVAAPTYRDCKEGTRRLLQELSKLGYRVSAKKAQLCREEVTYLGYLLKGGKRWLTPARKATVMKIPTPTTPRQVREFLGKAGFCRLFIPGFASLAAPLYPLTRPKVPFTWTEAHQEAFGRIKEALLSAPALALPDLTKPFALYVDEKEGVARGVLTQTLGPWRRPVAYLSKKLDPVASGWPTCLKAIAAVALLLKDADKLTLGQNVLVIAPHNLESIVRQPPDRWMTNARMTHYQSLLLNERVSFAPPAILNPATLLPVESDDTPIHICSEILAEETGTRPDLRDQPLPGVPAWYTDGSSFIMDGRRQAGAAIVDNKRTVWASNLPEGTSAQKAELIALTQALRLAEGKSINIYTDSRYAFATAHVHGAIYKQRGWLTSAGKDIKNKEEILALLEAIHLPKRVAIIHCPGHQRGTDPVATGNRKADEAAKQAAQSTRILTETTKNAGKRTADGSEFEKRTADGSEFESPKKKAKVE

SEQ ID NO: 1812 - protein, 2218 aa, synthetic construct
MPAAKRVKLDGGDKKYSIGLDIGTNSVGWAVITDEYKVPSKKFKVLGNTDRHSIKKNLIGALLFDSGETAEATRLKRTARRRYTRRKNRICYLQEIFSNEMAKVDDSFFHRLEESFLVEEDKKHERHPIFGNIVDEVAYHEKYPTIYHLRKKLVDSTDKADLRLIYLALAHMIKFRGHFLIEGDLNPDNSDVDKLFIQLVQTYNQLFEENPINASGVDAKAILSARLSKSRRLENLIAQLPGEKKNGLFGNLIALSLGLTPNFKSNFDLAEDAKLQLSKDTYDDDLDNLLAQIGDQYADLFLAAKNLSDAILLSDILRVNTEITKAPLSASMIKRYDEHHQDLTLLKALVRQQLPEKYKEIFFDQSKNGYAGYIDGGASQEEFYKFIKPILEKMDGTEELLVKLNREDLLRKQRTFDNGSIPHQIHLGELHAILRRQEDFYPFLKDNREKIEKILTFRIPYYVGPLARGNSRFAWMTRKSEETITPWNFEEVVDKGASAQSFIERMTNFDKNLPNEKVLPKHSLLYEYFTVYNELTKVKYVTEGMRKPAFLSGEQKKAIVDLLFKTNRKVTVKQLKEDYFKKIECFDSVEISGVEDRFNASLGTYHDLLKIIKDKDFLDNEENEDILEDIVLTLTLFEDREMIEERLKTYAHLFDDKVMKQLKRRRYTGWGRLSRKLINGIRDKQSGKTILDFLKSDGFANRNFMQLIHDDSLTFKEDIQKAQVSGQGDSLHEHIANLAGSPAIKKGILQTVKVVDELVKVMGRHKPENIVIEMARENQTTQKGQKNSRERMKRIEEGIKELGSQILKEHPVENTQLQNEKLYLYYLQNGRDMYVDQELDINRLSDYDVDHIVPQSFLKDDSIDNKVLTRSDKARGKSDNVPSEEVVKKMKNYWRQLLNAKLITQRKFDNLTKAERGGLSELDKAGFIKRQLVETRQITKHVAQILDSRMNTKYDENDKLIREVKVITLKSKLVSDFRKDFQFYKVREINNYHHAHDAYLNAVVGTALIKKYPKLESEFVYGDYKVYDVRKMIAKSEQEIGKATAKYFFYSNIMNFFKTEITLANGEIRKRPLIETNGETGEIVWDKGRDFATVRKVLSMPQVNIVKKTEVQTGGFSKESILPKRNSDKLIARKKDWDPKKYGGFDSPTVAYSVLVVAKVEKGKSKKLKSVKELLGITIMERSSFEKNPIDFLEAKGYKEVKKDLIIKLPKYSLFELENGRKRMLASAGELQKGNELALPSKYVNFLYLASHYEKLKGSPEDNEQKQLFVEQHKHYLDEIIEQISEFSKRVILADANLDKVLSAYNKHRDKPIREQAENIIHLFTLTNLGAPAAFKYFDTTIDRKRYTSTKEVLDATLIHQSITGLYETRIDLSQLGGDGGGGGPAPEAAAKGGTLGDQGSRGSDPLPEPRVTLTVEGIPTEFLVNTGAEHSVLTKPMGKMGSKRTVVAGATGSKVYPWTTKRLLKIGQKQVTHSFLVIPECPAPLLGRDLLTKLKAQIQFSTEGPQVTWEDRPAMCLVLNLEEEYRLHEKPVPPSIDPSWLQLFPMVWAEKAGMGLANQVPPVVVELKSDASPVAVRQYPMSKEAREGIRPHIQRFLDLGILVPCQSPWNTPLLPVKKPGTNDYRPVQDLREVNKRVQDIHPTVPNPYNLLSSLPPSHTWYSVLDLKDAFFCLKLHPNSQPLFAFEWRDPEKGNTGQLTWTRLPQGFKNSPTLFNEALHRDLASFRALNPQVVMLQYVDDLLVAAPTYRDCKEGTRRLLQELSKLGYRVSAKKAQLCREEVTYLGYLLKGGKRWLTPARKATVMKIPTPTTPRQVREFLGKAGFCRLFIPGFASLAAPLYPLTRPKVPFTWTEAHQEAFGRIKEALLSAPALALPDLTKPFALYVDEKEGVARGVLTQTLGPWRRPVAYLSKKLDPVASGWPTCLKAIAAVALLLKDADKLTLGQNVLVIAPHNLESIVRQPPDRWMTNARMTHYQSLLLNERVSFAPPAILNPATLLPVESDDTPIHICSEILAEETGTRPDLRDQPLPGVPAWYTDGSSFIMDGRRQAGAAIVDNKRTVWASNLPEGTSAQKAELIALTQALRLAEGKSINIYTDSRYAFATAHVHGAIYKQRGWLTSAGKDIKNKEEILALLEAIHLPKRVAIIHCPGHQRGTDPVATGNRKADEAAKQAAQSTRILTETTKNAGKRTADGSEFEKRTADGSEFESPKKKAKVE

SEQ ID NO: 1813 - protein, 2222 aa, synthetic construct
MPAAKRVKLDGGDKKYSIGLDIGTNSVGWAVITDEYKVPSKKFKVLGNTDRHSIKKNLIGALLFDSGETAEATRLKRTARRRYTRRKNRICYLQEIFSNEMAKVDDSFFHRLEESFLVEEDKKHERHPIFGNIVDEVAYHEKYPTIYHLRKKLVDSTDKADLRLIYLALAHMIKFRGHFLIEGDLNPDNSDVDKLFIQLVQTYNQLFEENPINASGVDAKAILSARLSKSRRLENLIAQLPGEKKNGLFGNLIALSLGLTPNFKSNFDLAEDAKLQLSKDTYDDDLDNLLAQIGDQYADLFLAAKNLSDAILLSDILRVNTEITKAPLSASMIKRYDEHHQDLTLLKALVRQQLPEKYKEIFFDQSKNGYAGYIDGGASQEEFYKFIKPILEKMDGTEELLVKLNREDLLRKQRTFDNGSIPHQIHLGELHAILRRQEDFYPFLKDNREKIEKILTFRIPYYVGPLARGNSRFAWMTRKSEETITPWNFEEVVDKGASAQSFIERMTNFDKNLPNEKVLPKHSLLYEYFTVYNELTKVKYVTEGMRKPAFLSGEQKKAIVDLLFKTNRKVTVKQLKEDYFKKIECFDSVEISGVEDRFNASLGTYHDLLKIIKDKDFLDNEENEDILEDIVLTLTLFEDREMIEERLKTYAHLFDDKVMKQLKRRRYTGWGRLSRKLINGIRDKQSGKTILDFLKSDGFANRNFMQLIHDDSLTFKEDIQKAQVSGQGDSLHEHIANLAGSPAIKKGILQTVKVVDELVKVMGRHKPENIVIEMARENQTTQKGQKNSRERMKRIEEGIKELGSQILKEHPVENTQLQNEKLYLYYLQNGRDMYVDQELDINRLSDYDVDHIVPQSFLKDDSIDNKVLTRSDKARGKSDNVPSEEVVKKMKNYWRQLLNAKLITQRKFDNLTKAERGGLSELDKAGFIKRQLVETRQITKHVAQILDSRMNTKYDENDKLIREVKVITLKSKLVSDFRKDFQFYKVREINNYHHAHDAYLNAVVGTALIKKYPKLESEFVYGDYKVYDVRKMIAKSEQEIGKATAKYFFYSNIMNFFKTEITLANGEIRKRPLIETNGETGEIVWDKGRDFATVRKVLSMPQVNIVKKTEVQTGGFSKESILPKRNSDKLIARKKDWDPKKYGGFDSPTVAYSVLVVAKVEKGKSKKLKSVKELLGITIMERSSFEKNPIDFLEAKGYKEVKKDLIIKLPKYSLFELENGRKRMLASAGELQKGNELALPSKYVNFLYLASHYEKLKGSPEDNEQKQLFVEQHKHYLDEIIEQISEFSKRVILADANLDKVLSAYNKHRDKPIREQAENIIHLFTLTNLGAPAAFKYFDTTIDRKRYTSTKEVLDATLIHQSITGLYETRIDLSQLGGDGGGSSGSSGSSGSSGSSGGTLGDQGSRGSDPLPEPRVTLTVEGIPTEFLVNTGAEHSVLTKPMGKMGSKRTVVAGATGSKVYPWTTKRLLKIGQKQVTHSFLVIPECPAPLLGRDLLTKLKAQIQFSTEGPQVTWEDRPAMCLVLNLEEEYRLHEKPVPPSIDPSWLQLFPMVWAEKAGMGLANQVPPVVVELKSDASPVAVRQYPMSKEAREGIRPHIQRFLDLGILVPCQSPWNTPLLPVKKPGTNDYRPVQDLREVNKRVQDIHPTVPNPYNLLSSLPPSHTWYSVLDLKDAFFCLKLHPNSQPLFAFEWRDPEKGNTGQLTWTRLPQGFKNSPTLFNEALHRDLASFRALNPQVVMLQYVDDLLVAAPTYRDCKEGTRRLLQELSKLGYRVSAKKAQLCREEVTYLGYLLKGGKRWLTPARKATVMKIPTPTTPRQVREFLGKAGFCRLFIPGFASLAAPLYPLTRPKVPFTWTEAHQEAFGRIKEALLSAPALALPDLTKPFALYVDEKEGVARGVLTQTLGPWRRPVAYLSKKLDPVASGWPTCLKAIAAVALLLKDADKLTLGQNVLVIAPHNLESIVRQPPDRWMTNARMTHYQSLLLNERVSFAPPAILNPATLLPVESDDTPIHICSEILAEETGTRPDLRDQPLPGVPAWYTDGSSFIMDGRRQAGAAIVDNKRTVWASNLPEGTSAQKAELIALTQALRLAEGKSINIYTDSRYAFATAHVHGAIYKQRGWLTSAGKDIKNKEEILALLEAIHLPKRVAIIHCPGHQRGTDPVATGNRKADEAAKQAAQSTRILTETTKNAGKRTADGSEFEKRTADGSEFESPKKKAKVE

SEQ ID NO: 1814 - protein, 2216 aa, synthetic construct
MPAAKRVKLDGGDKKYSIGLDIGTNSVGWAVITDEYKVPSKKFKVLGNTDRHSIKKNLIGALLFDSGETAEATRLKRTARRRYTRRKNRICYLQEIFSNEMAKVDDSFFHRLEESFLVEEDKKHERHPIFGNIVDEVAYHEKYPTIYHLRKKLVDSTDKADLRLIYLALAHMIKFRGHFLIEGDLNPDNSDVDKLFIQLVQTYNQLFEENPINASGVDAKAILSARLSKSRRLENLIAQLPGEKKNGLFGNLIALSLGLTPNFKSNFDLAEDAKLQLSKDTYDDDLDNLLAQIGDQYADLFLAAKNLSDAILLSDILRVNTEITKAPLSASMIKRYDEHHQDLTLLKALVRQQLPEKYKEIFFDQSKNGYAGYIDGGASQEEFYKFIKPILEKMDGTEELLVKLNREDLLRKQRTFDNGSIPHQIHLGELHAILRRQEDFYPFLKDNREKIEKILTFRIPYYVGPLARGNSRFAWMTRKSEETITPWNFEEVVDKGASAQSFIERMTNFDKNLPNEKVLPKHSLLYEYFTVYNELTKVKYVTEGMRKPAFLSGEQKKAIVDLLFKTNRKVTVKQLKEDYFKKIECFDSVEISGVEDRFNASLGTYHDLLKIIKDKDFLDNEENEDILEDIVLTLTLFEDREMIEERLKTYAHLFDDKVMKQLKRRRYTGWGRLSRKLINGIRDKQSGKTILDFLKSDGFANRNFMQLIHDDSLTFKEDIQKAQVSGQGDSLHEHIANLAGSPAIKKGILQTVKVVDELVKVMGRHKPENIVIEMARENQTTQKGQKNSRERMKRIEEGIKELGSQILKEHPVENTQLQNEKLYLYYLQNGRDMYVDQELDINRLSDYDVDHIVPQSFLKDDSIDNKVLTRSDKARGKSDNVPSEEVVKKMKNYWRQLLNAKLITQRKFDNLTKAERGGLSELDKAGFIKRQLVETRQITKHVAQILDSRMNTKYDENDKLIREVKVITLKSKLVSDFRKDFQFYKVREINNYHHAHDAYLNAVVGTALIKKYPKLESEFVYGDYKVYDVRKMIAKSEQEIGKATAKYFFYSNIMNFFKTEITLANGEIRKRPLIETNGETGEIVWDKGRDFATVRKVLSMPQVNIVKKTEVQTGGFSKESILPKRNSDKLIARKKDWDPKKYGGFDSPTVAYSVLVVAKVEKGKSKKLKSVKELLGITIMERSSFEKNPIDFLEAKGYKEVKKDLIIKLPKYSLFELENGRKRMLASAGELQKGNELALPSKYVNFLYLASHYEKLKGSPEDNEQKQLFVEQHKHYLDEIIEQISEFSKRVILADANLDKVLSAYNKHRDKPIREQAENIIHLFTLTNLGAPAAFKYFDTTIDRKRYTSTKEVLDATLIHQSITGLYETRIDLSQLGGDGGGSSGSSGSSGGTLGDQGSRGSDPLPEPRVTLTVEGIPTEFLVNTGAEHSVLTKPMGKMGSKRTVVAGATGSKVYPWTTKRLLKIGQKQVTHSFLVIPECPAPLLGRDLLTKLKAQIQFSTEGPQVTWEDRPAMCLVLNLEEEYRLHEKPVPPSIDPSWLQLFPMVWAEKAGMGLANQVPPVVVELKSDASPVAVRQYPMSKEAREGIRPHIQRFLDLGILVPCQSPWNTPLLPVKKPGTNDYRPVQDLREVNKRVQDIHPTVPNPYNLLSSLPPSHTWYSVLDLKDAFFCLKLHPNSQPLFAFEWRDPEKGNTGQLTWTRLPQGFKNSPTLFNEALHRDLASFRALNPQVVMLQYVDDLLVAAPTYRDCKEGTRRLLQELSKLGYRVSAKKAQLCREEVTYLGYLLKGGKRWLTPARKATVMKIPTPTTPRQVREFLGKAGFCRLFIPGFASLAAPLYPLTRPKVPFTWTEAHQEAFGRIKEALLSAPALALPDLTKPFALYVDEKEGVARGVLTQTLGPWRRPVAYLSKKLDPVASGWPTCLKAIAAVALLLKDADKLTLGQNVLVIAPHNLESIVRQPPDRWMTNARMTHYQSLLLNERVSFAPPAILNPATLLPVESDDTPIHICSEILAEETGTRPDLRDQPLPGVPAWYTDGSSFIMDGRRQAGAAIVDNKRTVWASNLPEGTSAQKAELIALTQALRLAEGKSINIYTDSRYAFATAHVHGAIYKQRGWLTSAGKDIKNKEEILALLEAIHLPKRVAIIHCPGHQRGTDPVATGNRKADEAAKQAAQSTRILTETTKNAGKRTADGSEFEKRTADGSEFESPKKKAKVE

SEQ ID NO: 1815 - protein, 2213 aa, synthetic construct
MPAAKRVKLDGGDKKYSIGLDIGTNSVGWAVITDEYKVPSKKFKVLGNTDRHSIKKNLIGALLFDSGETAEATRLKRTARRRYTRRKNRICYLQEIFSNEMAKVDDSFFHRLEESFLVEEDKKHERHPIFGNIVDEVAYHEKYPTIYHLRKKLVDSTDKADLRLIYLALAHMIKFRGHFLIEGDLNPDNSDVDKLFIQLVQTYNQLFEENPINASGVDAKAILSARLSKSRRLENLIAQLPGEKKNGLFGNLIALSLGLTPNFKSNFDLAEDAKLQLSKDTYDDDLDNLLAQIGDQYADLFLAAKNLSDAILLSDILRVNTEITKAPLSASMIKRYDEHHQDLTLLKALVRQQLPEKYKEIFFDQSKNGYAGYIDGGASQEEFYKFIKPILEKMDGTEELLVKLNREDLLRKQRTFDNGSIPHQIHLGELHAILRRQEDFYPFLKDNREKIEKILTFRIPYYVGPLARGNSRFAWMTRKSEETITPWNFEEVVDKGASAQSFIERMTNFDKNLPNEKVLPKHSLLYEYFTVYNELTKVKYVTEGMRKPAFLSGEQKKAIVDLLFKTNRKVTVKQLKEDYFKKIECFDSVEISGVEDRFNASLGTYHDLLKIIKDKDFLDNEENEDILEDIVLTLTLFEDREMIEERLKTYAHLFDDKVMKQLKRRRYTGWGRLSRKLINGIRDKQSGKTILDFLKSDGFANRNFMQLIHDDSLTFKEDIQKAQVSGQGDSLHEHIANLAGSPAIKKGILQTVKVVDELVKVMGRHKPENIVIEMARENQTTQKGQKNSRERMKRIEEGIKELGSQILKEHPVENTQLQNEKLYLYYLQNGRDMYVDQELDINRLSDYDVDHIVPQSFLKDDSIDNKVLTRSDKARGKSDNVPSEEVVKKMKNYWRQLLNAKLITQRKFDNLTKAERGGLSELDKAGFIKRQLVETRQITKHVAQILDSRMNTKYDENDKLIREVKVITLKSKLVSDFRKDFQFYKVREINNYHHAHDAYLNAVVGTALIKKYPKLESEFVYGDYKVYDVRKMIAKSEQEIGKATAKYFFYSNIMNFFKTEITLANGEIRKRPLIETNGETGEIVWDKGRDFATVRKVLSMPQVNIVKKTEVQTGGFSKESILPKRNSDKLIARKKDWDPKKYGGFDSPTVAYSVLVVAKVEKGKSKKLKSVKELLGITIMERSSFEKNPIDFLEAKGYKEVKKDLIIKLPKYSLFELENGRKRMLASAGELQKGNELALPSKYVNFLYLASHYEKLKGSPEDNEQKQLFVEQHKHYLDEIIEQISEFSKRVILADANLDKVLSAYNKHRDKPIREQAENIIHLFTLTNLGAPAAFKYFDTTIDRKRYTSTKEVLDATLIHQSITGLYETRIDLSQLGGDGGGSSPAPGGTLGDQGSRGSDPLPEPRVTLTVEGIPTEFLVNTGAEHSVLTKPMGKMGSKRTVVAGATGSKVYPWTTKRLLKIGQKQVTHSFLVIPECPAPLLGRDLLTKLKAQIQFSTEGPQVTWEDRPAMCLVLNLEEEYRLHEKPVPPSIDPSWLQLFPMVWAEKAGMGLANQVPPVVVELKSDASPVAVRQYPMSKEAREGIRPHIQRFLDLGILVPCQSPWNTPLLPVKKPGTNDYRPVQDLREVNKRVQDIHPTVPNPYNLLSSLPPSHTWYSVLDLKDAFFCLKLHPNSQPLFAFEWRDPEKGNTGQLTWTRLPQGFKNSPTLFNEALHRDLASFRALNPQVVMLQYVDDLLVAAPTYRDCKEGTRRLLQELSKLGYRVSAKKAQLCREEVTYLGYLLKGGKRWLTPARKATVMKIPTPTTPRQVREFLGKAGFCRLFIPGFASLAAPLYPLTRPKVPFTWTEAHQEAFGRIKEALLSAPALALPDLTKPFALYVDEKEGVARGVLTQTLGPWRRPVAYLSKKLDPVASGWPTCLKAIAAVALLLKDADKLTLGQNVLVIAPHNLESIVRQPPDRWMTNARMTHYQSLLLNERVSFAPPAILNPATLLPVESDDTPIHICSEILAEETGTRPDLRDQPLPGVPAWYTDGSSFIMDGRRQAGAAIVDNKRTVWASNLPEGTSAQKAELIALTQALRLAEGKSINIYTDSRYAFATAHVHGAIYKQRGWLTSAGKDIKNKEEILALLEAIHLPKRVAIIHCPGHQRGTDPVATGNRKADEAAKQAAQSTRILTETTKNAGKRTADGSEFEKRTADGSEFESPKKKAKVE

SEQ ID NO: 1816 - protein, 2218 aa, synthetic construct
MPAAKRVKLDGGDKKYSIGLDIGTNSVGWAVITDEYKVPSKKFKVLGNTDRHSIKKNLIGALLFDSGETAEATRLKRTARRRYTRRKNRICYLQEIFSNEMAKVDDSFFHRLEESFLVEEDKKHERHPIFGNIVDEVAYHEKYPTIYHLRKKLVDSTDKADLRLIYLALAHMIKFRGHFLIEGDLNPDNSDVDKLFIQLVQTYNQLFEENPINASGVDAKAILSARLSKSRRLENLIAQLPGEKKNGLFGNLIALSLGLTPNFKSNFDLAEDAKLQLSKDTYDDDLDNLLAQIGDQYADLFLAAKNLSDAILLSDILRVNTEITKAPLSASMIKRYDEHHQDLTLLKALVRQQLPEKYKEIFFDQSKNGYAGYIDGGASQEEFYKFIKPILEKMDGTEELLVKLNREDLLRKQRTFDNGSIPHQIHLGELHAILRRQEDFYPFLKDNREKIEKILTFRIPYYVGPLARGNSRFAWMTRKSEETITPWNFEEVVDKGASAQSFIERMTNFDKNLPNEKVLPKHSLLYEYFTVYNELTKVKYVTEGMRKPAFLSGEQKKAIVDLLFKTNRKVTVKQLKEDYFKKIECFDSVEISGVEDRFNASLGTYHDLLKIIKDKDFLDNEENEDILEDIVLTLTLFEDREMIEERLKTYAHLFDDKVMKQLKRRRYTGWGRLSRKLINGIRDKQSGKTILDFLKSDGFANRNFMQLIHDDSLTFKEDIQKAQVSGQGDSLHEHIANLAGSPAIKKGILQTVKVVDELVKVMGRHKPENIVIEMARENQTTQKGQKNSRERMKRIEEGIKELGSQILKEHPVENTQLQNEKLYLYYLQNGRDMYVDQELDINRLSDYDVDHIVPQSFLKDDSIDNKVLTRSDKARGKSDNVPSEEVVKKMKNYWRQLLNAKLITQRKFDNLTKAERGGLSELDKAGFIKRQLVETRQITKHVAQILDSRMNTKYDENDKLIREVKVITLKSKLVSDFRKDFQFYKVREINNYHHAHDAYLNAVVGTALIKKYPKLESEFVYGDYKVYDVRKMIAKSEQEIGKATAKYFFYSNIMNFFKTEITLANGEIRKRPLIETNGETGEIVWDKGRDFATVRKVLSMPQVNIVKKTEVQTGGFSKESILPKRNSDKLIARKKDWDPKKYGGFDSPTVAYSVLVVAKVEKGKSKKLKSVKELLGITIMERSSFEKNPIDFLEAKGYKEVKKDLIIKLPKYSLFELENGRKRMLASAGELQKGNELALPSKYVNFLYLASHYEKLKGSPEDNEQKQLFVEQHKHYLDEIIEQISEFSKRVILADANLDKVLSAYNKHRDKPIREQAENIIHLFTLTNLGAPAAFKYFDTTIDRKRYTSTKEVLDATLIHQSITGLYETRIDLSQLGGDGGPAPEAAAKGSSGGTLGDQGSRGSDPLPEPRVTLTVEGIPTEFLVNTGAEHSVLTKPMGKMGSKRTVVAGATGSKVYPWTTKRLLKIGQKQVTHSFLVIPECPAPLLGRDLLTKLKAQIQFSTEGPQVTWEDRPAMCLVLNLEEEYRLHEKPVPPSIDPSWLQLFPMVWAEKAGMGLANQVPPVVVELKSDASPVAVRQYPMSKEAREGIRPHIQRFLDLGILVPCQSPWNTPLLPVKKPGTNDYRPVQDLREVNKRVQDIHPTVPNPYNLLSSLPPSHTWYSVLDLKDAFFCLKLHPNSQPLFAFEWRDPEKGNTGQLTWTRLPQGFKNSPTLFNEALHRDLASFRALNPQVVMLQYVDDLLVAAPTYRDCKEGTRRLLQELSKLGYRVSAKKAQLCREEVTYLGYLLKGGKRWLTPARKATVMKIPTPTTPRQVREFLGKAGFCRLFIPGFASLAAPLYPLTRPKVPFTWTEAHQEAFGRIKEALLSAPALALPDLTKPFALYVDEKEGVARGVLTQTLGPWRRPVAYLSKKLDPVASGWPTCLKAIAAVALLLKDADKLTLGQNVLVIAPHNLESIVRQPPDRWMTNARMTHYQSLLLNERVSFAPPAILNPATLLPVESDDTPIHICSEILAEETGTRPDLRDQPLPGVPAWYTDGSSFIMDGRRQAGAAIVDNKRTVWASNLPEGTSAQKAELIALTQALRLAEGKSINIYTDSRYAFATAHVHGAIYKQRGWLTSAGKDIKNKEEILALLEAIHLPKRVAIIHCPGHQRGTDPVATGNRKADEAAKQAAQSTRILTETTKNAGKRTADGSEFEKRTADGSEFESPKKKAKVE

SEQ ID NO: 1817 - protein, 2218 aa, synthetic construct
MPAAKRVKLDGGDKKYSIGLDIGTNSVGWAVITDEYKVPSKKFKVLGNTDRHSIKKNLIGALLFDSGETAEATRLKRTARRRYTRRKNRICYLQEIFSNEMAKVDDSFFHRLEESFLVEEDKKHERHPIFGNIVDEVAYHEKYPTIYHLRKKLVDSTDKADLRLIYLALAHMIKFRGHFLIEGDLNPDNSDVDKLFIQLVQTYNQLFEENPINASGVDAKAILSARLSKSRRLENLIAQLPGEKKNGLFGNLIALSLGLTPNFKSNFDLAEDAKLQLSKDTYDDDLDNLLAQIGDQYADLFLAAKNLSDAILLSDILRVNTEITKAPLSASMIKRYDEHHQDLTLLKALVRQQLPEKYKEIFFDQSKNGYAGYIDGGASQEEFYKFIKPILEKMDGTEELLVKLNREDLLRKQRTFDNGSIPHQIHLGELHAILRRQEDFYPFLKDNREKIEKILTFRIPYYVGPLARGNSRFAWMTRKSEETITPWNFEEVVDKGASAQSFIERMTNFDKNLPNEKVLPKHSLLYEYFTVYNELTKVKYVTEGMRKPAFLSGEQKKAIVDLLFKTNRKVTVKQLKEDYFKKIECFDSVEISGVEDRFNASLGTYHDLLKIIKDKDFLDNEENEDILEDIVLTLTLFEDREMIEERLKTYAHLFDDKVMKQLKRRRYTGWGRLSRKLINGIRDKQSGKTILDFLKSDGFANRNFMQLIHDDSLTFKEDIQKAQVSGQGDSLHEHIANLAGSPAIKKGILQTVKVVDELVKVMGRHKPENIVIEMARENQTTQKGQKNSRERMKRIEEGIKELGSQILKEHPVENTQLQNEKLYLYYLQNGRDMYVDQELDINRLSDYDVDHIVPQSFLKDDSIDNKVLTRSDKARGKSDNVPSEEVVKKMKNYWRQLLNAKLITQRKFDNLTKAERGGLSELDKAGFIKRQLVETRQITKHVAQILDSRMNTKYDENDKLIREVKVITLKSKLVSDFRKDFQFYKVREINNYHHAHDAYLNAVVGTALIKKYPKLESEFVYGDYKVYDVRKMIAKSEQEIGKATAKYFFYSNIMNFFKTEITLANGEIRKRPLIETNGETGEIVWDKGRDFATVRKVLSMPQVNIVKKTEVQTGGFSKESILPKRNSDKLIARKKDWDPKKYGGFDSPTVAYSVLVVAKVEKGKSKKLKSVKELLGITIMERSSFEKNPIDFLEAKGYKEVKKDLIIKLPKYSLFELENGRKRMLASAGELQKGNELALPSKYVNFLYLASHYEKLKGSPEDNEQKQLFVEQHKHYLDEIIEQISEFSKRVILADANLDKVLSAYNKHRDKPIREQAENIIHLFTLTNLGAPAAFKYFDTTIDRKRYTSTKEVLDATLIHQSITGLYETRIDLSQLGGDGGGSSGGGEAAAKGGTLGDQGSRGSDPLPEPRVTLTVEGIPTEFLVNTGAEHSVLTKPMGKMGSKRTVVAGATGSKVYPWTTKRLLKIGQKQVTHSFLVIPECPAPLLGRDLLTKLKAQIQFSTEGPQVTWEDRPAMCLVLNLEEEYRLHEKPVPPSIDPSWLQLFPMVWAEKAGMGLANQVPPVVVELKSDASPVAVRQYPMSKEAREGIRPHIQRFLDLGILVPCQSPWNTPLLPVKKPGTNDYRPVQDLREVNKRVQDIHPTVPNPYNLLSSLPPSHTWYSVLDLKDAFFCLKLHPNSQPLFAFEWRDPEKGNTGQLTWTRLPQGFKNSPTLFNEALHRDLASFRALNPQVVMLQYVDDLLVAAPTYRDCKEGTRRLLQELSKLGYRVSAKKAQLCREEVTYLGYLLKGGKRWLTPARKATVMKIPTPTTPRQVREFLGKAGFCRLFIPGFASLAAPLYPLTRPKVPFTWTEAHQEAFGRIKEALLSAPALALPDLTKPFALYVDEKEGVARGVLTQTLGPWRRPVAYLSKKLDPVASGWPTCLKAIAAVALLLKDADKLTLGQNVLVIAPHNLESIVRQPPDRWMTNARMTHYQSLLLNERVSFAPPAILNPATLLPVESDDTPIHICSEILAEETGTRPDLRDQPLPGVPAWYTDGSSFIMDGRRQAGAAIVDNKRTVWASNLPEGTSAQKAELIALTQALRLAEGKSINIYTDSRYAFATAHVHGAIYKQRGWLTSAGKDIKNKEEILALLEAIHLPKRVAIIHCPGHQRGTDPVATGNRKADEAAKQAAQSTRILTETTKNAGKRTADGSEFEKRTADGSEFESPKKKAKVE

SEQ ID NO: 1818 - protein, 2216 aa, synthetic construct
MPAAKRVKLDGGDKKYSIGLDIGTNSVGWAVITDEYKVPSKKFKVLGNTDRHSIKKNLIGALLFDSGETAEATRLKRTARRRYTRRKNRICYLQEIFSNEMAKVDDSFFHRLEESFLVEEDKKHERHPIFGNIVDEVAYHEKYPTIYHLRKKLVDSTDKADLRLIYLALAHMIKFRGHFLIEGDLNPDNSDVDKLFIQLVQTYNQLFEENPINASGVDAKAILSARLSKSRRLENLIAQLPGEKKNGLFGNLIALSLGLTPNFKSNFDLAEDAKLQLSKDTYDDDLDNLLAQIGDQYADLFLAAKNLSDAILLSDILRVNTEITKAPLSASMIKRYDEHHQDLTLLKALVRQQLPEKYKEIFFDQSKNGYAGYIDGGASQEEFYKFIKPILEKMDGTEELLVKLNREDLLRKQRTFDNGSIPHQIHLGELHAILRRQEDFYPFLKDNREKIEKILTFRIPYYVGPLARGNSRFAWMTRKSEETITPWNFEEVVDKGASAQSFIERMTNFDKNLPNEKVLPKHSLLYEYFTVYNELTKVKYVTEGMRKPAFLSGEQKKAIVDLLFKTNRKVTVKQLKEDYFKKIECFDSVEISGVEDRFNASLGTYHDLLKIIKDKDFLDNEENEDILEDIVLTLTLFEDREMIEERLKTYAHLFDDKVMKQLKRRRYTGWGRLSRKLINGIRDKQSGKTILDFLKSDGFANRNFMQLIHDDSLTFKEDIQKAQVSGQGDSLHEHIANLAGSPAIKKGILQTVKVVDELVKVMGRHKPENIVIEMARENQTTQKGQKNSRERMKRIEEGIKELGSQILKEHPVENTQLQNEKLYLYYLQNGRDMYVDQELDINRLSDYDVDHIVPQSFLKDDSIDNKVLTRSDKARGKSDNVPSEEVVKKMKNYWRQLLNAKLITQRKFDNLTKAERGGLSELDKAGFIKRQLVETRQITKHVAQILDSRMNTKYDENDKLIREVKVITLKSKLVSDFRKDFQFYKVREINNYHHAHDAYLNAVVGTALIKKYPKLESEFVYGDYKVYDVRKMIAKSEQEIGKATAKYFFYSNIMNFFKTEITLANGEIRKRPLIETNGETGEIVWDKGRDFATVRKVLSMPQVNIVKKTEVQTGGFSKESILPKRNSDKLIARKKDWDPKKYGGFDSPTVAYSVLVVAKVEKGKSKKLKSVKELLGITIMERSSFEKNPIDFLEAKGYKEVKKDLIIKLPKYSLFELENGRKRMLASAGELQKGNELALPSKYVNFLYLASHYEKLKGSPEDNEQKQLFVEQHKHYLDEIIEQISEFSKRVILADANLDKVLSAYNKHRDKPIREQAENIIHLFTLTNLGAPAAFKYFDTTIDRKRYTSTKEVLDATLIHQSITGLYETRIDLSQLGGDGGGGGGSSPAPGGTLGDQGSRGSDPLPEPRVTLTVEGIPTEFLVNTGAEHSVLTKPMGKMGSKRTVVAGATGSKVYPWTTKRLLKIGQKQVTHSFLVIPECPAPLLGRDLLTKLKAQIQFSTEGPQVTWEDRPAMCLVLNLEEEYRLHEKPVPPSIDPSWLQLFPMVWAEKAGMGLANQVPPVVVELKSDASPVAVRQYPMSKEAREGIRPHIQRFLDLGILVPCQSPWNTPLLPVKKPGTNDYRPVQDLREVNKRVQDIHPTVPNPYNLLSSLPPSHTWYSVLDLKDAFFCLKLHPNSQPLFAFEWRDPEKGNTGQLTWTRLPQGFKNSPTLFNEALHRDLASFRALNPQVVMLQYVDDLLVAAPTYRDCKEGTRRLLQELSKLGYRVSAKKAQLCREEVTYLGYLLKGGKRWLTPARKATVMKIPTPTTPRQVREFLGKAGFCRLFIPGFASLAAPLYPLTRPKVPFTWTEAHQEAFGRIKEALLSAPALALPDLTKPFALYVDEKEGVARGVLTQTLGPWRRPVAYLSKKLDPVASGWPTCLKAIAAVALLLKDADKLTLGQNVLVIAPHNLESIVRQPPDRWMTNARMTHYQSLLLNERVSFAPPAILNPATLLPVESDDTPIHICSEILAEETGTRPDLRDQPLPGVPAWYTDGSSFIMDGRRQAGAAIVDNKRTVWASNLPEGTSAQKAELIALTQALRLAEGKSINIYTDSRYAFATAHVHGAIYKQRGWLTSAGKDIKNKEEILALLEAIHLPKRVAIIHCPGHQRGTDPVATGNRKADEAAKQAAQSTRILTETTKNAGKRTADGSEFEKRTADGSEFESPKKKAKVE

SEQ ID NO: 1819 - protein, 2216 aa, synthetic construct
MPAAKRVKLDGGDKKYSIGLDIGTNSVGWAVITDEYKVPSKKFKVLGNTDRHSIKKNLIGALLFDSGETAEATRLKRTARRRYTRRKNRICYLQEIFSNEMAKVDDSFFHRLEESFLVEEDKKHERHPIFGNIVDEVAYHEKYPTIYHLRKKLVDSTDKADLRLIYLALAHMIKFRGHFLIEGDLNPDNSDVDKLFIQLVQTYNQLFEENPINASGVDAKAILSARLSKSRRLENLIAQLPGEKKNGLFGNLIALSLGLTPNFKSNFDLAEDAKLQLSKDTYDDDLDNLLAQIGDQYADLFLAAKNLSDAILLSDILRVNTEITKAPLSASMIKRYDEHHQDLTLLKALVRQQLPEKYKEIFFDQSKNGYAGYIDGGASQEEFYKFIKPILEKMDGTEELLVKLNREDLLRKQRTFDNGSIPHQIHLGELHAILRRQEDFYPFLKDNREKIEKILTFRIPYYVGPLARGNSRFAWMTRKSEETITPWNFEEVVDKGASAQSFIERMTNFDKNLPNEKVLPKHSLLYEYFTVYNELTKVKYVTEGMRKPAFLSGEQKKAIVDLLFKTNRKVTVKQLKEDYFKKIECFDSVEISGVEDRFNASLGTYHDLLKIIKDKDFLDNEENEDILEDIVLTLTLFEDREMIEERLKTYAHLFDDKVMKQLKRRRYTGWGRLSRKLINGIRDKQSGKTILDFLKSDGFANRNFMQLIHDDSLTFKEDIQKAQVSGQGDSLHEHIANLAGSPAIKKGILQTVKVVDELVKVMGRHKPENIVIEMARENQTTQKGQKNSRERMKRIEEGIKELGSQILKEHPVENTQLQNEKLYLYYLQNGRDMYVDQELDINRLSDYDVDHIVPQSFLKDDSIDNKVLTRSDKARGKSDNVPSEEVVKKMKNYWRQLLNAKLITQRKFDNLTKAERGGLSELDKAGFIKRQLVETRQITKHVAQILDSRMNTKYDENDKLIREVKVITLKSKLVSDFRKDFQFYKVREINNYHHAHDAYLNAVVGTALIKKYPKLESEFVYGDYKVYDVRKMIAKSEQEIGKATAKYFFYSNIMNFFKTEITLANGEIRKRPLIETNGETGEIVWDKGRDFATVRKVLSMPQVNIVKKTEVQTGGFSKESILPKRNSDKLIARKKDWDPKKYGGFDSPTVAYSVLVVAKVEKGKSKKLKSVKELLGITIMERSSFEKNPIDFLEAKGYKEVKKDLIIKLPKYSLFELENGRKRMLASAGELQKGNELALPSKYVNFLYLASHYEKLKGSPEDNEQKQLFVEQHKHYLDEIIEQISEFSKRVILADANLDKVLSAYNKHRDKPIREQAENIIHLFTLTNLGAPAAFKYFDTTIDRKRYTSTKEVLDATLIHQSITGLYETRIDLSQLGGDGGGGSGGGGSSGGTLGDQGSRGSDPLPEPRVTLTVEGIPTEFLVNTGAEHSVLTKPMGKMGSKRTVVAGATGSKVYPWTTKRLLKIGQKQVTHSFLVIPECPAPLLGRDLLTKLKAQIQFSTEGPQVTWEDRPAMCLVLNLEEEYRLHEKPVPPSIDPSWLQLFPMVWAEKAGMGLANQVPPVVVELKSDASPVAVRQYPMSKEAREGIRPHIQRFLDLGILVPCQSPWNTPLLPVKKPGTNDYRPVQDLREVNKRVQDIHPTVPNPYNLLSSLPPSHTWYSVLDLKDAFFCLKLHPNSQPLFAFEWRDPEKGNTGQLTWTRLPQGFKNSPTLFNEALHRDLASFRALNPQVVMLQYVDDLLVAAPTYRDCKEGTRRLLQELSKLGYRVSAKKAQLCREEVTYLGYLLKGGKRWLTPARKATVMKIPTPTTPRQVREFLGKAGFCRLFIPGFASLAAPLYPLTRPKVPFTWTEAHQEAFGRIKEALLSAPALALPDLTKPFALYVDEKEGVARGVLTQTLGPWRRPVAYLSKKLDPVASGWPTCLKAIAAVALLLKDADKLTLGQNVLVIAPHNLESIVRQPPDRWMTNARMTHYQSLLLNERVSFAPPAILNPATLLPVESDDTPIHICSEILAEETGTRPDLRDQPLPGVPAWYTDGSSFIMDGRRQAGAAIVDNKRTVWASNLPEGTSAQKAELIALTQALRLAEGKSINIYTDSRYAFATAHVHGAIYKQRGWLTSAGKDIKNKEEILALLEAIHLPKRVAIIHCPGHQRGTDPVATGNRKADEAAKQAAQSTRILTETTKNAGKRTADGSEFEKRTADGSEFESPKKKAKVE

SEQ ID NO: 1820 - protein, 2215 aa, synthetic construct
MPAAKRVKLDGGDKKYSIGLDIGTNSVGWAVITDEYKVPSKKFKVLGNTDRHSIKKNLIGALLFDSGETAEATRLKRTARRRYTRRKNRICYLQEIFSNEMAKVDDSFFHRLEESFLVEEDKKHERHPIFGNIVDEVAYHEKYPTIYHLRKKLVDSTDKADLRLIYLALAHMIKFRGHFLIEGDLNPDNSDVDKLFIQLVQTYNQLFEENPINASGVDAKAILSARLSKSRRLENLIAQLPGEKKNGLFGNLIALSLGLTPNFKSNFDLAEDAKLQLSKDTYDDDLDNLLAQIGDQYADLFLAAKNLSDAILLSDILRVNTEITKAPLSASMIKRYDEHHQDLTLLKALVRQQLPEKYKEIFFDQSKNGYAGYIDGGASQEEFYKFIKPILEKMDGTEELLVKLNREDLLRKQRTFDNGSIPHQIHLGELHAILRRQEDFYPFLKDNREKIEKILTFRIPYYVGPLARGNSRFAWMTRKSEETITPWNFEEVVDKGASAQSFIERMTNFDKNLPNEKVLPKHSLLYEYFTVYNELTKVKYVTEGMRKPAFLSGEQKKAIVDLLFKTNRKVTVKQLKEDYFKKIECFDSVEISGVEDRFNASLGTYHDLLKIIKDKDFLDNEENEDILEDIVLTLTLFEDREMIEERLKTYAHLFDDKVMKQLKRRRYTGWGRLSRKLINGIRDKQSGKTILDFLKSDGFANRNFMQLIHDDSLTFKEDIQKAQVSGQGDSLHEHIANLAGSPAIKKGILQTVKVVDELVKVMGRHKPENIVIEMARENQTTQKGQKNSRERMKRIEEGIKELGSQILKEHPVENTQLQNEKLYLYYLQNGRDMYVDQELDINRLSDYDVDHIVPQSFLKDDSIDNKVLTRSDKARGKSDNVPSEEVVKKMKNYWRQLLNAKLITQRKFDNLTKAERGGLSELDKAGFIKRQLVETRQITKHVAQILDSRMNTKYDENDKLIREVKVITLKSKLVSDFRKDFQFYKVREINNYHHAHDAYLNAVVGTALIKKYPKLESEFVYGDYKVYDVRKMIAKSEQEIGKATAKYFFYSNIMNFFKTEITLANGEIRKRPLIETNGETGEIVWDKGRDFATVRKVLSMPQVNIVKKTEVQTGGFSKESILPKRNSDKLIARKKDWDPKKYGGFDSPTVAYSVLVVAKVEKGKSKKLKSVKELLGITIMERSSFEKNPIDFLEAKGYKEVKKDLIIKLPKYSLFELENGRKRMLASAGELQKGNELALPSKYVNFLYLASHYEKLKGSPEDNEQKQLFVEQHKHYLDEIIEQISEFSKRVILADANLDKVLSAYNKHRDKPIREQAENIIHLFTLTNLGAPAAFKYFDTTIDRKRYTSTKEVLDATLIHQSITGLYETRIDLSQLGGDGGEAAAKGGGGGTLGDQGSRGSDPLPEPRVTLTVEGIPTEFLVNTGAEHSVLTKPMGKMGSKRTVVAGATGSKVYPWTTKRLLKIGQKQVTHSFLVIPECPAPLLGRDLLTKLKAQIQFSTEGPQVTWEDRPAMCLVLNLEEEYRLHEKPVPPSIDPSWLQLFPMVWAEKAGMGLANQVPPVVVELKSDASPVAVRQYPMSKEAREGIRPHIQRFLDLGILVPCQSPWNTPLLPVKKPGTNDYRPVQDLREVNKRVQDIHPTVPNPYNLLSSLPPSHTWYSVLDLKDAFFCLKLHPNSQPLFAFEWRDPEKGNTGQLTWTRLPQGFKNSPTLFNEALHRDLASFRALNPQVVMLQYVDDLLVAAPTYRDCKEGTRRLLQELSKLGYRVSAKKAQLCREEVTYLGYLLKGGKRWLTPARKATVMKIPTPTTPRQVREFLGKAGFCRLFIPGFASLAAPLYPLTRPKVPFTWTEAHQEAFGRIKEALLSAPALALPDLTKPFALYVDEKEGVARGVLTQTLGPWRRPVAYLSKKLDPVASGWPTCLKAIAAVALLLKDADKLTLGQNVLVIAPHNLESIVRQPPDRWMTNARMTHYQSLLLNERVSFAPPAILNPATLLPVESDDTPIHICSEILAEETGTRPDLRDQPLPGVPAWYTDGSSFIMDGRRQAGAAIVDNKRTVWASNLPEGTSAQKAELIALTQALRLAEGKSINIYTDSRYAFATAHVHGAIYKQRGWLTSAGKDIKNKEEILALLEAIHLPKRVAIIHCPGHQRGTDPVATGNRKADEAAKQAAQSTRILTETTKNAGKRTADGSEFEKRTADGSEFESPKKKAKVE

SEQ ID NO: 1821 - protein, 2215 aa, synthetic construct
MPAAKRVKLDGGDKKYSIGLDIGTNSVGWAVITDEYKVPSKKFKVLGNTDRHSIKKNLIGALLFDSGETAEATRLKRTARRRYTRRKNRICYLQEIFSNEMAKVDDSFFHRLEESFLVEEDKKHERHPIFGNIVDEVAYHEKYPTIYHLRKKLVDSTDKADLRLIYLALAHMIKFRGHFLIEGDLNPDNSDVDKLFIQLVQTYNQLFEENPINASGVDAKAILSARLSKSRRLENLIAQLPGEKKNGLFGNLIALSLGLTPNFKSNFDLAEDAKLQLSKDTYDDDLDNLLAQIGDQYADLFLAAKNLSDAILLSDILRVNTEITKAPLSASMIKRYDEHHQDLTLLKALVRQQLPEKYKEIFFDQSKNGYAGYIDGGASQEEFYKFIKPILEKMDGTEELLVKLNREDLLRKQRTFDNGSIPHQIHLGELHAILRRQEDFYPFLKDNREKIEKILTFRIPYYVGPLARGNSRFAWMTRKSEETITPWNFEEVVDKGASAQSFIERMTNFDKNLPNEKVLPKHSLLYEYFTVYNELTKVKYVTEGMRKPAFLSGEQKKAIVDLLFKTNRKVTVKQLKEDYFKKIECFDSVEISGVEDRFNASLGTYHDLLKIIKDKDFLDNEENEDILEDIVLTLTLFEDREMIEERLKTYAHLFDDKVMKQLKRRRYTGWGRLSRKLINGIRDKQSGKTILDFLKSDGFANRNFMQLIHDDSLTFKEDIQKAQVSGQGDSLHEHIANLAGSPAIKKGILQTVKVVDELVKVMGRHKPENIVIEMARENQTTQKGQKNSRERMKRIEEGIKELGSQILKEHPVENTQLQNEKLYLYYLQNGRDMYVDQELDINRLSDYDVDHIVPQSFLKDDSIDNKVLTRSDKARGKSDNVPSEEVVKKMKNYWRQLLNAKLITQRKFDNLTKAERGGLSELDKAGFIKRQLVETRQITKHVAQILDSRMNTKYDENDKLIREVKVITLKSKLVSDFRKDFQFYKVREINNYHHAHDAYLNAVVGTALIKKYPKLESEFVYGDYKVYDVRKMIAKSEQEIGKATAKYFFYSNIMNFFKTEITLANGEIRKRPLIETNGETGEIVWDKGRDFATVRKVLSMPQVNIVKKTEVQTGGFSKESILPKRNSDKLIARKKDWDPKKYGGFDSPTVAYSVLVVAKVEKGKSKKLKSVKELLGITIMERSSFEKNPIDFLEAKGYKEVKKDLIIKLPKYSLFELENGRKRMLASAGELQKGNELALPSKYVNFLYLASHYEKLKGSPEDNEQKQLFVEQHKHYLDEIIEQISEFSKRVILADANLDKVLSAYNKHRDKPIREQAENIIHLFTLTNLGAPAAFKYFDTTIDRKRYTSTKEVLDATLIHQSITGLYETRIDLSQLGGDGGEAAAKGGSGGTLGDQGSRGSDPLPEPRVTLTVEGIPTEFLVNTGAEHSVLTKPMGKMGSKRTVVAGATGSKVYPWTTKRLLKIGQKQVTHSFLVIPECPAPLLGRDLLTKLKAQIQFSTEGPQVTWEDRPAMCLVLNLEEEYRLHEKPVPPSIDPSWLQLFPMVWAEKAGMGLANQVPPVVVELKSDASPVAVRQYPMSKEAREGIRPHIQRFLDLGILVPCQSPWNTPLLPVKKPGTNDYRPVQDLREVNKRVQDIHPTVPNPYNLLSSLPPSHTWYSVLDLKDAFFCLKLHPNSQPLFAFEWRDPEKGNTGQLTWTRLPQGFKNSPTLFNEALHRDLASFRALNPQVVMLQYVDDLLVAAPTYRDCKEGTRRLLQELSKLGYRVSAKKAQLCREEVTYLGYLLKGGKRWLTPARKATVMKIPTPTTPRQVREFLGKAGFCRLFIPGFASLAAPLYPLTRPKVPFTWTEAHQEAFGRIKEALLSAPALALPDLTKPFALYVDEKEGVARGVLTQTLGPWRRPVAYLSKKLDPVASGWPTCLKAIAAVALLLKDADKLTLGQNVLVIAPHNLESIVRQPPDRWMTNARMTHYQSLLLNERVSFAPPAILNPATLLPVESDDTPIHICSEILAEETGTRPDLRDQPLPGVPAWYTDGSSFIMDGRRQAGAAIVDNKRTVWASNLPEGTSAQKAELIALTQALRLAEGKSINIYTDSRYAFATAHVHGAIYKQRGWLTSAGKDIKNKEEILALLEAIHLPKRVAIIHCPGHQRGTDPVATGNRKADEAAKQAAQSTRILTETTKNAGKRTADGSEFEKRTADGSEFESPKKKAKVE

SEQ ID NO: 1822 - protein, 2218 aa, synthetic construct
MPAAKRVKLDGGDKKYSIGLDIGTNSVGWAVITDEYKVPSKKFKVLGNTDRHSIKKNLIGALLFDSGETAEATRLKRTARRRYTRRKNRICYLQEIFSNEMAKVDDSFFHRLEESFLVEEDKKHERHPIFGNIVDEVAYHEKYPTIYHLRKKLVDSTDKADLRLIYLALAHMIKFRGHFLIEGDLNPDNSDVDKLFIQLVQTYNQLFEENPINASGVDAKAILSARLSKSRRLENLIAQLPGEKKNGLFGNLIALSLGLTPNFKSNFDLAEDAKLQLSKDTYDDDLDNLLAQIGDQYADLFLAAKNLSDAILLSDILRVNTEITKAPLSASMIKRYDEHHQDLTLLKALVRQQLPEKYKEIFFDQSKNGYAGYIDGGASQEEFYKFIKPILEKMDGTEELLVKLNREDLLRKQRTFDNGSIPHQIHLGELHAILRRQEDFYPFLKDNREKIEKILTFRIPYYVGPLARGNSRFAWMTRKSEETITPWNFEEVVDKGASAQSFIERMTNFDKNLPNEKVLPKHSLLYEYFTVYNELTKVKYVTEGMRKPAFLSGEQKKAIVDLLFKTNRKVTVKQLKEDYFKKIECFDSVEISGVEDRFNASLGTYHDLLKIIKDKDFLDNEENEDILEDIVLTLTLFEDREMIEERLKTYAHLFDDKVMKQLKRRRYTGWGRLSRKLINGIRDKQSGKTILDFLKSDGFANRNFMQLIHDDSLTFKEDIQKAQVSGQGDSLHEHIANLAGSPAIKKGILQTVKVVDELVKVMGRHKPENIVIEMARENQTTQKGQKNSRERMKRIEEGIKELGSQILKEHPVENTQLQNEKLYLYYLQNGRDMYVDQELDINRLSDYDVDHIVPQSFLKDDSIDNKVLTRSDKARGKSDNVPSEEVVKKMKNYWRQLLNAKLITQRKFDNLTKAERGGLSELDKAGFIKRQLVETRQITKHVAQILDSRMNTKYDENDKLIREVKVITLKSKLVSDFRKDFQFYKVREINNYHHAHDAYLNAVVGTALIKKYPKLESEFVYGDYKVYDVRKMIAKSEQEIGKATAKYFFYSNIMNFFKTEITLANGEIRKRPLIETNGETGEIVWDKGRDFATVRKVLSMPQVNIVKKTEVQTGGFSKESILPKRNSDKLIARKKDWDPKKYGGFDSPTVAYSVLVVAKVEKGKSKKLKSVKELLGITIMERSSFEKNPIDFLEAKGYKEVKKDLIIKLPKYSLFELENGRKRMLASAGELQKGNELALPSKYVNFLYLASHYEKLKGSPEDNEQKQLFVEQHKHYLDEIIEQISEFSKRVILADANLDKVLSAYNKHRDKPIREQAENIIHLFTLTNLGAPAAFKYFDTTIDRKRYTSTKEVLDATLIHQSITGLYETRIDLSQLGGDGGEAAAKPAPGSSGGTLGDQGSRGSDPLPEPRVTLTVEGIPTEFLVNTGAEHSVLTKPMGKMGSKRTVVAGATGSKVYPWTTKRLLKIGQKQVTHSFLVIPECPAPLLGRDLLTKLKAQIQFSTEGPQVTWEDRPAMCLVLNLEEEYRLHEKPVPPSIDPSWLQLFPMVWAEKAGMGLANQVPPVVVELKSDASPVAVRQYPMSKEAREGIRPHIQRFLDLGILVPCQSPWNTPLLPVKKPGTNDYRPVQDLREVNKRVQDIHPTVPNPYNLLSSLPPSHTWYSVLDLKDAFFCLKLHPNSQPLFAFEWRDPEKGNTGQLTWTRLPQGFKNSPTLFNEALHRDLASFRALNPQVVMLQYVDDLLVAAPTYRDCKEGTRRLLQELSKLGYRVSAKKAQLCREEVTYLGYLLKGGKRWLTPARKATVMKIPTPTTPRQVREFLGKAGFCRLFIPGFASLAAPLYPLTRPKVPFTWTEAHQEAFGRIKEALLSAPALALPDLTKPFALYVDEKEGVARGVLTQTLGPWRRPVAYLSKKLDPVASGWPTCLKAIAAVALLLKDADKLTLGQNVLVIAPHNLESIVRQPPDRWMTNARMTHYQSLLLNERVSFAPPAILNPATLLPVESDDTPIHICSEILAEETGTRPDLRDQPLPGVPAWYTDGSSFIMDGRRQAGAAIVDNKRTVWASNLPEGTSAQKAELIALTQALRLAEGKSINIYTDSRYAFATAHVHGAIYKQRGWLTSAGKDIKNKEEILALLEAIHLPKRVAIIHCPGHQRGTDPVATGNRKADEAAKQAAQSTRILTETTKNAGKRTADGSEFEKRTADGSEFESPKKKAKVE

SEQ ID NO: 1823 - protein, 2218 aa, synthetic construct
MPAAKRVKLDGGDKKYSIGLDIGTNSVGWAVITDEYKVPSKKFKVLGNTDRHSIKKNLIGALLFDSGETAEATRLKRTARRRYTRRKNRICYLQEIFSNEMAKVDDSFFHRLEESFLVEEDKKHERHPIFGNIVDEVAYHEKYPTIYHLRKKLVDSTDKADLRLIYLALAHMIKFRGHFLIEGDLNPDNSDVDKLFIQLVQTYNQLFEENPINASGVDAKAILSARLSKSRRLENLIAQLPGEKKNGLFGNLIALSLGLTPNFKSNFDLAEDAKLQLSKDTYDDDLDNLLAQIGDQYADLFLAAKNLSDAILLSDILRVNTEITKAPLSASMIKRYDEHHQDLTLLKALVRQQLPEKYKEIFFDQSKNGYAGYIDGGASQEEFYKFIKPILEKMDGTEELLVKLNREDLLRKQRTFDNGSIPHQIHLGELHAILRRQEDFYPFLKDNREKIEKILTFRIPYYVGPLARGNSRFAWMTRKSEETITPWNFEEVVDKGASAQSFIERMTNFDKNLPNEKVLPKHSLLYEYFTVYNELTKVKYVTEGMRKPAFLSGEQKKAIVDLLFKTNRKVTVKQLKEDYFKKIECFDSVEISGVEDRFNASLGTYHDLLKIIKDKDFLDNEENEDILEDIVLTLTLFEDREMIEERLKTYAHLFDDKVMKQLKRRRYTGWGRLSRKLINGIRDKQSGKTILDFLKSDGFANRNFMQLIHDDSLTFKEDIQKAQVSGQGDSLHEHIANLAGSPAIKKGILQTVKVVDELVKVMGRHKPENIVIEMARENQTTQKGQKNSRERMKRIEEGIKELGSQILKEHPVENTQLQNEKLYLYYLQNGRDMYVDQELDINRLSDYDVDHIVPQSFLKDDSIDNKVLTRSDKARGKSDNVPSEEVVKKMKNYWRQLLNAKLITQRKFDNLTKAERGGLSELDKAGFIKRQLVETRQITKHVAQILDSRMNTKYDENDKLIREVKVITLKSKLVSDFRKDFQFYKVREINNYHHAHDAYLNAVVGTALIKKYPKLESEFVYGDYKVYDVRKMIAKSEQEIGKATAKYFFYSNIMNFFKTEITLANGEIRKRPLIETNGETGEIVWDKGRDFATVRKVLSMPQVNIVKKTEVQTGGFSKESILPKRNSDKLIARKKDWDPKKYGGFDSPTVAYSVLVVAKVEKGKSKKLKSVKELLGITIMERSSFEKNPIDFLEAKGYKEVKKDLIIKLPKYSLFELENGRKRMLASAGELQKGNELALPSKYVNFLYLASHYEKLKGSPEDNEQKQLFVEQHKHYLDEIIEQISEFSKRVILADANLDKVLSAYNKHRDKPIREQAENIIHLFTLTNLGAPAAFKYFDTTIDRKRYTSTKEVLDATLIHQSITGLYETRIDLSQLGGDGGGGGGSSEAAAKGGTLGDQGSRGSDPLPEPRVTLTVEGIPTEFLVNTGAEHSVLTKPMGKMGSKRTVVAGATGSKVYPWTTKRLLKIGQKQVTHSFLVIPECPAPLLGRDLLTKLKAQIQFSTEGPQVTWEDRPAMCLVLNLEEEYRLHEKPVPPSIDPSWLQLFPMVWAEKAGMGLANQVPPVVVELKSDASPVAVRQYPMSKEAREGIRPHIQRFLDLGILVPCQSPWNTPLLPVKKPGTNDYRPVQDLREVNKRVQDIHPTVPNPYNLLSSLPPSHTWYSVLDLKDAFFCLKLHPNSQPLFAFEWRDPEKGNTGQLTWTRLPQGFKNSPTLFNEALHRDLASFRALNPQVVMLQYVDDLLVAAPTYRDCKEGTRRLLQELSKLGYRVSAKKAQLCREEVTYLGYLLKGGKRWLTPARKATVMKIPTPTTPRQVREFLGKAGFCRLFIPGFASLAAPLYPLTRPKVPFTWTEAHQEAFGRIKEALLSAPALALPDLTKPFALYVDEKEGVARGVLTQTLGPWRRPVAYLSKKLDPVASGWPTCLKAIAAVALLLKDADKLTLGQNVLVIAPHNLESIVRQPPDRWMTNARMTHYQSLLLNERVSFAPPAILNPATLLPVESDDTPIHICSEILAEETGTRPDLRDQPLPGVPAWYTDGSSFIMDGRRQAGAAIVDNKRTVWASNLPEGTSAQKAELIALTQALRLAEGKSINIYTDSRYAFATAHVHGAIYKQRGWLTSAGKDIKNKEEILALLEAIHLPKRVAIIHCPGHQRGTDPVATGNRKADEAAKQAAQSTRILTETTKNAGKRTADGSEFEKRTADGSEFESPKKKAKVE

SEQ ID NO: 1824 - protein, 2216 aa, synthetic construct
MPAAKRVKLDGGDKKYSIGLDIGTNSVGWAVITDEYKVPSKKFKVLGNTDRHSIKKNLIGALLFDSGETAEATRLKRTARRRYTRRKNRICYLQEIFSNEMAKVDDSFFHRLEESFLVEEDKKHERHPIFGNIVDEVAYHEKYPTIYHLRKKLVDSTDKADLRLIYLALAHMIKFRGHFLIEGDLNPDNSDVDKLFIQLVQTYNQLFEENPINASGVDAKAILSARLSKSRRLENLIAQLPGEKKNGLFGNLIALSLGLTPNFKSNFDLAEDAKLQLSKDTYDDDLDNLLAQIGDQYADLFLAAKNLSDAILLSDILRVNTEITKAPLSASMIKRYDEHHQDLTLLKALVRQQLPEKYKEIFFDQSKNGYAGYIDGGASQEEFYKFIKPILEKMDGTEELLVKLNREDLLRKQRTFDNGSIPHQIHLGELHAILRRQEDFYPFLKDNREKIEKILTFRIPYYVGPLARGNSRFAWMTRKSEETITPWNFEEVVDKGASAQSFIERMTNFDKNLPNEKVLPKHSLLYEYFTVYNELTKVKYVTEGMRKPAFLSGEQKKAIVDLLFKTNRKVTVKQLKEDYFKKIECFDSVEISGVEDRFNASLGTYHDLLKIIKDKDFLDNEENEDILEDIVLTLTLFEDREMIEERLKTYAHLFDDKVMKQLKRRRYTGWGRLSRKLINGIRDKQSGKTILDFLKSDGFANRNFMQLIHDDSLTFKEDIQKAQVSGQGDSLHEHIANLAGSPAIKKGILQTVKVVDELVKVMGRHKPENIVIEMARENQTTQKGQKNSRERMKRIEEGIKELGSQILKEHPVENTQLQNEKLYLYYLQNGRDMYVDQELDINRLSDYDVDHIVPQSFLKDDSIDNKVLTRSDKARGKSDNVPSEEVVKKMKNYWRQLLNAKLITQRKFDNLTKAERGGLSELDKAGFIKRQLVETRQITKHVAQILDSRMNTKYDENDKLIREVKVITLKSKLVSDFRKDFQFYKVREINNYHHAHDAYLNAVVGTALIKKYPKLESEFVYGDYKVYDVRKMIAKSEQEIGKATAKYFFYSNIMNFFKTEITLANGEIRKRPLIETNGETGEIVWDKGRDFATVRKVLSMPQVNIVKKTEVQTGGFSKESILPKRNSDKLIARKKDWDPKKYGGFDSPTVAYSVLVVAKVEKGKSKKLKSVKELLGITIMERSSFEKNPIDFLEAKGYKEVKKDLIIKLPKYSLFELENGRKRMLASAGELQKGNELALPSKYVNFLYLASHYEKLKGSPEDNEQKQLFVEQHKHYLDEIIEQISEFSKRVILADANLDKVLSAYNKHRDKPIREQAENIIHLFTLTNLGAPAAFKYFDTTIDRKRYTSTKEVLDATLIHQSITGLYETRIDLSQLGGDGGPAPAPAPAPGGTLGDQGSRGSDPLPEPRVTLTVEGIPTEFLVNTGAEHSVLTKPMGKMGSKRTVVAGATGSKVYPWTTKRLLKIGQKQVTHSFLVIPECPAPLLGRDLLTKLKAQIQFSTEGPQVTWEDRPAMCLVLNLEEEYRLHEKPVPPSIDPSWLQLFPMVWAEKAGMGLANQVPPVVVELKSDASPVAVRQYPMSKEAREGIRPHIQRFLDLGILVPCQSPWNTPLLPVKKPGTNDYRPVQDLREVNKRVQDIHPTVPNPYNLLSSLPPSHTWYSVLDLKDAFFCLKLHPNSQPLFAFEWRDPEKGNTGQLTWTRLPQGFKNSPTLFNEALHRDLASFRALNPQVVMLQYVDDLLVAAPTYRDCKEGTRRLLQELSKLGYRVSAKKAQLCREEVTYLGYLLKGGKRWLTPARKATVMKIPTPTTPRQVREFLGKAGFCRLFIPGFASLAAPLYPLTRPKVPFTWTEAHQEAFGRIKEALLSAPALALPDLTKPFALYVDEKEGVARGVLTQTLGPWRRPVAYLSKKLDPVASGWPTCLKAIAAVALLLKDADKLTLGQNVLVIAPHNLESIVRQPPDRWMTNARMTHYQSLLLNERVSFAPPAILNPATLLPVESDDTPIHICSEILAEETGTRPDLRDQPLPGVPAWYTDGSSFIMDGRRQAGAAIVDNKRTVWASNLPEGTSAQKAELIALTQALRLAEGKSINIYTDSRYAFATAHVHGAIYKQRGWLTSAGKDIKNKEEILALLEAIHLPKRVAIIHCPGHQRGTDPVATGNRKADEAAKQAAQSTRILTETTKNAGKRTADGSEFEKRTADGSEFESPKKKAKVE

SEQ ID NO: 1825 - protein, 2215 aa, synthetic construct
MPAAKRVKLDGGDKKYSIGLDIGTNSVGWAVITDEYKVPSKKFKVLGNTDRHSIKKNLIGALLFDSGETAEATRLKRTARRRYTRRKNRICYLQEIFSNEMAKVDDSFFHRLEESFLVEEDKKHERHPIFGNIVDEVAYHEKYPTIYHLRKKLVDSTDKADLRLIYLALAHMIKFRGHFLIEGDLNPDNSDVDKLFIQLVQTYNQLFEENPINASGVDAKAILSARLSKSRRLENLIAQLPGEKKNGLFGNLIALSLGLTPNFKSNFDLAEDAKLQLSKDTYDDDLDNLLAQIGDQYADLFLAAKNLSDAILLSDILRVNTEITKAPLSASMIKRYDEHHQDLTLLKALVRQQLPEKYKEIFFDQSKNGYAGYIDGGASQEEFYKFIKPILEKMDGTEELLVKLNREDLLRKQRTFDNGSIPHQIHLGELHAILRRQEDFYPFLKDNREKIEKILTFRIPYYVGPLARGNSRFAWMTRKSEETITPWNFEEVVDKGASAQSFIERMTNFDKNLPNEKVLPKHSLLYEYFTVYNELTKVKYVTEGMRKPAFLSGEQKKAIVDLLFKTNRKVTVKQLKEDYFKKIECFDSVEISGVEDRFNASLGTYHDLLKIIKDKDFLDNEENEDILEDIVLTLTLFEDREMIEERLKTYAHLFDDKVMKQLKRRRYTGWGRLSRKLINGIRDKQSGKTILDFLKSDGFANRNFMQLIHDDSLTFKEDIQKAQVSGQGDSLHEHIANLAGSPAIKKGILQTVKVVDELVKVMGRHKPENIVIEMARENQTTQKGQKNSRERMKRIEEGIKELGSQILKEHPVENTQLQNEKLYLYYLQNGRDMYVDQELDINRLSDYDVDHIVPQSFLKDDSIDNKVLTRSDKARGKSDNVPSEEVVKKMKNYWRQLLNAKLITQRKFDNLTKAERGGLSELDKAGFIKRQLVETRQITKHVAQILDSRMNTKYDENDKLIREVKVITLKSKLVSDFRKDFQFYKVREINNYHHAHDAYLNAVVGTALIKKYPKLESEFVYGDYKVYDVRKMIAKSEQEIGKATAKYFFYSNIMNFFKTEITLANGEIRKRPLIETNGETGEIVWDKGRDFATVRKVLSMPQVNIVKKTEVQTGGFSKESILPKRNSDKLIARKKDWDPKKYGGFDSPTVAYSVLVVAKVEKGKSKKLKSVKELLGITIMERSSFEKNPIDFLEAKGYKEVKKDLIIKLPKYSLFELENGRKRMLASAGELQKGNELALPSKYVNFLYLASHYEKLKGSPEDNEQKQLFVEQHKHYLDEIIEQISEFSKRVILADANLDKVLSAYNKHRDKPIREQAENIIHLFTLTNLGAPAAFKYFDTTIDRKRYTSTKEVLDATLIHQSITGLYETRIDLSQLGGDGGGGSEAAAKGGTLGDQGSRGSDPLPEPRVTLTVEGIPTEFLVNTGAEHSVLTKPMGKMGSKRTVVAGATGSKVYPWTTKRLLKIGQKQVTHSFLVIPECPAPLLGRDLLTKLKAQIQFSTEGPQVTWEDRPAMCLVLNLEEEYRLHEKPVPPSIDPSWLQLFPMVWAEKAGMGLANQVPPVVVELKSDASPVAVRQYPMSKEAREGIRPHIQRFLDLGILVPCQSPWNTPLLPVKKPGTNDYRPVQDLREVNKRVQDIHPTVPNPYNLLSSLPPSHTWYSVLDLKDAFFCLKLHPNSQPLFAFEWRDPEKGNTGQLTWTRLPQGFKNSPTLFNEALHRDLASFRALNPQVVMLQYVDDLLVAAPTYRDCKEGTRRLLQELSKLGYRVSAKKAQLCREEVTYLGYLLKGGKRWLTPARKATVMKIPTPTTPRQVREFLGKAGFCRLFIPGFASLAAPLYPLTRPKVPFTWTEAHQEAFGRIKEALLSAPALALPDLTKPFALYVDEKEGVARGVLTQTLGPWRRPVAYLSKKLDPVASGWPTCLKAIAAVALLLKDADKLTLGQNVLVIAPHNLESIVRQPPDRWMTNARMTHYQSLLLNERVSFAPPAILNPATLLPVESDDTPIHICSEILAEETGTRPDLRDQPLPGVPAWYTDGSSFIMDGRRQAGAAIVDNKRTVWASNLPEGTSAQKAELIALTQALRLAEGKSINIYTDSRYAFATAHVHGAIYKQRGWLTSAGKDIKNKEEILALLEAIHLPKRVAIIHCPGHQRGTDPVATGNRKADEAAKQAAQSTRILTETTKNAGKRTADGSEFEKRTADGSEFESPKKKAKVE

SEQ ID NO: 1826 - protein, 2216 aa, synthetic construct
MPAAKRVKLDGGDKKYSIGLDIGTNSVGWAVITDEYKVPSKKFKVLGNTDRHSIKKNLIGALLFDSGETAEATRLKRTARRRYTRRKNRICYLQEIFSNEMAKVDDSFFHRLEESFLVEEDKKHERHPIFGNIVDEVAYHEKYPTIYHLRKKLVDSTDKADLRLIYLALAHMIKFRGHFLIEGDLNPDNSDVDKLFIQLVQTYNQLFEENPINASGVDAKAILSARLSKSRRLENLIAQLPGEKKNGLFGNLIALSLGLTPNFKSNFDLAEDAKLQLSKDTYDDDLDNLLAQIGDQYADLFLAAKNLSDAILLSDILRVNTEITKAPLSASMIKRYDEHHQDLTLLKALVRQQLPEKYKEIFFDQSKNGYAGYIDGGASQEEFYKFIKPILEKMDGTEELLVKLNREDLLRKQRTFDNGSIPHQIHLGELHAILRRQEDFYPFLKDNREKIEKILTFRIPYYVGPLARGNSRFAWMTRKSEETITPWNFEEVVDKGASAQSFIERMTNFDKNLPNEKVLPKHSLLYEYFTVYNELTKVKYVTEGMRKPAFLSGEQKKAIVDLLFKTNRKVTVKQLKEDYFKKIECFDSVEISGVEDRFNASLGTYHDLLKIIKDKDFLDNEENEDILEDIVLTLTLFEDREMIEERLKTYAHLFDDKVMKQLKRRRYTGWGRLSRKLINGIRDKQSGKTILDFLKSDGFANRNFMQLIHDDSLTFKEDIQKAQVSGQGDSLHEHIANLAGSPAIKKGILQTVKVVDELVKVMGRHKPENIVIEMARENQTTQKGQKNSRERMKRIEEGIKELGSQILKEHPVENTQLQNEKLYLYYLQNGRDMYVDQELDINRLSDYDVDHIVPQSFLKDDSIDNKVLTRSDKARGKSDNVPSEEVVKKMKNYWRQLLNAKLITQRKFDNLTKAERGGLSELDKAGFIKRQLVETRQITKHVAQILDSRMNTKYDENDKLIREVKVITLKSKLVSDFRKDFQFYKVREINNYHHAHDAYLNAVVGTALIKKYPKLESEFVYGDYKVYDVRKMIAKSEQEIGKATAKYFFYSNIMNFFKTEITLANGEIRKRPLIETNGETGEIVWDKGRDFATVRKVLSMPQVNIVKKTEVQTGGFSKESILPKRNSDKLIARKKDWDPKKYGGFDSPTVAYSVLVVAKVEKGKSKKLKSVKELLGITIMERSSFEKNPIDFLEAKGYKEVKKDLIIKLPKYSLFELENGRKRMLASAGELQKGNELALPSKYVNFLYLASHYEKLKGSPEDNEQKQLFVEQHKHYLDEIIEQISEFSKRVILADANLDKVLSAYNKHRDKPIREQAENIIHLFTLTNLGAPAAFKYFDTTIDRKRYTSTKEVLDATLIHQSITGLYETRIDLSQLGGDGGGGGPAPGGSGGTLGDQGSRGSDPLPEPRVTLTVEGIPTEFLVNTGAEHSVLTKPMGKMGSKRTVVAGATGSKVYPWTTKRLLKIGQKQVTHSFLVIPECPAPLLGRDLLTKLKAQIQFSTEGPQVTWEDRPAMCLVLNLEEEYRLHEKPVPPSIDPSWLQLFPMVWAEKAGMGLANQVPPVVVELKSDASPVAVRQYPMSKEAREGIRPHIQRFLDLGILVPCQSPWNTPLLPVKKPGTNDYRPVQDLREVNKRVQDIHPTVPNPYNLLSSLPPSHTWYSVLDLKDAFFCLKLHPNSQPLFAFEWRDPEKGNTGQLTWTRLPQGFKNSPTLFNEALHRDLASFRALNPQVVMLQYVDDLLVAAPTYRDCKEGTRRLLQELSKLGYRVSAKKAQLCREEVTYLGYLLKGGKRWLTPARKATVMKIPTPTTPRQVREFLGKAGFCRLFIPGFASLAAPLYPLTRPKVPFTWTEAHQEAFGRIKEALLSAPALALPDLTKPFALYVDEKEGVARGVLTQTLGPWRRPVAYLSKKLDPVASGWPTCLKAIAAVALLLKDADKLTLGQNVLVIAPHNLESIVRQPPDRWMTNARMTHYQSLLLNERVSFAPPAILNPATLLPVESDDTPIHICSEILAEETGTRPDLRDQPLPGVPAWYTDGSSFIMDGRRQAGAAIVDNKRTVWASNLPEGTSAQKAELIALTQALRLAEGKSINIYTDSRYAFATAHVHGAIYKQRGWLTSAGKDIKNKEEILALLEAIHLPKRVAIIHCPGHQRGTDPVATGNRKADEAAKQAAQSTRILTETTKNAGKRTADGSEFEKRTADGSEFESPKKKAKVE

SEQ ID NO: 1827 - protein, 2216 aa, synthetic construct
MPAAKRVKLDGGDKKYSIGLDIGTNSVGWAVITDEYKVPSKKFKVLGNTDRHSIKKNLIGALLFDSGETAEATRLKRTARRRYTRRKNRICYLQEIFSNEMAKVDDSFFHRLEESFLVEEDKKHERHPIFGNIVDEVAYHEKYPTIYHLRKKLVDSTDKADLRLIYLALAHMIKFRGHFLIEGDLNPDNSDVDKLFIQLVQTYNQLFEENPINASGVDAKAILSARLSKSRRLENLIAQLPGEKKNGLFGNLIALSLGLTPNFKSNFDLAEDAKLQLSKDTYDDDLDNLLAQIGDQYADLFLAAKNLSDAILLSDILRVNTEITKAPLSASMIKRYDEHHQDLTLLKALVRQQLPEKYKEIFFDQSKNGYAGYIDGGASQEEFYKFIKPILEKMDGTEELLVKLNREDLLRKQRTFDNGSIPHQIHLGELHAILRRQEDFYPFLKDNREKIEKILTFRIPYYVGPLARGNSRFAWMTRKSEETITPWNFEEVVDKGASAQSFIERMTNFDKNLPNEKVLPKHSLLYEYFTVYNELTKVKYVTEGMRKPAFLSGEQKKAIVDLLFKTNRKVTVKQLKEDYFKKIECFDSVEISGVEDRFNASLGTYHDLLKIIKDKDFLDNEENEDILEDIVLTLTLFEDREMIEERLKTYAHLFDDKVMKQLKRRRYTGWGRLSRKLINGIRDKQSGKTILDFLKSDGFANRNFMQLIHDDSLTFKEDIQKAQVSGQGDSLHEHIANLAGSPAIKKGILQTVKVVDELVKVMGRHKPENIVIEMARENQTTQKGQKNSRERMKRIEEGIKELGSQILKEHPVENTQLQNEKLYLYYLQNGRDMYVDQELDINRLSDYDVDHIVPQSFLKDDSIDNKVLTRSDKARGKSDNVPSEEVVKKMKNYWRQLLNAKLITQRKFDNLTKAERGGLSELDKAGFIKRQLVETRQITKHVAQILDSRMNTKYDENDKLIREVKVITLKSKLVSDFRKDFQFYKVREINNYHHAHDAYLNAVVGTALIKKYPKLESEFVYGDYKVYDVRKMIAKSEQEIGKATAKYFFYSNIMNFFKTEITLANGEIRKRPLIETNGETGEIVWDKGRDFATVRKVLSMPQVNIVKKTEVQTGGFSKESILPKRNSDKLIARKKDWDPKKYGGFDSPTVAYSVLVVAKVEKGKSKKLKSVKELLGITIMERSSFEKNPIDFLEAKGYKEVKKDLIIKLPKYSLFELENGRKRMLASAGELQKGNELALPSKYVNFLYLASHYEKLKGSPEDNEQKQLFVEQHKHYLDEIIEQISEFSKRVILADANLDKVLSAYNKHRDKPIREQAENIIHLFTLTNLGAPAAFKYFDTTIDRKRYTSTKEVLDATLIHQSITGLYETRIDLSQLGGDGGPAPGGSGSSGGTLGDQGSRGSDPLPEPRVTLTVEGIPTEFLVNTGAEHSVLTKPMGKMGSKRTVVAGATGSKVYPWTTKRLLKIGQKQVTHSFLVIPECPAPLLGRDLLTKLKAQIQFSTEGPQVTWEDRPAMCLVLNLEEEYRLHEKPVPPSIDPSWLQLFPMVWAEKAGMGLANQVPPVVVELKSDASPVAVRQYPMSKEAREGIRPHIQRFLDLGILVPCQSPWNTPLLPVKKPGTNDYRPVQDLREVNKRVQDIHPTVPNPYNLLSSLPPSHTWYSVLDLKDAFFCLKLHPNSQPLFAFEWRDPEKGNTGQLTWTRLPQGFKNSPTLFNEALHRDLASFRALNPQVVMLQYVDDLLVAAPTYRDCKEGTRRLLQELSKLGYRVSAKKAQLCREEVTYLGYLLKGGKRWLTPARKATVMKIPTPTTPRQVREFLGKAGFCRLFIPGFASLAAPLYPLTRPKVPFTWTEAHQEAFGRIKEALLSAPALALPDLTKPFALYVDEKEGVARGVLTQTLGPWRRPVAYLSKKLDPVASGWPTCLKAIAAVALLLKDADKLTLGQNVLVIAPHNLESIVRQPPDRWMTNARMTHYQSLLLNERVSFAPPAILNPATLLPVESDDTPIHICSEILAEETGTRPDLRDQPLPGVPAWYTDGSSFIMDGRRQAGAAIVDNKRTVWASNLPEGTSAQKAELIALTQALRLAEGKSINIYTDSRYAFATAHVHGAIYKQRGWLTSAGKDIKNKEEILALLEAIHLPKRVAIIHCPGHQRGTDPVATGNRKADEAAKQAAQSTRILTETTKNAGKRTADGSEFEKRTADGSEFESPKKKAKVE

SEQ ID NO: 1828 - protein, 2212 aa, synthetic construct
MPAAKRVKLDGGDKKYSIGLDIGTNSVGWAVITDEYKVPSKKFKVLGNTDRHSIKKNLIGALLFDSGETAEATRLKRTARRRYTRRKNRICYLQEIFSNEMAKVDDSFFHRLEESFLVEEDKKHERHPIFGNIVDEVAYHEKYPTIYHLRKKLVDSTDKADLRLIYLALAHMIKFRGHFLIEGDLNPDNSDVDKLFIQLVQTYNQLFEENPINASGVDAKAILSARLSKSRRLENLIAQLPGEKKNGLFGNLIALSLGLTPNFKSNFDLAEDAKLQLSKDTYDDDLDNLLAQIGDQYADLFLAAKNLSDAILLSDILRVNTEITKAPLSASMIKRYDEHHQDLTLLKALVRQQLPEKYKEIFFDQSKNGYAGYIDGGASQEEFYKFIKPILEKMDGTEELLVKLNREDLLRKQRTFDNGSIPHQIHLGELHAILRRQEDFYPFLKDNREKIEKILTFRIPYYVGPLARGNSRFAWMTRKSEETITPWNFEEVVDKGASAQSFIERMTNFDKNLPNEKVLPKHSLLYEYFTVYNELTKVKYVTEGMRKPAFLSGEQKKAIVDLLFKTNRKVTVKQLKEDYFKKIECFDSVEISGVEDRFNASLGTYHDLLKIIKDKDFLDNEENEDILEDIVLTLTLFEDREMIEERLKTYAHLFDDKVMKQLKRRRYTGWGRLSRKLINGIRDKQSGKTILDFLKSDGFANRNFMQLIHDDSLTFKEDIQKAQVSGQGDSLHEHIANLAGSPAIKKGILQTVKVVDELVKVMGRHKPENIVIEMARENQTTQKGQKNSRERMKRIEEGIKELGSQILKEHPVENTQLQNEKLYLYYLQNGRDMYVDQELDINRLSDYDVDHIVPQSFLKDDSIDNKVLTRSDKARGKSDNVPSEEVVKKMKNYWRQLLNAKLITQRKFDNLTKAERGGLSELDKAGFIKRQLVETRQITKHVAQILDSRMNTKYDENDKLIREVKVITLKSKLVSDFRKDFQFYKVREINNYHHAHDAYLNAVVGTALIKKYPKLESEFVYGDYKVYDVRKMIAKSEQEIGKATAKYFFYSNIMNFFKTEITLANGEIRKRPLIETNGETGEIVWDKGRDFATVRKVLSMPQVNIVKKTEVQTGGFSKESILPKRNSDKLIARKKDWDPKKYGGFDSPTVAYSVLVVAKVEKGKSKKLKSVKELLGITIMERSSFEKNPIDFLEAKGYKEVKKDLIIKLPKYSLFELENGRKRMLASAGELQKGNELALPSKYVNFLYLASHYEKLKGSPEDNEQKQLFVEQHKHYLDEIIEQISEFSKRVILADANLDKVLSAYNKHRDKPIREQAENIIHLFTLTNLGAPAAFKYFDTTIDRKRYTSTKEVLDATLIHQSITGLYETRIDLSQLGGDGGGGGGGGGTLGDQGSRGSDPLPEPRVTLTVEGIPTEFLVNTGAEHSVLTKPMGKMGSKRTVVAGATGSKVYPWTTKRLLKIGQKQVTHSFLVIPECPAPLLGRDLLTKLKAQIQFSTEGPQVTWEDRPAMCLVLNLEEEYRLHEKPVPPSIDPSWLQLFPMVWAEKAGMGLANQVPPVVVELKSDASPVAVRQYPMSKEAREGIRPHIQRFLDLGILVPCQSPWNTPLLPVKKPGTNDYRPVQDLREVNKRVQDIHPTVPNPYNLLSSLPPSHTWYSVLDLKDAFFCLKLHPNSQPLFAFEWRDPEKGNTGQLTWTRLPQGFKNSPTLFNEALHRDLASFRALNPQVVMLQYVDDLLVAAPTYRDCKEGTRRLLQELSKLGYRVSAKKAQLCREEVTYLGYLLKGGKRWLTPARKATVMKIPTPTTPRQVREFLGKAGFCRLFIPGFASLAAPLYPLTRPKVPFTWTEAHQEAFGRIKEALLSAPALALPDLTKPFALYVDEKEGVARGVLTQTLGPWRRPVAYLSKKLDPVASGWPTCLKAIAAVALLLKDADKLTLGQNVLVIAPHNLESIVRQPPDRWMTNARMTHYQSLLLNERVSFAPPAILNPATLLPVESDDTPIHICSEILAEETGTRPDLRDQPLPGVPAWYTDGSSFIMDGRRQAGAAIVDNKRTVWASNLPEGTSAQKAELIALTQALRLAEGKSINIYTDSRYAFATAHVHGAIYKQRGWLTSAGKDIKNKEEILALLEAIHLPKRVAIIHCPGHQRGTDPVATGNRKADEAAKQAAQSTRILTETTKNAGKRTADGSEFEKRTADGSEFESPKKKAKVE

SEQ ID NO: 1829 - protein, 2218 aa, synthetic construct
MPAAKRVKLDGGDKKYSIGLDIGTNSVGWAVITDEYKVPSKKFKVLGNTDRHSIKKNLIGALLFDSGETAEATRLKRTARRRYTRRKNRICYLQEIFSNEMAKVDDSFFHRLEESFLVEEDKKHERHPIFGNIVDEVAYHEKYPTIYHLRKKLVDSTDKADLRLIYLALAHMIKFRGHFLIEGDLNPDNSDVDKLFIQLVQTYNQLFEENPINASGVDAKAILSARLSKSRRLENLIAQLPGEKKNGLFGNLIALSLGLTPNFKSNFDLAEDAKLQLSKDTYDDDLDNLLAQIGDQYADLFLAAKNLSDAILLSDILRVNTEITKAPLSASMIKRYDEHHQDLTLLKALVRQQLPEKYKEIFFDQSKNGYAGYIDGGASQEEFYKFIKPILEKMDGTEELLVKLNREDLLRKQRTFDNGSIPHQIHLGELHAILRRQEDFYPFLKDNREKIEKILTFRIPYYVGPLARGNSRFAWMTRKSEETITPWNFEEVVDKGASAQSFIERMTNFDKNLPNEKVLPKHSLLYEYFTVYNELTKVKYVTEGMRKPAFLSGEQKKAIVDLLFKTNRKVTVKQLKEDYFKKIECFDSVEISGVEDRFNASLGTYHDLLKIIKDKDFLDNEENEDILEDIVLTLTLFEDREMIEERLKTYAHLFDDKVMKQLKRRRYTGWGRLSRKLINGIRDKQSGKTILDFLKSDGFANRNFMQLIHDDSLTFKEDIQKAQVSGQGDSLHEHIANLAGSPAIKKGILQTVKVVDELVKVMGRHKPENIVIEMARENQTTQKGQKNSRERMKRIEEGIKELGSQILKEHPVENTQLQNEKLYLYYLQNGRDMYVDQELDINRLSDYDVDHIVPQSFLKDDSIDNKVLTRSDKARGKSDNVPSEEVVKKMKNYWRQLLNAKLITQRKFDNLTKAERGGLSELDKAGFIKRQLVETRQITKHVAQILDSRMNTKYDENDKLIREVKVITLKSKLVSDFRKDFQFYKVREINNYHHAHDAYLNAVVGTALIKKYPKLESEFVYGDYKVYDVRKMIAKSEQEIGKATAKYFFYSNIMNFFKTEITLANGEIRKRPLIETNGETGEIVWDKGRDFATVRKVLSMPQVNIVKKTEVQTGGFSKESILPKRNSDKLIARKKDWDPKKYGGFDSPTVAYSVLVVAKVEKGKSKKLKSVKELLGITIMERSSFEKNPIDFLEAKGYKEVKKDLIIKLPKYSLFELENGRKRMLASAGELQKGNELALPSKYVNFLYLASHYEKLKGSPEDNEQKQLFVEQHKHYLDEIIEQISEFSKRVILADANLDKVLSAYNKHRDKPIREQAENIIHLFTLTNLGAPAAFKYFDTTIDRKRYTSTKEVLDATLIHQSITGLYETRIDLSQLGGDGGGGSEAAAKGGGGGTLGDQGSRGSDPLPEPRVTLTVEGIPTEFLVNTGAEHSVLTKPMGKMGSKRTVVAGATGSKVYPWTTKRLLKIGQKQVTHSFLVIPECPAPLLGRDLLTKLKAQIQFSTEGPQVTWEDRPAMCLVLNLEEEYRLHEKPVPPSIDPSWLQLFPMVWAEKAGMGLANQVPPVVVELKSDASPVAVRQYPMSKEAREGIRPHIQRFLDLGILVPCQSPWNTPLLPVKKPGTNDYRPVQDLREVNKRVQDIHPTVPNPYNLLSSLPPSHTWYSVLDLKDAFFCLKLHPNSQPLFAFEWRDPEKGNTGQLTWTRLPQGFKNSPTLFNEALHRDLASFRALNPQVVMLQYVDDLLVAAPTYRDCKEGTRRLLQELSKLGYRVSAKKAQLCREEVTYLGYLLKGGKRWLTPARKATVMKIPTPTTPRQVREFLGKAGFCRLFIPGFASLAAPLYPLTRPKVPFTWTEAHQEAFGRIKEALLSAPALALPDLTKPFALYVDEKEGVARGVLTQTLGPWRRPVAYLSKKLDPVASGWPTCLKAIAAVALLLKDADKLTLGQNVLVIAPHNLESIVRQPPDRWMTNARMTHYQSLLLNERVSFAPPAILNPATLLPVESDDTPIHICSEILAEETGTRPDLRDQPLPGVPAWYTDGSSFIMDGRRQAGAAIVDNKRTVWASNLPEGTSAQKAELIALTQALRLAEGKSINIYTDSRYAFATAHVHGAIYKQRGWLTSAGKDIKNKEEILALLEAIHLPKRVAIIHCPGHQRGTDPVATGNRKADEAAKQAAQSTRILTETTKNAGKRTADGSEFEKRTADGSEFESPKKKAKVE

SEQ ID NO: 1830 - protein, 2216 aa, synthetic construct
MPAAKRVKLDGGDKKYSIGLDIGTNSVGWAVITDEYKVPSKKFKVLGNTDRHSIKKNLIGALLFDSGETAEATRLKRTARRRYTRRKNRICYLQEIFSNEMAKVDDSFFHRLEESFLVEEDKKHERHPIFGNIVDEVAYHEKYPTIYHLRKKLVDSTDKADLRLIYLALAHMIKFRGHFLIEGDLNPDNSDVDKLFIQLVQTYNQLFEENPINASGVDAKAILSARLSKSRRLENLIAQLPGEKKNGLFGNLIALSLGLTPNFKSNFDLAEDAKLQLSKDTYDDDLDNLLAQIGDQYADLFLAAKNLSDAILLSDILRVNTEITKAPLSASMIKRYDEHHQDLTLLKALVRQQLPEKYKEIFFDQSKNGYAGYIDGGASQEEFYKFIKPILEKMDGTEELLVKLNREDLLRKQRTFDNGSIPHQIHLGELHAILRRQEDFYPFLKDNREKIEKILTFRIPYYVGPLARGNSRFAWMTRKSEETITPWNFEEVVDKGASAQSFIERMTNFDKNLPNEKVLPKHSLLYEYFTVYNELTKVKYVTEGMRKPAFLSGEQKKAIVDLLFKTNRKVTVKQLKEDYFKKIECFDSVEISGVEDRFNASLGTYHDLLKIIKDKDFLDNEENEDILEDIVLTLTLFEDREMIEERLKTYAHLFDDKVMKQLKRRRYTGWGRLSRKLINGIRDKQSGKTILDFLKSDGFANRNFMQLIHDDSLTFKEDIQKAQVSGQGDSLHEHIANLAGSPAIKKGILQTVKVVDELVKVMGRHKPENIVIEMARENQTTQKGQKNSRERMKRIEEGIKELGSQILKEHPVENTQLQNEKLYLYYLQNGRDMYVDQELDINRLSDYDVDHIVPQSFLKDDSIDNKVLTRSDKARGKSDNVPSEEVVKKMKNYWRQLLNAKLITQRKFDNLTKAERGGLSELDKAGFIKRQLVETRQITKHVAQILDSRMNTKYDENDKLIREVKVITLKSKLVSDFRKDFQFYKVREINNYHHAHDAYLNAVVGTALIKKYPKLESEFVYGDYKVYDVRKMIAKSEQEIGKATAKYFFYSNIMNFFKTEITLANGEIRKRPLIETNGETGEIVWDKGRDFATVRKVLSMPQVNIVKKTEVQTGGFSKESILPKRNSDKLIARKKDWDPKKYGGFDSPTVAYSVLVVAKVEKGKSKKLKSVKELLGITIMERSSFEKNPIDFLEAKGYKEVKKDLIIKLPKYSLFELENGRKRMLASAGELQKGNELALPSKYVNFLYLASHYEKLKGSPEDNEQKQLFVEQHKHYLDEIIEQISEFSKRVILADANLDKVLSAYNKHRDKPIREQAENIIHLFTLTNLGAPAAFKYFDTTIDRKRYTSTKEVLDATLIHQSITGLYETRIDLSQLGGDGGGSSGGSPAPGGTLGDQGSRGSDPLPEPRVTLTVEGIPTEFLVNTGAEHSVLTKPMGKMGSKRTVVAGATGSKVYPWTTKRLLKIGQKQVTHSFLVIPECPAPLLGRDLLTKLKAQIQFSTEGPQVTWEDRPAMCLVLNLEEEYRLHEKPVPPSIDPSWLQLFPMVWAEKAGMGLANQVPPVVVELKSDASPVAVRQYPMSKEAREGIRPHIQRFLDLGILVPCQSPWNTPLLPVKKPGTNDYRPVQDLREVNKRVQDIHPTVPNPYNLLSSLPPSHTWYSVLDLKDAFFCLKLHPNSQPLFAFEWRDPEKGNTGQLTWTRLPQGFKNSPTLFNEALHRDLASFRALNPQVVMLQYVDDLLVAAPTYRDCKEGTRRLLQELSKLGYRVSAKKAQLCREEVTYLGYLLKGGKRWLTPARKATVMKIPTPTTPRQVREFLGKAGFCRLFIPGFASLAAPLYPLTRPKVPFTWTEAHQEAFGRIKEALLSAPALALPDLTKPFALYVDEKEGVARGVLTQTLGPWRRPVAYLSKKLDPVASGWPTCLKAIAAVALLLKDADKLTLGQNVLVIAPHNLESIVRQPPDRWMTNARMTHYQSLLLNERVSFAPPAILNPATLLPVESDDTPIHICSEILAEETGTRPDLRDQPLPGVPAWYTDGSSFIMDGRRQAGAAIVDNKRTVWASNLPEGTSAQKAELIALTQALRLAEGKSINIYTDSRYAFATAHVHGAIYKQRGWLTSAGKDIKNKEEILALLEAIHLPKRVAIIHCPGHQRGTDPVATGNRKADEAAKQAAQSTRILTETTKNAGKRTADGSEFEKRTADGSEFESPKKKAKVE

SEQ ID NO: 1831 - protein, 2213 aa, synthetic construct
MPAAKRVKLDGGDKKYSIGLDIGTNSVGWAVITDEYKVPSKKFKVLGNTDRHSIKKNLIGALLFDSGETAEATRLKRTARRRYTRRKNRICYLQEIFSNEMAKVDDSFFHRLEESFLVEEDKKHERHPIFGNIVDEVAYHEKYPTIYHLRKKLVDSTDKADLRLIYLALAHMIKFRGHFLIEGDLNPDNSDVDKLFIQLVQTYNQLFEENPINASGVDAKAILSARLSKSRRLENLIAQLPGEKKNGLFGNLIALSLGLTPNFKSNFDLAEDAKLQLSKDTYDDDLDNLLAQIGDQYADLFLAAKNLSDAILLSDILRVNTEITKAPLSASMIKRYDEHHQDLTLLKALVRQQLPEKYKEIFFDQSKNGYAGYIDGGASQEEFYKFIKPILEKMDGTEELLVKLNREDLLRKQRTFDNGSIPHQIHLGELHAILRRQEDFYPFLKDNREKIEKILTFRIPYYVGPLARGNSRFAWMTRKSEETITPWNFEEVVDKGASAQSFIERMTNFDKNLPNEKVLPKHSLLYEYFTVYNELTKVKYVTEGMRKPAFLSGEQKKAIVDLLFKTNRKVTVKQLKEDYFKKIECFDSVEISGVEDRFNASLGTYHDLLKIIKDKDFLDNEENEDILEDIVLTLTLFEDREMIEERLKTYAHLFDDKVMKQLKRRRYTGWGRLSRKLINGIRDKQSGKTILDFLKSDGFANRNFMQLIHDDSLTFKEDIQKAQVSGQGDSLHEHIANLAGSPAIKKGILQTVKVVDELVKVMGRHKPENIVIEMARENQTTQKGQKNSRERMKRIEEGIKELGSQILKEHPVENTQLQNEKLYLYYLQNGRDMYVDQELDINRLSDYDVDHIVPQSFLKDDSIDNKVLTRSDKARGKSDNVPSEEVVKKMKNYWRQLLNAKLITQRKFDNLTKAERGGLSELDKAGFIKRQLVETRQITKHVAQILDSRMNTKYDENDKLIREVKVITLKSKLVSDFRKDFQFYKVREINNYHHAHDAYLNAVVGTALIKKYPKLESEFVYGDYKVYDVRKMIAKSEQEIGKATAKYFFYSNIMNFFKTEITLANGEIRKRPLIETNGETGEIVWDKGRDFATVRKVLSMPQVNIVKKTEVQTGGFSKESILPKRNSDKLIARKKDWDPKKYGGFDSPTVAYSVLVVAKVEKGKSKKLKSVKELLGITIMERSSFEKNPIDFLEAKGYKEVKKDLIIKLPKYSLFELENGRKRMLASAGELQKGNELALPSKYVNFLYLASHYEKLKGSPEDNEQKQLFVEQHKHYLDEIIEQISEFSKRVILADANLDKVLSAYNKHRDKPIREQAENIIHLFTLTNLGAPAAFKYFDTTIDRKRYTSTKEVLDATLIHQSITGLYETRIDLSQLGGDGGGSSGSSGGTLGDQGSRGSDPLPEPRVTLTVEGIPTEFLVNTGAEHSVLTKPMGKMGSKRTVVAGATGSKVYPWTTKRLLKIGQKQVTHSFLVIPECPAPLLGRDLLTKLKAQIQFSTEGPQVTWEDRPAMCLVLNLEEEYRLHEKPVPPSIDPSWLQLFPMVWAEKAGMGLANQVPPVVVELKSDASPVAVRQYPMSKEAREGIRPHIQRFLDLGILVPCQSPWNTPLLPVKKPGTNDYRPVQDLREVNKRVQDIHPTVPNPYNLLSSLPPSHTWYSVLDLKDAFFCLKLHPNSQPLFAFEWRDPEKGNTGQLTWTRLPQGFKNSPTLFNEALHRDLASFRALNPQVVMLQYVDDLLVAAPTYRDCKEGTRRLLQELSKLGYRVSAKKAQLCREEVTYLGYLLKGGKRWLTPARKATVMKIPTPTTPRQVREFLGKAGFCRLFIPGFASLAAPLYPLTRPKVPFTWTEAHQEAFGRIKEALLSAPALALPDLTKPFALYVDEKEGVARGVLTQTLGPWRRPVAYLSKKLDPVASGWPTCLKAIAAVALLLKDADKLTLGQNVLVIAPHNLESIVRQPPDRWMTNARMTHYQSLLLNERVSFAPPAILNPATLLPVESDDTPIHICSEILAEETGTRPDLRDQPLPGVPAWYTDGSSFIMDGRRQAGAAIVDNKRTVWASNLPEGTSAQKAELIALTQALRLAEGKSINIYTDSRYAFATAHVHGAIYKQRGWLTSAGKDIKNKEEILALLEAIHLPKRVAIIHCPGHQRGTDPVATGNRKADEAAKQAAQSTRILTETTKNAGKRTADGSEFEKRTADGSEFESPKKKAKVE

SEQ ID NO: 1832 - protein, 2216 aa, synthetic construct
MPAAKRVKLDGGDKKYSIGLDIGTNSVGWAVITDEYKVPSKKFKVLGNTDRHSIKKNLIGALLFDSGETAEATRLKRTARRRYTRRKNRICYLQEIFSNEMAKVDDSFFHRLEESFLVEEDKKHERHPIFGNIVDEVAYHEKYPTIYHLRKKLVDSTDKADLRLIYLALAHMIKFRGHFLIEGDLNPDNSDVDKLFIQLVQTYNQLFEENPINASGVDAKAILSARLSKSRRLENLIAQLPGEKKNGLFGNLIALSLGLTPNFKSNFDLAEDAKLQLSKDTYDDDLDNLLAQIGDQYADLFLAAKNLSDAILLSDILRVNTEITKAPLSASMIKRYDEHHQDLTLLKALVRQQLPEKYKEIFFDQSKNGYAGYIDGGASQEEFYKFIKPILEKMDGTEELLVKLNREDLLRKQRTFDNGSIPHQIHLGELHAILRRQEDFYPFLKDNREKIEKILTFRIPYYVGPLARGNSRFAWMTRKSEETITPWNFEEVVDKGASAQSFIERMTNFDKNLPNEKVLPKHSLLYEYFTVYNELTKVKYVTEGMRKPAFLSGEQKKAIVDLLFKTNRKVTVKQLKEDYFKKIECFDSVEISGVEDRFNASLGTYHDLLKIIKDKDFLDNEENEDILEDIVLTLTLFEDREMIEERLKTYAHLFDDKVMKQLKRRRYTGWGRLSRKLINGIRDKQSGKTILDFLKSDGFANRNFMQLIHDDSLTFKEDIQKAQVSGQGDSLHEHIANLAGSPAIKKGILQTVKVVDELVKVMGRHKPENIVIEMARENQTTQKGQKNSRERMKRIEEGIKELGSQILKEHPVENTQLQNEKLYLYYLQNGRDMYVDQELDINRLSDYDVDHIVPQSFLKDDSIDNKVLTRSDKARGKSDNVPSEEVVKKMKNYWRQLLNAKLITQRKFDNLTKAERGGLSELDKAGFIKRQLVETRQITKHVAQILDSRMNTKYDENDKLIREVKVITLKSKLVSDFRKDFQFYKVREINNYHHAHDAYLNAVVGTALIKKYPKLESEFVYGDYKVYDVRKMIAKSEQEIGKATAKYFFYSNIMNFFKTEITLANGEIRKRPLIETNGETGEIVWDKGRDFATVRKVLSMPQVNIVKKTEVQTGGFSKESILPKRNSDKLIARKKDWDPKKYGGFDSPTVAYSVLVVAKVEKGKSKKLKSVKELLGITIMERSSFEKNPIDFLEAKGYKEVKKDLIIKLPKYSLFELENGRKRMLASAGELQKGNELALPSKYVNFLYLASHYEKLKGSPEDNEQKQLFVEQHKHYLDEIIEQISEFSKRVILADANLDKVLSAYNKHRDKPIREQAENIIHLFTLTNLGAPAAFKYFDTTIDRKRYTSTKEVLDATLIHQSITGLYETRIDLSQLGGDGGGGSGGGPAPGGTLGDQGSRGSDPLPEPRVTLTVEGIPTEFLVNTGAEHSVLTKPMGKMGSKRTVVAGATGSKVYPWTTKRLLKIGQKQVTHSFLVIPECPAPLLGRDLLTKLKAQIQFSTEGPQVTWEDRPAMCLVLNLEEEYRLHEKPVPPSIDPSWLQLFPMVWAEKAGMGLANQVPPVVVELKSDASPVAVRQYPMSKEAREGIRPHIQRFLDLGILVPCQSPWNTPLLPVKKPGTNDYRPVQDLREVNKRVQDIHPTVPNPYNLLSSLPPSHTWYSVLDLKDAFFCLKLHPNSQPLFAFEWRDPEKGNTGQLTWTRLPQGFKNSPTLFNEALHRDLASFRALNPQVVMLQYVDDLLVAAPTYRDCKEGTRRLLQELSKLGYRVSAKKAQLCREEVTYLGYLLKGGKRWLTPARKATVMKIPTPTTPRQVREFLGKAGFCRLFIPGFASLAAPLYPLTRPKVPFTWTEAHQEAFGRIKEALLSAPALALPDLTKPFALYVDEKEGVARGVLTQTLGPWRRPVAYLSKKLDPVASGWPTCLKAIAAVALLLKDADKLTLGQNVLVIAPHNLESIVRQPPDRWMTNARMTHYQSLLLNERVSFAPPAILNPATLLPVESDDTPIHICSEILAEETGTRPDLRDQPLPGVPAWYTDGSSFIMDGRRQAGAAIVDNKRTVWASNLPEGTSAQKAELIALTQALRLAEGKSINIYTDSRYAFATAHVHGAIYKQRGWLTSAGKDIKNKEEILALLEAIHLPKRVAIIHCPGHQRGTDPVATGNRKADEAAKQAAQSTRILTETTKNAGKRTADGSEFEKRTADGSEFESPKKKAKVE

SEQ ID NO: 1833 - protein, 2218 aa, synthetic construct
MPAAKRVKLDGGDKKYSIGLDIGTNSVGWAVITDEYKVPSKKFKVLGNTDRHSIKKNLIGALLFDSGETAEATRLKRTARRRYTRRKNRICYLQEIFSNEMAKVDDSFFHRLEESFLVEEDKKHERHPIFGNIVDEVAYHEKYPTIYHLRKKLVDSTDKADLRLIYLALAHMIKFRGHFLIEGDLNPDNSDVDKLFIQLVQTYNQLFEENPINASGVDAKAILSARLSKSRRLENLIAQLPGEKKNGLFGNLIALSLGLTPNFKSNFDLAEDAKLQLSKDTYDDDLDNLLAQIGDQYADLFLAAKNLSDAILLSDILRVNTEITKAPLSASMIKRYDEHHQDLTLLKALVRQQLPEKYKEIFFDQSKNGYAGYIDGGASQEEFYKFIKPILEKMDGTEELLVKLNREDLLRKQRTFDNGSIPHQIHLGELHAILRRQEDFYPFLKDNREKIEKILTFRIPYYVGPLARGNSRFAWMTRKSEETITPWNFEEVVDKGASAQSFIERMTNFDKNLPNEKVLPKHSLLYEYFTVYNELTKVKYVTEGMRKPAFLSGEQKKAIVDLLFKTNRKVTVKQLKEDYFKKIECFDSVEISGVEDRFNASLGTYHDLLKIIKDKDFLDNEENEDILEDIVLTLTLFEDREMIEERLKTYAHLFDDKVMKQLKRRRYTGWGRLSRKLINGIRDKQSGKTILDFLKSDGFANRNFMQLIHDDSLTFKEDIQKAQVSGQGDSLHEHIANLAGSPAIKKGILQTVKVVDELVKVMGRHKPENIVIEMARENQTTQKGQKNSRERMKRIEEGIKELGSQILKEHPVENTQLQNEKLYLYYLQNGRDMYVDQELDINRLSDYDVDHIVPQSFLKDDSIDNKVLTRSDKARGKSDNVPSEEVVKKMKNYWRQLLNAKLITQRKFDNLTKAERGGLSELDKAGFIKRQLVETRQITKHVAQILDSRMNTKYDENDKLIREVKVITLKSKLVSDFRKDFQFYKVREINNYHHAHDAYLNAVVGTALIKKYPKLESEFVYGDYKVYDVRKMIAKSEQEIGKATAKYFFYSNIMNFFKTEITLANGEIRKRPLIETNGETGEIVWDKGRDFATVRKVLSMPQVNIVKKTEVQTGGFSKESILPKRNSDKLIARKKDWDPKKYGGFDSPTVAYSVLVVAKVEKGKSKKLKSVKELLGITIMERSSFEKNPIDFLEAKGYKEVKKDLIIKLPKYSLFELENGRKRMLASAGELQKGNELALPSKYVNFLYLASHYEKLKGSPEDNEQKQLFVEQHKHYLDEIIEQISEFSKRVILADANLDKVLSAYNKHRDKPIREQAENIIHLFTLTNLGAPAAFKYFDTTIDRKRYTSTKEVLDATLIHQSITGLYETRIDLSQLGGDGGEAAAKGGSPAPGGTLGDQGSRGSDPLPEPRVTLTVEGIPTEFLVNTGAEHSVLTKPMGKMGSKRTVVAGATGSKVYPWTTKRLLKIGQKQVTHSFLVIPECPAPLLGRDLLTKLKAQIQFSTEGPQVTWEDRPAMCLVLNLEEEYRLHEKPVPPSIDPSWLQLFPMVWAEKAGMGLANQVPPVVVELKSDASPVAVRQYPMSKEAREGIRPHIQRFLDLGILVPCQSPWNTPLLPVKKPGTNDYRPVQDLREVNKRVQDIHPTVPNPYNLLSSLPPSHTWYSVLDLKDAFFCLKLHPNSQPLFAFEWRDPEKGNTGQLTWTRLPQGFKNSPTLFNEALHRDLASFRALNPQVVMLQYVDDLLVAAPTYRDCKEGTRRLLQELSKLGYRVSAKKAQLCREEVTYLGYLLKGGKRWLTPARKATVMKIPTPTTPRQVREFLGKAGFCRLFIPGFASLAAPLYPLTRPKVPFTWTEAHQEAFGRIKEALLSAPALALPDLTKPFALYVDEKEGVARGVLTQTLGPWRRPVAYLSKKLDPVASGWPTCLKAIAAVALLLKDADKLTLGQNVLVIAPHNLESIVRQPPDRWMTNARMTHYQSLLLNERVSFAPPAILNPATLLPVESDDTPIHICSEILAEETGTRPDLRDQPLPGVPAWYTDGSSFIMDGRRQAGAAIVDNKRTVWASNLPEGTSAQKAELIALTQALRLAEGKSINIYTDSRYAFATAHVHGAIYKQRGWLTSAGKDIKNKEEILALLEAIHLPKRVAIIHCPGHQRGTDPVATGNRKADEAAKQAAQSTRILTETTKNAGKRTADGSEFEKRTADGSEFESPKKKAKVE

SEQ ID NO: 1834 - protein, 2216 aa, synthetic construct
MPAAKRVKLDGGDKKYSIGLDIGTNSVGWAVITDEYKVPSKKFKVLGNTDRHSIKKNLIGALLFDSGETAEATRLKRTARRRYTRRKNRICYLQEIFSNEMAKVDDSFFHRLEESFLVEEDKKHERHPIFGNIVDEVAYHEKYPTIYHLRKKLVDSTDKADLRLIYLALAHMIKFRGHFLIEGDLNPDNSDVDKLFIQLVQTYNQLFEENPINASGVDAKAILSARLSKSRRLENLIAQLPGEKKNGLFGNLIALSLGLTPNFKSNFDLAEDAKLQLSKDTYDDDLDNLLAQIGDQYADLFLAAKNLSDAILLSDILRVNTEITKAPLSASMIKRYDEHHQDLTLLKALVRQQLPEKYKEIFFDQSKNGYAGYIDGGASQEEFYKFIKPILEKMDGTEELLVKLNREDLLRKQRTFDNGSIPHQIHLGELHAILRRQEDFYPFLKDNREKIEKILTFRIPYYVGPLARGNSRFAWMTRKSEETITPWNFEEVVDKGASAQSFIERMTNFDKNLPNEKVLPKHSLLYEYFTVYNELTKVKYVTEGMRKPAFLSGEQKKAIVDLLFKTNRKVTVKQLKEDYFKKIECFDSVEISGVEDRFNASLGTYHDLLKIIKDKDFLDNEENEDILEDIVLTLTLFEDREMIEERLKTYAHLFDDKVMKQLKRRRYTGWGRLSRKLINGIRDKQSGKTILDFLKSDGFANRNFMQLIHDDSLTFKEDIQKAQVSGQGDSLHEHIANLAGSPAIKKGILQTVKVVDELVKVMGRHKPENIVIEMARENQTTQKGQKNSRERMKRIEEGIKELGSQILKEHPVENTQLQNEKLYLYYLQNGRDMYVDQELDINRLSDYDVDHIVPQSFLKDDSIDNKVLTRSDKARGKSDNVPSEEVVKKMKNYWRQLLNAKLITQRKFDNLTKAERGGLSELDKAGFIKRQLVETRQITKHVAQILDSRMNTKYDENDKLIREVKVITLKSKLVSDFRKDFQFYKVREINNYHHAHDAYLNAVVGTALIKKYPKLESEFVYGDYKVYDVRKMIAKSEQEIGKATAKYFFYSNIMNFFKTEITLANGEIRKRPLIETNGETGEIVWDKGRDFATVRKVLSMPQVNIVKKTEVQTGGFSKESILPKRNSDKLIARKKDWDPKKYGGFDSPTVAYSVLVVAKVEKGKSKKLKSVKELLGITIMERSSFEKNPIDFLEAKGYKEVKKDLIIKLPKYSLFELENGRKRMLASAGELQKGNELALPSKYVNFLYLASHYEKLKGSPEDNEQKQLFVEQHKHYLDEIIEQISEFSKRVILADANLDKVLSAYNKHRDKPIREQAENIIHLFTLTNLGAPAAFKYFDTTIDRKRYTSTKEVLDATLIHQSITGLYETRIDLSQLGGDGGGGGGGSPAPGGTLGDQGSRGSDPLPEPRVTLTVEGIPTEFLVNTGAEHSVLTKPMGKMGSKRTVVAGATGSKVYPWTTKRLLKIGQKQVTHSFLVIPECPAPLLGRDLLTKLKAQIQFSTEGPQVTWEDRPAMCLVLNLEEEYRLHEKPVPPSIDPSWLQLFPMVWAEKAGMGLANQVPPVVVELKSDASPVAVRQYPMSKEAREGIRPHIQRFLDLGILVPCQSPWNTPLLPVKKPGTNDYRPVQDLREVNKRVQDIHPTVPNPYNLLSSLPPSHTWYSVLDLKDAFFCLKLHPNSQPLFAFEWRDPEKGNTGQLTWTRLPQGFKNSPTLFNEALHRDLASFRALNPQVVMLQYVDDLLVAAPTYRDCKEGTRRLLQELSKLGYRVSAKKAQLCREEVTYLGYLLKGGKRWLTPARKATVMKIPTPTTPRQVREFLGKAGFCRLFIPGFASLAAPLYPLTRPKVPFTWTEAHQEAFGRIKEALLSAPALALPDLTKPFALYVDEKEGVARGVLTQTLGPWRRPVAYLSKKLDPVASGWPTCLKAIAAVALLLKDADKLTLGQNVLVIAPHNLESIVRQPPDRWMTNARMTHYQSLLLNERVSFAPPAILNPATLLPVESDDTPIHICSEILAEETGTRPDLRDQPLPGVPAWYTDGSSFIMDGRRQAGAAIVDNKRTVWASNLPEGTSAQKAELIALTQALRLAEGKSINIYTDSRYAFATAHVHGAIYKQRGWLTSAGKDIKNKEEILALLEAIHLPKRVAIIHCPGHQRGTDPVATGNRKADEAAKQAAQSTRILTETTKNAGKRTADGSEFEKRTADGSEFESPKKKAKVE

SEQ ID NO: 1835 - protein, 2216 aa, synthetic construct
MPAAKRVKLDGGDKKYSIGLDIGTNSVGWAVITDEYKVPSKKFKVLGNTDRHSIKKNLIGALLFDSGETAEATRLKRTARRRYTRRKNRICYLQEIFSNEMAKVDDSFFHRLEESFLVEEDKKHERHPIFGNIVDEVAYHEKYPTIYHLRKKLVDSTDKADLRLIYLALAHMIKFRGHFLIEGDLNPDNSDVDKLFIQLVQTYNQLFEENPINASGVDAKAILSARLSKSRRLENLIAQLPGEKKNGLFGNLIALSLGLTPNFKSNFDLAEDAKLQLSKDTYDDDLDNLLAQIGDQYADLFLAAKNLSDAILLSDILRVNTEITKAPLSASMIKRYDEHHQDLTLLKALVRQQLPEKYKEIFFDQSKNGYAGYIDGGASQEEFYKFIKPILEKMDGTEELLVKLNREDLLRKQRTFDNGSIPHQIHLGELHAILRRQEDFYPFLKDNREKIEKILTFRIPYYVGPLARGNSRFAWMTRKSEETITPWNFEEVVDKGASAQSFIERMTNFDKNLPNEKVLPKHSLLYEYFTVYNELTKVKYVTEGMRKPAFLSGEQKKAIVDLLFKTNRKVTVKQLKEDYFKKIECFDSVEISGVEDRFNASLGTYHDLLKIIKDKDFLDNEENEDILEDIVLTLTLFEDREMIEERLKTYAHLFDDKVMKQLKRRRYTGWGRLSRKLINGIRDKQSGKTILDFLKSDGFANRNFMQLIHDDSLTFKEDIQKAQVSGQGDSLHEHIANLAGSPAIKKGILQTVKVVDELVKVMGRHKPENIVIEMARENQTTQKGQKNSRERMKRIEEGIKELGSQILKEHPVENTQLQNEKLYLYYLQNGRDMYVDQELDINRLSDYDVDHIVPQSFLKDDSIDNKVLTRSDKARGKSDNVPSEEVVKKMKNYWRQLLNAKLITQRKFDNLTKAERGGLSELDKAGFIKRQLVETRQITKHVAQILDSRMNTKYDENDKLIREVKVITLKSKLVSDFRKDFQFYKVREINNYHHAHDAYLNAVVGTALIKKYPKLESEFVYGDYKVYDVRKMIAKSEQEIGKATAKYFFYSNIMNFFKTEITLANGEIRKRPLIETNGETGEIVWDKGRDFATVRKVLSMPQVNIVKKTEVQTGGFSKESILPKRNSDKLIARKKDWDPKKYGGFDSPTVAYSVLVVAKVEKGKSKKLKSVKELLGITIMERSSFEKNPIDFLEAKGYKEVKKDLIIKLPKYSLFELENGRKRMLASAGELQKGNELALPSKYVNFLYLASHYEKLKGSPEDNEQKQLFVEQHKHYLDEIIEQISEFSKRVILADANLDKVLSAYNKHRDKPIREQAENIIHLFTLTNLGAPAAFKYFDTTIDRKRYTSTKEVLDATLIHQSITGLYETRIDLSQLGGDGGPAPGGGGGSGGTLGDQGSRGSDPLPEPRVTLTVEGIPTEFLVNTGAEHSVLTKPMGKMGSKRTVVAGATGSKVYPWTTKRLLKIGQKQVTHSFLVIPECPAPLLGRDLLTKLKAQIQFSTEGPQVTWEDRPAMCLVLNLEEEYRLHEKPVPPSIDPSWLQLFPMVWAEKAGMGLANQVPPVVVELKSDASPVAVRQYPMSKEAREGIRPHIQRFLDLGILVPCQSPWNTPLLPVKKPGTNDYRPVQDLREVNKRVQDIHPTVPNPYNLLSSLPPSHTWYSVLDLKDAFFCLKLHPNSQPLFAFEWRDPEKGNTGQLTWTRLPQGFKNSPTLFNEALHRDLASFRALNPQVVMLQYVDDLLVAAPTYRDCKEGTRRLLQELSKLGYRVSAKKAQLCREEVTYLGYLLKGGKRWLTPARKATVMKIPTPTTPRQVREFLGKAGFCRLFIPGFASLAAPLYPLTRPKVPFTWTEAHQEAFGRIKEALLSAPALALPDLTKPFALYVDEKEGVARGVLTQTLGPWRRPVAYLSKKLDPVASGWPTCLKAIAAVALLLKDADKLTLGQNVLVIAPHNLESIVRQPPDRWMTNARMTHYQSLLLNERVSFAPPAILNPATLLPVESDDTPIHICSEILAEETGTRPDLRDQPLPGVPAWYTDGSSFIMDGRRQAGAAIVDNKRTVWASNLPEGTSAQKAELIALTQALRLAEGKSINIYTDSRYAFATAHVHGAIYKQRGWLTSAGKDIKNKEEILALLEAIHLPKRVAIIHCPGHQRGTDPVATGNRKADEAAKQAAQSTRILTETTKNAGKRTADGSEFEKRTADGSEFESPKKKAKVE

SEQ ID NO: 1836 - protein, 2118 aa, synthetic construct
MPAAKRVKLDGGDKKYSIGLDIGTNSVGWAVITDEYKVPSKKFKVLGNTDRHSIKKNLIGALLFDSGETAEATRLKRTARRRYTRRKNRICYLQEIFSNEMAKVDDSFFHRLEESFLVEEDKKHERHPIFGNIVDEVAYHEKYPTIYHLRKKLVDSTDKADLRLIYLALAHMIKFRGHFLIEGDLNPDNSDVDKLFIQLVQTYNQLFEENPINASGVDAKAILSARLSKSRRLENLIAQLPGEKKNGLFGNLIALSLGLTPNFKSNFDLAEDAKLQLSKDTYDDDLDNLLAQIGDQYADLFLAAKNLSDAILLSDILRVNTEITKAPLSASMIKRYDEHHQDLTLLKALVRQQLPEKYKEIFFDQSKNGYAGYIDGGASQEEFYKFIKPILEKMDGTEELLVKLNREDLLRKQRTFDNGSIPHQIHLGELHAILRRQEDFYPFLKDNREKIEKILTFRIPYYVGPLARGNSRFAWMTRKSEETITPWNFEEVVDKGASAQSFIERMTNFDKNLPNEKVLPKHSLLYEYFTVYNELTKVKYVTEGMRKPAFLSGEQKKAIVDLLFKTNRKVTVKQLKEDYFKKIECFDSVEISGVEDRFNASLGTYHDLLKIIKDKDFLDNEENEDILEDIVLTLTLFEDREMIEERLKTYAHLFDDKVMKQLKRRRYTGWGRLSRKLINGIRDKQSGKTILDFLKSDGFANRNFMQLIHDDSLTFKEDIQKAQVSGQGDSLHEHIANLAGSPAIKKGILQTVKVVDELVKVMGRHKPENIVIEMARENQTTQKGQKNSRERMKRIEEGIKELGSQILKEHPVENTQLQNEKLYLYYLQNGRDMYVDQELDINRLSDYDVDHIVPQSFLKDDSIDNKVLTRSDKARGKSDNVPSEEVVKKMKNYWRQLLNAKLITQRKFDNLTKAERGGLSELDKAGFIKRQLVETRQITKHVAQILDSRMNTKYDENDKLIREVKVITLKSKLVSDFRKDFQFYKVREINNYHHAHDAYLNAVVGTALIKKYPKLESEFVYGDYKVYDVRKMIAKSEQEIGKATAKYFFYSNIMNFFKTEITLANGEIRKRPLIETNGETGEIVWDKGRDFATVRKVLSMPQVNIVKKTEVQTGGFSKESILPKRNSDKLIARKKDWDPKKYGGFDSPTVAYSVLVVAKVEKGKSKKLKSVKELLGITIMERSSFEKNPIDFLEAKGYKEVKKDLIIKLPKYSLFELENGRKRMLASAGELQKGNELALPSKYVNFLYLASHYEKLKGSPEDNEQKQLFVEQHKHYLDEIIEQISEFSKRVILADANLDKVLSAYNKHRDKPIREQAENIIHLFTLTNLGAPAAFKYFDTTIDRKRYTSTKEVLDATLIHQSITGLYETRIDLSQLGGDGGSGGSSGGSSGSETPGTSESATPESSGGSSGGSSGGTLNLEDEYRLYETSAEPEVSPGSTWLSDFPQAWAETGGMGLAVRQAPLIIPLKATSTPVSIKQYPMSQEAKLGIKPHIQRLLDQGILVPCQSPWNTPLLPVKKPGTNDYRPVQDLREVNKRVEDIHPTVPNPYNLLSGLPPSHRWYTVLDLKDAFFCLRLHPTSQPLFAFEWRDPGMGISGQLTWTRLPQGFKNSPTLFDEALHRDLADFRIQHPDLILLQYVDDILLAATSELDCQQGTRALLLTLGNLGYRASAKKAQLCQKQVKYLGYLLKEGQRWLTEARKETVMGQPTPKTPRQLREFLGTAGFCRLWIPGFAEMAAPLYPLTKTGTLFNWGPDQQKAYQEIKQALLTAPALGLPDLTKPFELFVDEKQGYAKGVLTQKLGPWRRPVAYLSKKLDPVAAGWPPCLRMVAAIAVLRKDAGKLTMGQPLVILAPHAVEALVKQPPDRWLSNARMTHYQAMLLDTDRVQFGPVVALNPATLLPLPEEGAPHDCLEILAETHGTRPDLTDQPIPDADHTWYTDGSSFLQEGQRKAGAAVTTETEVIWARALPAGTSAQRAELIALTQALKMAEGKRLNVYTDSRYAFATAHIHGEIYRRRGLLTSEGREIKNKSEILALLKALFLPKRLSIIHCLGHQKGDSAEARGNRLADQAAREAAIKTPPDTSTLLAGKRTADGSEFEKRTADGSEFESPKKKAKVE

SEQ ID NO: 1837 - protein, 2105 aa, synthetic construct
MPAAKRVKLDGGDKKYSIGLDIGTNSVGWAVITDEYKVPSKKFKVLGNTDRHSIKKNLIGALLFDSGETAEATRLKRTARRRYTRRKNRICYLQEIFSNEMAKVDDSFFHRLEESFLVEEDKKHERHPIFGNIVDEVAYHEKYPTIYHLRKKLVDSTDKADLRLIYLALAHMIKFRGHFLIEGDLNPDNSDVDKLFIQLVQTYNQLFEENPINASGVDAKAILSARLSKSRRLENLIAQLPGEKKNGLFGNLIALSLGLTPNFKSNFDLAEDAKLQLSKDTYDDDLDNLLAQIGDQYADLFLAAKNLSDAILLSDILRVNTEITKAPLSASMIKRYDEHHQDLTLLKALVRQQLPEKYKEIFFDQSKNGYAGYIDGGASQEEFYKFIKPILEKMDGTEELLVKLNREDLLRKQRTFDNGSIPHQIHLGELHAILRRQEDFYPFLKDNREKIEKILTFRIPYYVGPLARGNSRFAWMTRKSEETITPWNFEEVVDKGASAQSFIERMTNFDKNLPNEKVLPKHSLLYEYFTVYNELTKVKYVTEGMRKPAFLSGEQKKAIVDLLFKTNRKVTVKQLKEDYFKKIECFDSVEISGVEDRFNASLGTYHDLLKIIKDKDFLDNEENEDILEDIVLTLTLFEDREMIEERLKTYAHLFDDKVMKQLKRRRYTGWGRLSRKLINGIRDKQSGKTILDFLKSDGFANRNFMQLIHDDSLTFKEDIQKAQVSGQGDSLHEHIANLAGSPAIKKGILQTVKVVDELVKVMGRHKPENIVIEMARENQTTQKGQKNSRERMKRIEEGIKELGSQILKEHPVENTQLQNEKLYLYYLQNGRDMYVDQELDINRLSDYDVDHIVPQSFLKDDSIDNKVLTRSDKARGKSDNVPSEEVVKKMKNYWRQLLNAKLITQRKFDNLTKAERGGLSELDKAGFIKRQLVETRQITKHVAQILDSRMNTKYDENDKLIREVKVITLKSKLVSDFRKDFQFYKVREINNYHHAHDAYLNAVVGTALIKKYPKLESEFVYGDYKVYDVRKMIAKSEQEIGKATAKYFFYSNIMNFFKTEITLANGEIRKRPLIETNGETGEIVWDKGRDFATVRKVLSMPQVNIVKKTEVQTGGFSKESILPKRNSDKLIARKKDWDPKKYGGFDSPTVAYSVLVVAKVEKGKSKKLKSVKELLGITIMERSSFEKNPIDFLEAKGYKEVKKDLIIKLPKYSLFELENGRKRMLASAGELQKGNELALPSKYVNFLYLASHYEKLKGSPEDNEQKQLFVEQHKHYLDEIIEQISEFSKRVILADANLDKVLSAYNKHRDKPIREQAENIIHLFTLTNLGAPAAFKYFDTTIDRKRYTSTKEVLDATLIHQSITGLYETRIDLSQLGGDGGEAAAKEAAAKEAAAKEAAAKGGTLNLEDEYRLYETSAEPEVSPGSTWLSDFPQAWAETGGMGLAVRQAPLIIPLKATSTPVSIKQYPMSQEAKLGIKPHIQRLLDQGILVPCQSPWNTPLLPVKKPGTNDYRPVQDLREVNKRVEDIHPTVPNPYNLLSGLPPSHRWYTVLDLKDAFFCLRLHPTSQPLFAFEWRDPGMGISGQLTWTRLPQGFKNSPTLFDEALHRDLADFRIQHPDLILLQYVDDILLAATSELDCQQGTRALLLTLGNLGYRASAKKAQLCQKQVKYLGYLLKEGQRWLTEARKETVMGQPTPKTPRQLREFLGTAGFCRLWIPGFAEMAAPLYPLTKTGTLFNWGPDQQKAYQEIKQALLTAPALGLPDLTKPFELFVDEKQGYAKGVLTQKLGPWRRPVAYLSKKLDPVAAGWPPCLRMVAAIAVLRKDAGKLTMGQPLVILAPHAVEALVKQPPDRWLSNARMTHYQAMLLDTDRVQFGPVVALNPATLLPLPEEGAPHDCLEILAETHGTRPDLTDQPIPDADHTWYTDGSSFLQEGQRKAGAAVTTETEVIWARALPAGTSAQRAELIALTQALKMAEGKRLNVYTDSRYAFATAHIHGEIYRRRGLLTSEGREIKNKSEILALLKALFLPKRLSIIHCLGHQKGDSAEARGNRLADQAAREAAIKTPPDTSTLLAGKRTADGSEFEKRTADGSEFESPKKKAKVE

SEQ ID NO: 1838 - protein, 2094 aa, synthetic construct
MPAAKRVKLDGGDKKYSIGLDIGTNSVGWAVITDEYKVPSKKFKVLGNTDRHSIKKNLIGALLFDSGETAEATRLKRTARRRYTRRKNRICYLQEIFSNEMAKVDDSFFHRLEESFLVEEDKKHERHPIFGNIVDEVAYHEKYPTIYHLRKKLVDSTDKADLRLIYLALAHMIKFRGHFLIEGDLNPDNSDVDKLFIQLVQTYNQLFEENPINASGVDAKAILSARLSKSRRLENLIAQLPGEKKNGLFGNLIALSLGLTPNFKSNFDLAEDAKLQLSKDTYDDDLDNLLAQIGDQYADLFLAAKNLSDAILLSDILRVNTEITKAPLSASMIKRYDEHHQDLTLLKALVRQQLPEKYKEIFFDQSKNGYAGYIDGGASQEEFYKFIKPILEKMDGTEELLVKLNREDLLRKQRTFDNGSIPHQIHLGELHAILRRQEDFYPFLKDNREKIEKILTFRIPYYVGPLARGNSRFAWMTRKSEETITPWNFEEVVDKGASAQSFIERMTNFDKNLPNEKVLPKHSLLYEYFTVYNELTKVKYVTEGMRKPAFLSGEQKKAIVDLLFKTNRKVTVKQLKEDYFKKIECFDSVEISGVEDRFNASLGTYHDLLKIIKDKDFLDNEENEDILEDIVLTLTLFEDREMIEERLKTYAHLFDDKVMKQLKRRRYTGWGRLSRKLINGIRDKQSGKTILDFLKSDGFANRNFMQLIHDDSLTFKEDIQKAQVSGQGDSLHEHIANLAGSPAIKKGILQTVKVVDELVKVMGRHKPENIVIEMARENQTTQKGQKNSRERMKRIEEGIKELGSQILKEHPVENTQLQNEKLYLYYLQNGRDMYVDQELDINRLSDYDVDHIVPQSFLKDDSIDNKVLTRSDKARGKSDNVPSEEVVKKMKNYWRQLLNAKLITQRKFDNLTKAERGGLSELDKAGFIKRQLVETRQITKHVAQILDSRMNTKYDENDKLIREVKVITLKSKLVSDFRKDFQFYKVREINNYHHAHDAYLNAVVGTALIKKYPKLESEFVYGDYKVYDVRKMIAKSEQEIGKATAKYFFYSNIMNFFKTEITLANGEIRKRPLIETNGETGEIVWDKGRDFATVRKVLSMPQVNIVKKTEVQTGGFSKESILPKRNSDKLIARKKDWDPKKYGGFDSPTVAYSVLVVAKVEKGKSKKLKSVKELLGITIMERSSFEKNPIDFLEAKGYKEVKKDLIIKLPKYSLFELENGRKRMLASAGELQKGNELALPSKYVNFLYLASHYEKLKGSPEDNEQKQLFVEQHKHYLDEIIEQISEFSKRVILADANLDKVLSAYNKHRDKPIREQAENIIHLFTLTNLGAPAAFKYFDTTIDRKRYTSTKEVLDATLIHQSITGLYETRIDLSQLGGDGGGSSGGGPAPGGTLNLEDEYRLYETSAEPEVSPGSTWLSDFPQAWAETGGMGLAVRQAPLIIPLKATSTPVSIKQYPMSQEAKLGIKPHIQRLLDQGILVPCQSPWNTPLLPVKKPGTNDYRPVQDLREVNKRVEDIHPTVPNPYNLLSGLPPSHRWYTVLDLKDAFFCLRLHPTSQPLFAFEWRDPGMGISGQLTWTRLPQGFKNSPTLFDEALHRDLADFRIQHPDLILLQYVDDILLAATSELDCQQGTRALLLTLGNLGYRASAKKAQLCQKQVKYLGYLLKEGQRWLTEARKETVMGQPTPKTPRQLREFLGTAGFCRLWIPGFAEMAAPLYPLTKTGTLFNWGPDQQKAYQEIKQALLTAPALGLPDLTKPFELFVDEKQGYAKGVLTQKLGPWRRPVAYLSKKLDPVAAGWPPCLRMVAAIAVLRKDAGKLTMGQPLVILAPHAVEALVKQPPDRWLSNARMTHYQAMLLDTDRVQFGPVVALNPATLLPLPEEGAPHDCLEILAETHGTRPDLTDQPIPDADHTWYTDGSSFLQEGQRKAGAAVTTETEVIWARALPAGTSAQRAELIALTQALKMAEGKRLNVYTDSRYAFATAHIHGEIYRRRGLLTSEGREIKNKSEILALLKALFLPKRLSIIHCLGHQKGDSAEARGNRLADQAAREAAIKTPPDTSTLLAGKRTADGSEFEKRTADGSEFESPKKKAKVE

SEQ ID NO: 1839 - protein, 2096 aa, synthetic construct
MPAAKRVKLDGGDKKYSIGLDIGTNSVGWAVITDEYKVPSKKFKVLGNTDRHSIKKNLIGALLFDSGETAEATRLKRTARRRYTRRKNRICYLQEIFSNEMAKVDDSFFHRLEESFLVEEDKKHERHPIFGNIVDEVAYHEKYPTIYHLRKKLVDSTDKADLRLIYLALAHMIKFRGHFLIEGDLNPDNSDVDKLFIQLVQTYNQLFEENPINASGVDAKAILSARLSKSRRLENLIAQLPGEKKNGLFGNLIALSLGLTPNFKSNFDLAEDAKLQLSKDTYDDDLDNLLAQIGDQYADLFLAAKNLSDAILLSDILRVNTEITKAPLSASMIKRYDEHHQDLTLLKALVRQQLPEKYKEIFFDQSKNGYAGYIDGGASQEEFYKFIKPILEKMDGTEELLVKLNREDLLRKQRTFDNGSIPHQIHLGELHAILRRQEDFYPFLKDNREKIEKILTFRIPYYVGPLARGNSRFAWMTRKSEETITPWNFEEVVDKGASAQSFIERMTNFDKNLPNEKVLPKHSLLYEYFTVYNELTKVKYVTEGMRKPAFLSGEQKKAIVDLLFKTNRKVTVKQLKEDYFKKIECFDSVEISGVEDRFNASLGTYHDLLKIIKDKDFLDNEENEDILEDIVLTLTLFEDREMIEERLKTYAHLFDDKVMKQLKRRRYTGWGRLSRKLINGIRDKQSGKTILDFLKSDGFANRNFMQLIHDDSLTFKEDIQKAQVSGQGDSLHEHIANLAGSPAIKKGILQTVKVVDELVKVMGRHKPENIVIEMARENQTTQKGQKNSRERMKRIEEGIKELGSQILKEHPVENTQLQNEKLYLYYLQNGRDMYVDQELDINRLSDYDVDHIVPQSFLKDDSIDNKVLTRSDKARGKSDNVPSEEVVKKMKNYWRQLLNAKLITQRKFDNLTKAERGGLSELDKAGFIKRQLVETRQITKHVAQILDSRMNTKYDENDKLIREVKVITLKSKLVSDFRKDFQFYKVREINNYHHAHDAYLNAVVGTALIKKYPKLESEFVYGDYKVYDVRKMIAKSEQEIGKATAKYFFYSNIMNFFKTEITLANGEIRKRPLIETNGETGEIVWDKGRDFATVRKVLSMPQVNIVKKTEVQTGGFSKESILPKRNSDKLIARKKDWDPKKYGGFDSPTVAYSVLVVAKVEKGKSKKLKSVKELLGITIMERSSFEKNPIDFLEAKGYKEVKKDLIIKLPKYSLFELENGRKRMLASAGELQKGNELALPSKYVNFLYLASHYEKLKGSPEDNEQKQLFVEQHKHYLDEIIEQISEFSKRVILADANLDKVLSAYNKHRDKPIREQAENIIHLFTLTNLGAPAAFKYFDTTIDRKRYTSTKEVLDATLIHQSITGLYETRIDLSQLGGDGGEAAAKGGGPAPGGTLNLEDEYRLYETSAEPEVSPGSTWLSDFPQAWAETGGMGLAVRQAPLIIPLKATSTPVSIKQYPMSQEAKLGIKPHIQRLLDQGILVPCQSPWNTPLLPVKKPGTNDYRPVQDLREVNKRVEDIHPTVPNPYNLLSGLPPSHRWYTVLDLKDAFFCLRLHPTSQPLFAFEWRDPGMGISGQLTWTRLPQGFKNSPTLFDEALHRDLADFRIQHPDLILLQYVDDILLAATSELDCQQGTRALLLTLGNLGYRASAKKAQLCQKQVKYLGYLLKEGQRWLTEARKETVMGQPTPKTPRQLREFLGTAGFCRLWIPGFAEMAAPLYPLTKTGTLFNWGPDQQKAYQEIKQALLTAPALGLPDLTKPFELFVDEKQGYAKGVLTQKLGPWRRPVAYLSKKLDPVAAGWPPCLRMVAAIAVLRKDAGKLTMGQPLVILAPHAVEALVKQPPDRWLSNARMTHYQAMLLDTDRVQFGPVVALNPATLLPLPEEGAPHDCLEILAETHGTRPDLTDQPIPDADHTWYTDGSSFLQEGQRKAGAAVTTETEVIWARALPAGTSAQRAELIALTQALKMAEGKRLNVYTDSRYAFATAHIHGEIYRRRGLLTSEGREIKNKSEILALLKALFLPKRLSIIHCLGHQKGDSAEARGNRLADQAAREAAIKTPPDTSTLLAGKRTADGSEFEKRTADGSEFESPKKKAKVE

SEQ ID NO: 1840 - protein, 2096 aa, synthetic construct
MPAAKRVKLDGGDKKYSIGLDIGTNSVGWAVITDEYKVPSKKFKVLGNTDRHSIKKNLIGALLFDSGETAEATRLKRTARRRYTRRKNRICYLQEIFSNEMAKVDDSFFHRLEESFLVEEDKKHERHPIFGNIVDEVAYHEKYPTIYHLRKKLVDSTDKADLRLIYLALAHMIKFRGHFLIEGDLNPDNSDVDKLFIQLVQTYNQLFEENPINASGVDAKAILSARLSKSRRLENLIAQLPGEKKNGLFGNLIALSLGLTPNFKSNFDLAEDAKLQLSKDTYDDDLDNLLAQIGDQYADLFLAAKNLSDAILLSDILRVNTEITKAPLSASMIKRYDEHHQDLTLLKALVRQQLPEKYKEIFFDQSKNGYAGYIDGGASQEEFYKFIKPILEKMDGTEELLVKLNREDLLRKQRTFDNGSIPHQIHLGELHAILRRQEDFYPFLKDNREKIEKILTFRIPYYVGPLARGNSRFAWMTRKSEETITPWNFEEVVDKGASAQSFIERMTNFDKNLPNEKVLPKHSLLYEYFTVYNELTKVKYVTEGMRKPAFLSGEQKKAIVDLLFKTNRKVTVKQLKEDYFKKIECFDSVEISGVEDRFNASLGTYHDLLKIIKDKDFLDNEENEDILEDIVLTLTLFEDREMIEERLKTYAHLFDDKVMKQLKRRRYTGWGRLSRKLINGIRDKQSGKTILDFLKSDGFANRNFMQLIHDDSLTFKEDIQKAQVSGQGDSLHEHIANLAGSPAIKKGILQTVKVVDELVKVMGRHKPENIVIEMARENQTTQKGQKNSRERMKRIEEGIKELGSQILKEHPVENTQLQNEKLYLYYLQNGRDMYVDQELDINRLSDYDVDHIVPQSFLKDDSIDNKVLTRSDKARGKSDNVPSEEVVKKMKNYWRQLLNAKLITQRKFDNLTKAERGGLSELDKAGFIKRQLVETRQITKHVAQILDSRMNTKYDENDKLIREVKVITLKSKLVSDFRKDFQFYKVREINNYHHAHDAYLNAVVGTALIKKYPKLESEFVYGDYKVYDVRKMIAKSEQEIGKATAKYFFYSNIMNFFKTEITLANGEIRKRPLIETNGETGEIVWDKGRDFATVRKVLSMPQVNIVKKTEVQTGGFSKESILPKRNSDKLIARKKDWDPKKYGGFDSPTVAYSVLVVAKVEKGKSKKLKSVKELLGITIMERSSFEKNPIDFLEAKGYKEVKKDLIIKLPKYSLFELENGRKRMLASAGELQKGNELALPSKYVNFLYLASHYEKLKGSPEDNEQKQLFVEQHKHYLDEIIEQISEFSKRVILADANLDKVLSAYNKHRDKPIREQAENIIHLFTLTNLGAPAAFKYFDTTIDRKRYTSTKEVLDATLIHQSITGLYETRIDLSQLGGDGGGGGPAPEAAAKGGTLNLEDEYRLYETSAEPEVSPGSTWLSDFPQAWAETGGMGLAVRQAPLIIPLKATSTPVSIKQYPMSQEAKLGIKPHIQRLLDQGILVPCQSPWNTPLLPVKKPGTNDYRPVQDLREVNKRVEDIHPTVPNPYNLLSGLPPSHRWYTVLDLKDAFFCLRLHPTSQPLFAFEWRDPGMGISGQLTWTRLPQGFKNSPTLFDEALHRDLADFRIQHPDLILLQYVDDILLAATSELDCQQGTRALLLTLGNLGYRASAKKAQLCQKQVKYLGYLLKEGQRWLTEARKETVMGQPTPKTPRQLREFLGTAGFCRLWIPGFAEMAAPLYPLTKTGTLFNWGPDQQKAYQEIKQALLTAPALGLPDLTKPFELFVDEKQGYAKGVLTQKLGPWRRPVAYLSKKLDPVAAGWPPCLRMVAAIAVLRKDAGKLTMGQPLVILAPHAVEALVKQPPDRWLSNARMTHYQAMLLDTDRVQFGPVVALNPATLLPLPEEGAPHDCLEILAETHGTRPDLTDQPIPDADHTWYTDGSSFLQEGQRKAGAAVTTETEVIWARALPAGTSAQRAELIALTQALKMAEGKRLNVYTDSRYAFATAHIHGEIYRRRGLLTSEGREIKNKSEILALLKALFLPKRLSIIHCLGHQKGDSAEARGNRLADQAAREAAIKTPPDTSTLLAGKRTADGSEFEKRTADGSEFESPKKKAKVE

SEQ ID NO: 1841 - protein, 2096 aa, synthetic construct
MPAAKRVKLDGGDKKYSIGLDIGTNSVGWAVITDEYKVPSKKFKVLGNTDRHSIKKNLIGALLFDSGETAEATRLKRTARRRYTRRKNRICYLQEIFSNEMAKVDDSFFHRLEESFLVEEDKKHERHPIFGNIVDEVAYHEKYPTIYHLRKKLVDSTDKADLRLIYLALAHMIKFRGHFLIEGDLNPDNSDVDKLFIQLVQTYNQLFEENPINASGVDAKAILSARLSKSRRLENLIAQLPGEKKNGLFGNLIALSLGLTPNFKSNFDLAEDAKLQLSKDTYDDDLDNLLAQIGDQYADLFLAAKNLSDAILLSDILRVNTEITKAPLSASMIKRYDEHHQDLTLLKALVRQQLPEKYKEIFFDQSKNGYAGYIDGGASQEEFYKFIKPILEKMDGTEELLVKLNREDLLRKQRTFDNGSIPHQIHLGELHAILRRQEDFYPFLKDNREKIEKILTFRIPYYVGPLARGNSRFAWMTRKSEETITPWNFEEVVDKGASAQSFIERMTNFDKNLPNEKVLPKHSLLYEYFTVYNELTKVKYVTEGMRKPAFLSGEQKKAIVDLLFKTNRKVTVKQLKEDYFKKIECFDSVEISGVEDRFNASLGTYHDLLKIIKDKDFLDNEENEDILEDIVLTLTLFEDREMIEERLKTYAHLFDDKVMKQLKRRRYTGWGRLSRKLINGIRDKQSGKTILDFLKSDGFANRNFMQLIHDDSLTFKEDIQKAQVSGQGDSLHEHIANLAGSPAIKKGILQTVKVVDELVKVMGRHKPENIVIEMARENQTTQKGQKNSRERMKRIEEGIKELGSQILKEHPVENTQLQNEKLYLYYLQNGRDMYVDQELDINRLSDYDVDHIVPQSFLKDDSIDNKVLTRSDKARGKSDNVPSEEVVKKMKNYWRQLLNAKLITQRKFDNLTKAERGGLSELDKAGFIKRQLVETRQITKHVAQILDSRMNTKYDENDKLIREVKVITLKSKLVSDFRKDFQFYKVREINNYHHAHDAYLNAVVGTALIKKYPKLESEFVYGDYKVYDVRKMIAKSEQEIGKATAKYFFYSNIMNFFKTEITLANGEIRKRPLIETNGETGEIVWDKGRDFATVRKVLSMPQVNIVKKTEVQTGGFSKESILPKRNSDKLIARKKDWDPKKYGGFDSPTVAYSVLVVAKVEKGKSKKLKSVKELLGITIMERSSFEKNPIDFLEAKGYKEVKKDLIIKLPKYSLFELENGRKRMLASAGELQKGNELALPSKYVNFLYLASHYEKLKGSPEDNEQKQLFVEQHKHYLDEIIEQISEFSKRVILADANLDKVLSAYNKHRDKPIREQAENIIHLFTLTNLGAPAAFKYFDTTIDRKRYTSTKEVLDATLIHQSITGLYETRIDLSQLGGDGGEAAAKGGGGGSGGTLNLEDEYRLYETSAEPEVSPGSTWLSDFPQAWAETGGMGLAVRQAPLIIPLKATSTPVSIKQYPMSQEAKLGIKPHIQRLLDQGILVPCQSPWNTPLLPVKKPGTNDYRPVQDLREVNKRVEDIHPTVPNPYNLLSGLPPSHRWYTVLDLKDAFFCLRLHPTSQPLFAFEWRDPGMGISGQLTWTRLPQGFKNSPTLFDEALHRDLADFRIQHPDLILLQYVDDILLAATSELDCQQGTRALLLTLGNLGYRASAKKAQLCQKQVKYLGYLLKEGQRWLTEARKETVMGQPTPKTPRQLREFLGTAGFCRLWIPGFAEMAAPLYPLTKTGTLFNWGPDQQKAYQEIKQALLTAPALGLPDLTKPFELFVDEKQGYAKGVLTQKLGPWRRPVAYLSKKLDPVAAGWPPCLRMVAAIAVLRKDAGKLTMGQPLVILAPHAVEALVKQPPDRWLSNARMTHYQAMLLDTDRVQFGPVVALNPATLLPLPEEGAPHDCLEILAETHGTRPDLTDQPIPDADHTWYTDGSSFLQEGQRKAGAAVTTETEVIWARALPAGTSAQRAELIALTQALKMAEGKRLNVYTDSRYAFATAHIHGEIYRRRGLLTSEGREIKNKSEILALLKALFLPKRLSIIHCLGHQKGDSAEARGNRLADQAAREAAIKTPPDTSTLLAGKRTADGSEFEKRTADGSEFESPKKKAKVE

SEQ ID NO: 1842 - protein, 2096 aa, synthetic construct
MPAAKRVKLDGGDKKYSIGLDIGTNSVGWAVITDEYKVPSKKFKVLGNTDRHSIKKNLIGALLFDSGETAEATRLKRTARRRYTRRKNRICYLQEIFSNEMAKVDDSFFHRLEESFLVEEDKKHERHPIFGNIVDEVAYHEKYPTIYHLRKKLVDSTDKADLRLIYLALAHMIKFRGHFLIEGDLNPDNSDVDKLFIQLVQTYNQLFEENPINASGVDAKAILSARLSKSRRLENLIAQLPGEKKNGLFGNLIALSLGLTPNFKSNFDLAEDAKLQLSKDTYDDDLDNLLAQIGDQYADLFLAAKNLSDAILLSDILRVNTEITKAPLSASMIKRYDEHHQDLTLLKALVRQQLPEKYKEIFFDQSKNGYAGYIDGGASQEEFYKFIKPILEKMDGTEELLVKLNREDLLRKQRTFDNGSIPHQIHLGELHAILRRQEDFYPFLKDNREKIEKILTFRIPYYVGPLARGNSRFAWMTRKSEETITPWNFEEVVDKGASAQSFIERMTNFDKNLPNEKVLPKHSLLYEYFTVYNELTKVKYVTEGMRKPAFLSGEQKKAIVDLLFKTNRKVTVKQLKEDYFKKIECFDSVEISGVEDRFNASLGTYHDLLKIIKDKDFLDNEENEDILEDIVLTLTLFEDREMIEERLKTYAHLFDDKVMKQLKRRRYTGWGRLSRKLINGIRDKQSGKTILDFLKSDGFANRNFMQLIHDDSLTFKEDIQKAQVSGQGDSLHEHIANLAGSPAIKKGILQTVKVVDELVKVMGRHKPENIVIEMARENQTTQKGQKNSRERMKRIEEGIKELGSQILKEHPVENTQLQNEKLYLYYLQNGRDMYVDQELDINRLSDYDVDHIVPQSFLKDDSIDNKVLTRSDKARGKSDNVPSEEVVKKMKNYWRQLLNAKLITQRKFDNLTKAERGGLSELDKAGFIKRQLVETRQITKHVAQILDSRMNTKYDENDKLIREVKVITLKSKLVSDFRKDFQFYKVREINNYHHAHDAYLNAVVGTALIKKYPKLESEFVYGDYKVYDVRKMIAKSEQEIGKATAKYFFYSNIMNFFKTEITLANGEIRKRPLIETNGETGEIVWDKGRDFATVRKVLSMPQVNIVKKTEVQTGGFSKESILPKRNSDKLIARKKDWDPKKYGGFDSPTVAYSVLVVAKVEKGKSKKLKSVKELLGITIMERSSFEKNPIDFLEAKGYKEVKKDLIIKLPKYSLFELENGRKRMLASAGELQKGNELALPSKYVNFLYLASHYEKLKGSPEDNEQKQLFVEQHKHYLDEIIEQISEFSKRVILADANLDKVLSAYNKHRDKPIREQAENIIHLFTLTNLGAPAAFKYFDTTIDRKRYTSTKEVLDATLIHQSITGLYETRIDLSQLGGDGGPAPEAAAKGSSGGTLNLEDEYRLYETSAEPEVSPGSTWLSDFPQAWAETGGMGLAVRQAPLIIPLKATSTPVSIKQYPMSQEAKLGIKPHIQRLLDQGILVPCQSPWNTPLLPVKKPGTNDYRPVQDLREVNKRVEDIHPTVPNPYNLLSGLPPSHRWYTVLDLKDAFFCLRLHPTSQPLFAFEWRDPGMGISGQLTWTRLPQGFKNSPTLFNEALHRDLADFRIQHPDLILLQYVDDILLAATSELDCQQGTRALLLTLGNLGYRASAKKAQLCQKQVKYLGYLLKEGQRWLTEARKETVMGQPTPKTPRQLREFLGTAGFCRLWIPGFAEMAAPLYPLTKPGTLFNWGPDQQKAYQEIKQALLTAPALGLPDLTKPFELFVDEKQGYAKGVLTQKLGPWRRPVAYLSKKLDPVAAGWPPCLRMVAAIAVLRKDAGKLTMGQPLVILAPHAVEALVKQPPDRWLSNARMTHYQAMLLDTDRVQFGPVVALNPATLLPLPEEGAPHDCLEILAETHGTRPDLTDQPIPDADHTWYTDGSSFLQEGQRKAGAAVTTETEVIWARALPAGTSAQRAELIALTQALKMAEGKRLNVYTDSRYAFATAHIHGEIYRRRGWLTSEGREIKNKSEILALLKALFLPKRLSIIHCLGHQKGDSAEARGNRLADQAAREAAIKTPPDTSTLLAGKRTADGSEFEKRTADGSEFESPKKKAKVE

SEQ ID NO: 1843 - protein, 2093 aa, synthetic construct
MPAAKRVKLDGGDKKYSIGLDIGTNSVGWAVITDEYKVPSKKFKVLGNTDRHSIKKNLIGALLFDSGETAEATRLKRTARRRYTRRKNRICYLQEIFSNEMAKVDDSFFHRLEESFLVEEDKKHERHPIFGNIVDEVAYHEKYPTIYHLRKKLVDSTDKADLRLIYLALAHMIKFRGHFLIEGDLNPDNSDVDKLFIQLVQTYNQLFEENPINASGVDAKAILSARLSKSRRLENLIAQLPGEKKNGLFGNLIALSLGLTPNFKSNFDLAEDAKLQLSKDTYDDDLDNLLAQIGDQYADLFLAAKNLSDAILLSDILRVNTEITKAPLSASMIKRYDEHHQDLTLLKALVRQQLPEKYKEIFFDQSKNGYAGYIDGGASQEEFYKFIKPILEKMDGTEELLVKLNREDLLRKQRTFDNGSIPHQIHLGELHAILRRQEDFYPFLKDNREKIEKILTFRIPYYVGPLARGNSRFAWMTRKSEETITPWNFEEVVDKGASAQSFIERMTNFDKNLPNEKVLPKHSLLYEYFTVYNELTKVKYVTEGMRKPAFLSGEQKKAIVDLLFKTNRKVTVKQLKEDYFKKIECFDSVEISGVEDRFNASLGTYHDLLKIIKDKDFLDNEENEDILEDIVLTLTLFEDREMIEERLKTYAHLFDDKVMKQLKRRRYTGWGRLSRKLINGIRDKQSGKTILDFLKSDGFANRNFMQLIHDDSLTFKEDIQKAQVSGQGDSLHEHIANLAGSPAIKKGILQTVKVVDELVKVMGRHKPENIVIEMARENQTTQKGQKNSRERMKRIEEGIKELGSQILKEHPVENTQLQNEKLYLYYLQNGRDMYVDQELDINRLSDYDVDHIVPQSFLKDDSIDNKVLTRSDKARGKSDNVPSEEVVKKMKNYWRQLLNAKLITQRKFDNLTKAERGGLSELDKAGFIKRQLVETRQITKHVAQILDSRMNTKYDENDKLIREVKVITLKSKLVSDFRKDFQFYKVREINNYHHAHDAYLNAVVGTALIKKYPKLESEFVYGDYKVYDVRKMIAKSEQEIGKATAKYFFYSNIMNFFKTEITLANGEIRKRPLIETNGETGEIVWDKGRDFATVRKVLSMPQVNIVKKTEVQTGGFSKESILPKRNSDKLIARKKDWDPKKYGGFDSPTVAYSVLVVAKVEKGKSKKLKSVKELLGITIMERSSFEKNPIDFLEAKGYKEVKKDLIIKLPKYSLFELENGRKRMLASAGELQKGNELALPSKYVNFLYLASHYEKLKGSPEDNEQKQLFVEQHKHYLDEIIEQISEFSKRVILADANLDKVLSAYNKHRDKPIREQAENIIHLFTLTNLGAPAAFKYFDTTIDRKRYTSTKEVLDATLIHQSITGLYETRIDLSQLGGDGGPAPEAAAKGGTLNLEDEYRLYETSAEPEVSPGSTWLSDFPQAWAETGGMGLAVRQAPLIIPLKATSTPVSIKQYPMSQEAKLGIKPHIQRLLDQGILVPCQSPWNTPLLPVKKPGTNDYRPVQDLREVNKRVEDIHPTVPNPYNLLSGLPPSHRWYTVLDLKDAFFCLRLHPTSQPLFAFEWRDPGMGISGQLTWTRLPQGFKNSPTLFNEALHRDLADFRIQHPDLILLQYVDDILLAATSELDCQQGTRALLLTLGNLGYRASAKKAQLCQKQVKYLGYLLKEGQRWLTEARKETVMGQPTPKTPRQLREFLGTAGFCRLWIPGFAEMAAPLYPLTKPGTLFNWGPDQQKAYQEIKQALLTAPALGLPDLTKPFELFVDEKQGYAKGVLTQKLGPWRRPVAYLSKKLDPVAAGWPPCLRMVAAIAVLRKDAGKLTMGQPLVILAPHAVEALVKQPPDRWLSNARMTHYQAMLLDTDRVQFGPVVALNPATLLPLPEEGAPHDCLEILAETHGTRPDLTDQPIPDADHTWYTDGSSFLQEGQRKAGAAVTTETEVIWARALPAGTSAQRAELIALTQALKMAEGKRLNVYTDSRYAFATAHIHGEIYRRRGWLTSEGREIKNKSEILALLKALFLPKRLSIIHCLGHQKGDSAEARGNRLADQAAREAAIKTPPDTSTLLAGKRTADGSEFEKRTADGSEFESPKKKAKVE

SEQ ID NO: 1844 - protein, 2098 aa, synthetic construct
MPAAKRVKLDGGDKKYSIGLDIGTNSVGWAVITDEYKVPSKKFKVLGNTDRHSIKKNLIGALLFDSGETAEATRLKRTARRRYTRRKNRICYLQEIFSNEMAKVDDSFFHRLEESFLVEEDKKHERHPIFGNIVDEVAYHEKYPTIYHLRKKLVDSTDKADLRLIYLALAHMIKFRGHFLIEGDLNPDNSDVDKLFIQLVQTYNQLFEENPINASGVDAKAILSARLSKSRRLENLIAQLPGEKKNGLFGNLIALSLGLTPNFKSNFDLAEDAKLQLSKDTYDDDLDNLLAQIGDQYADLFLAAKNLSDAILLSDILRVNTEITKAPLSASMIKRYDEHHQDLTLLKALVRQQLPEKYKEIFFDQSKNGYAGYIDGGASQEEFYKFIKPILEKMDGTEELLVKLNREDLLRKQRTFDNGSIPHQIHLGELHAILRRQEDFYPFLKDNREKIEKILTFRIPYYVGPLARGNSRFAWMTRKSEETITPWNFEEVVDKGASAQSFIERMTNFDKNLPNEKVLPKHSLLYEYFTVYNELTKVKYVTEGMRKPAFLSGEQKKAIVDLLFKTNRKVTVKQLKEDYFKKIECFDSVEISGVEDRFNASLGTYHDLLKIIKDKDFLDNEENEDILEDIVLTLTLFEDREMIEERLKTYAHLFDDKVMKQLKRRRYTGWGRLSRKLINGIRDKQSGKTILDFLKSDGFANRNFMQLIHDDSLTFKEDIQKAQVSGQGDSLHEHIANLAGSPAIKKGILQTVKVVDELVKVMGRHKPENIVIEMARENQTTQKGQKNSRERMKRIEEGIKELGSQILKEHPVENTQLQNEKLYLYYLQNGRDMYVDQELDINRLSDYDVDHIVPQSFLKDDSIDNKVLTRSDKARGKSDNVPSEEVVKKMKNYWRQLLNAKLITQRKFDNLTKAERGGLSELDKAGFIKRQLVETRQITKHVAQILDSRMNTKYDENDKLIREVKVITLKSKLVSDFRKDFQFYKVREINNYHHAHDAYLNAVVGTALIKKYPKLESEFVYGDYKVYDVRKMIAKSEQEIGKATAKYFFYSNIMNFFKTEITLANGEIRKRPLIETNGETGEIVWDKGRDFATVRKVLSMPQVNIVKKTEVQTGGFSKESILPKRNSDKLIARKKDWDPKKYGGFDSPTVAYSVLVVAKVEKGKSKKLKSVKELLGITIMERSSFEKNPIDFLEAKGYKEVKKDLIIKLPKYSLFELENGRKRMLASAGELQKGNELALPSKYVNFLYLASHYEKLKGSPEDNEQKQLFVEQHKHYLDEIIEQISEFSKRVILADANLDKVLSAYNKHRDKPIREQAENIIHLFTLTNLGAPAAFKYFDTTIDRKRYTSTKEVLDATLIHQSITGLYETRIDLSQLGGDGGPAPAPAPAPAPAPGGTLNLEDEYRLYETSAEPEVSPGSTWLSDFPQAWAETGGMGLAVRQAPLIIPLKATSTPVSIKQYPMSQEAKLGIKPHIQRLLDQGILVPCQSPWNTPLLPVKKPGTNDYRPVQDLREVNKRVEDIHPTVPNPYNLLSGLPPSHRWYTVLDLKDAFFCLRLHPTSQPLFAFEWRDPGMGISGQLTWTRLPQGFKNSPTLFNEALHRDLADFRIQHPDLILLQYVDDILLAATSELDCQQGTRALLLTLGNLGYRASAKKAQLCQKQVKYLGYLLKEGQRWLTEARKETVMGQPTPKTPRQLREFLGTAGFCRLWIPGFAEMAAPLYPLTKPGTLFNWGPDQQKAYQEIKQALLTAPALGLPDLTKPFELFVDEKQGYAKGVLTQKLGPWRRPVAYLSKKLDPVAAGWPPCLRMVAAIAVLRKDAGKLTMGQPLVILAPHAVEALVKQPPDRWLSNARMTHYQAMLLDTDRVQFGPVVALNPATLLPLPEEGAPHDCLEILAETHGTRPDLTDQPIPDADHTWYTDGSSFLQEGQRKAGAAVTTETEVIWARALPAGTSAQRAELIALTQALKMAEGKRLNVYTDSRYAFATAHIHGEIYRRRGWLTSEGREIKNKSEILALLKALFLPKRLSIIHCLGHQKGDSAEARGNRLADQAAREAAIKTPPDTSTLLAGKRTADGSEFEKRTADGSEFESPKKKAKVE

SEQ ID NO: 1845 - protein, 2096 aa, synthetic construct
MPAAKRVKLDGGDKKYSIGLDIGTNSVGWAVITDEYKVPSKKFKVLGNTDRHSIKKNLIGALLFDSGETAEATRLKRTARRRYTRRKNRICYLQEIFSNEMAKVDDSFFHRLEESFLVEEDKKHERHPIFGNIVDEVAYHEKYPTIYHLRKKLVDSTDKADLRLIYLALAHMIKFRGHFLIEGDLNPDNSDVDKLFIQLVQTYNQLFEENPINASGVDAKAILSARLSKSRRLENLIAQLPGEKKNGLFGNLIALSLGLTPNFKSNFDLAEDAKLQLSKDTYDDDLDNLLAQIGDQYADLFLAAKNLSDAILLSDILRVNTEITKAPLSASMIKRYDEHHQDLTLLKALVRQQLPEKYKEIFFDQSKNGYAGYIDGGASQEEFYKFIKPILEKMDGTEELLVKLNREDLLRKQRTFDNGSIPHQIHLGELHAILRRQEDFYPFLKDNREKIEKILTFRIPYYVGPLARGNSRFAWMTRKSEETITPWNFEEVVDKGASAQSFIERMTNFDKNLPNEKVLPKHSLLYEYFTVYNELTKVKYVTEGMRKPAFLSGEQKKAIVDLLFKTNRKVTVKQLKEDYFKKIECFDSVEISGVEDRFNASLGTYHDLLKIIKDKDFLDNEENEDILEDIVLTLTLFEDREMIEERLKTYAHLFDDKVMKQLKRRRYTGWGRLSRKLINGIRDKQSGKTILDFLKSDGFANRNFMQLIHDDSLTFKEDIQKAQVSGQGDSLHEHIANLAGSPAIKKGILQTVKVVDELVKVMGRHKPENIVIEMARENQTTQKGQKNSRERMKRIEEGIKELGSQILKEHPVENTQLQNEKLYLYYLQNGRDMYVDQELDINRLSDYDVDHIVPQSFLKDDSIDNKVLTRSDKARGKSDNVPSEEVVKKMKNYWRQLLNAKLITQRKFDNLTKAERGGLSELDKAGFIKRQLVETRQITKHVAQILDSRMNTKYDENDKLIREVKVITLKSKLVSDFRKDFQFYKVREINNYHHAHDAYLNAVVGTALIKKYPKLESEFVYGDYKVYDVRKMIAKSEQEIGKATAKYFFYSNIMNFFKTEITLANGEIRKRPLIETNGETGEIVWDKGRDFATVRKVLSMPQVNIVKKTEVQTGGFSKESILPKRNSDKLIARKKDWDPKKYGGFDSPTVAYSVLVVAKVEKGKSKKLKSVKELLGITIMERSSFEKNPIDFLEAKGYKEVKKDLIIKLPKYSLFELENGRKRMLASAGELQKGNELALPSKYVNFLYLASHYEKLKGSPEDNEQKQLFVEQHKHYLDEIIEQISEFSKRVILADANLDKVLSAYNKHRDKPIREQAENIIHLFTLTNLGAPAAFKYFDTTIDRKRYTSTKEVLDATLIHQSITGLYETRIDLSQLGGDGGGSSGGGEAAAKGGTLNLEDEYRLYETSAEPEVSPGSTWLSDFPQAWAETGGMGLAVRQAPLIIPLKATSTPVSIKQYPMSQEAKLGIKPHIQRLLDQGILVPCQSPWNTPLLPVKKPGTNDYRPVQDLREVNKRVEDIHPTVPNPYNLLSGLPPSHRWYTVLDLKDAFFCLRLHPTSQPLFAFEWRDPGMGISGQLTWTRLPQGFKNSPTLFNEALHRDLADFRIQHPDLILLQYVDDILLAATSELDCQQGTRALLLTLGNLGYRASAKKAQLCQKQVKYLGYLLKEGQRWLTEARKETVMGQPTPKTPRQLREFLGTAGFCRLWIPGFAEMAAPLYPLTKPGTLFNWGPDQQKAYQEIKQALLTAPALGLPDLTKPFELFVDEKQGYAKGVLTQKLGPWRRPVAYLSKKLDPVAAGWPPCLRMVAAIAVLRKDAGKLTMGQPLVILAPHAVEALVKQPPDRWLSNARMTHYQAMLLDTDRVQFGPVVALNPATLLPLPEEGAPHDCLEILAETHGTRPDLTDQPIPDADHTWYTDGSSFLQEGQRKAGAAVTTETEVIWARALPAGTSAQRAELIALTQALKMAEGKRLNVYTDSRYAFATAHIHGEIYRRRGWLTSEGREIKNKSEILALLKALFLPKRLSIIHCLGHQKGDSAEARGNRLADQAAREAAIKTPPDTSTLLAGKRTADGSEFEKRTADGSEFESPKKKAKVE

SEQ ID NO: 1846 - protein, 2096 aa, synthetic construct
MPAAKRVKLDGGDKKYSIGLDIGTNSVGWAVITDEYKVPSKKFKVLGNTDRHSIKKNLIGALLFDSGETAEATRLKRTARRRYTRRKNRICYLQEIFSNEMAKVDDSFFHRLEESFLVEEDKKHERHPIFGNIVDEVAYHEKYPTIYHLRKKLVDSTDKADLRLIYLALAHMIKFRGHFLIEGDLNPDNSDVDKLFIQLVQTYNQLFEENPINASGVDAKAILSARLSKSRRLENLIAQLPGEKKNGLFGNLIALSLGLTPNFKSNFDLAEDAKLQLSKDTYDDDLDNLLAQIGDQYADLFLAAKNLSDAILLSDILRVNTEITKAPLSASMIKRYDEHHQDLTLLKALVRQQLPEKYKEIFFDQSKNGYAGYIDGGASQEEFYKFIKPILEKMDGTEELLVKLNREDLLRKQRTFDNGSIPHQIHLGELHAILRRQEDFYPFLKDNREKIEKILTFRIPYYVGPLARGNSRFAWMTRKSEETITPWNFEEVVDKGASAQSFIERMTNFDKNLPNEKVLPKHSLLYEYFTVYNELTKVKYVTEGMRKPAFLSGEQKKAIVDLLFKTNRKVTVKQLKEDYFKKIECFDSVEISGVEDRFNASLGTYHDLLKIIKDKDFLDNEENEDILEDIVLTLTLFEDREMIEERLKTYAHLFDDKVMKQLKRRRYTGWGRLSRKLINGIRDKQSGKTILDFLKSDGFANRNFMQLIHDDSLTFKEDIQKAQVSGQGDSLHEHIANLAGSPAIKKGILQTVKVVDELVKVMGRHKPENIVIEMARENQTTQKGQKNSRERMKRIEEGIKELGSQILKEHPVENTQLQNEKLYLYYLQNGRDMYVDQELDINRLSDYDVDHIVPQSFLKDDSIDNKVLTRSDKARGKSDNVPSEEVVKKMKNYWRQLLNAKLITQRKFDNLTKAERGGLSELDKAGFIKRQLVETRQITKHVAQILDSRMNTKYDENDKLIREVKVITLKSKLVSDFRKDFQFYKVREINNYHHAHDAYLNAVVGTALIKKYPKLESEFVYGDYKVYDVRKMIAKSEQEIGKATAKYFFYSNIMNFFKTEITLANGEIRKRPLIETNGETGEIVWDKGRDFATVRKVLSMPQVNIVKKTEVQTGGFSKESILPKRNSDKLIARKKDWDPKKYGGFDSPTVAYSVLVVAKVEKGKSKKLKSVKELLGITIMERSSFEKNPIDFLEAKGYKEVKKDLIIKLPKYSLFELENGRKRMLASAGELQKGNELALPSKYVNFLYLASHYEKLKGSPEDNEQKQLFVEQHKHYLDEIIEQISEFSKRVILADANLDKVLSAYNKHRDKPIREQAENIIHLFTLTNLGAPAAFKYFDTTIDRKRYTSTKEVLDATLIHQSITGLYETRIDLSQLGGDGGEAAAKGGGGSSGGTLNLEDEYRLYETSAEPEVSPGSTWLSDFPQAWAETGGMGLAVRQAPLIIPLKATSTPVSIKQYPMSQEAKLGIKPHIQRLLDQGILVPCQSPWNTPLLPVKKPGTNDYRPVQDLREVNKRVEDIHPTVPNPYNLLSGLPPSHRWYTVLDLKDAFFCLRLHPTSQPLFAFEWRDPGMGISGQLTWTRLPQGFKNSPTLFNEALHRDLADFRIQHPDLILLQYVDDILLAATSELDCQQGTRALLLTLGNLGYRASAKKAQLCQKQVKYLGYLLKEGQRWLTEARKETVMGQPTPKTPRQLREFLGTAGFCRLWIPGFAEMAAPLYPLTKPGTLFNWGPDQQKAYQEIKQALLTAPALGLPDLTKPFELFVDEKQGYAKGVLTQKLGPWRRPVAYLSKKLDPVAAGWPPCLRMVAAIAVLRKDAGKLTMGQPLVILAPHAVEALVKQPPDRWLSNARMTHYQAMLLDTDRVQFGPVVALNPATLLPLPEEGAPHDCLEILAETHGTRPDLTDQPIPDADHTWYTDGSSFLQEGQRKAGAAVTTETEVIWARALPAGTSAQRAELIALTQALKMAEGKRLNVYTDSRYAFATAHIHGEIYRRRGWLTSEGREIKNKSEILALLKALFLPKRLSIIHCLGHQKGDSAEARGNRLADQAAREAAIKTPPDTSTLLAGKRTADGSEFEKRTADGSEFESPKKKAKVE

SEQ ID NO: 1847 - protein, 2095 aa, synthetic construct
MPAAKRVKLDGGDKKYSIGLDIGTNSVGWAVITDEYKVPSKKFKVLGNTDRHSIKKNLIGALLFDSGETAEATRLKRTARRRYTRRKNRICYLQEIFSNEMAKVDDSFFHRLEESFLVEEDKKHERHPIFGNIVDEVAYHEKYPTIYHLRKKLVDSTDKADLRLIYLALAHMIKFRGHFLIEGDLNPDNSDVDKLFIQLVQTYNQLFEENPINASGVDAKAILSARLSKSRRLENLIAQLPGEKKNGLFGNLIALSLGLTPNFKSNFDLAEDAKLQLSKDTYDDDLDNLLAQIGDQYADLFLAAKNLSDAILLSDILRVNTEITKAPLSASMIKRYDEHHQDLTLLKALVRQQLPEKYKEIFFDQSKNGYAGYIDGGASQEEFYKFIKPILEKMDGTEELLVKLNREDLLRKQRTFDNGSIPHQIHLGELHAILRRQEDFYPFLKDNREKIEKILTFRIPYYVGPLARGNSRFAWMTRKSEETITPWNFEEVVDKGASAQSFIERMTNFDKNLPNEKVLPKHSLLYEYFTVYNELTKVKYVTEGMRKPAFLSGEQKKAIVDLLFKTNRKVTVKQLKEDYFKKIECFDSVEISGVEDRFNASLGTYHDLLKIIKDKDFLDNEENEDILEDIVLTLTLFEDREMIEERLKTYAHLFDDKVMKQLKRRRYTGWGRLSRKLINGIRDKQSGKTILDFLKSDGFANRNFMQLIHDDSLTFKEDIQKAQVSGQGDSLHEHIANLAGSPAIKKGILQTVKVVDELVKVMGRHKPENIVIEMARENQTTQKGQKNSRERMKRIEEGIKELGSQILKEHPVENTQLQNEKLYLYYLQNGRDMYVDQELDINRLSDYDVDHIVPQSFLKDDSIDNKVLTRSDKARGKSDNVPSEEVVKKMKNYWRQLLNAKLITQRKFDNLTKAERGGLSELDKAGFIKRQLVETRQITKHVAQILDSRMNTKYDENDKLIREVKVITLKSKLVSDFRKDFQFYKVREINNYHHAHDAYLNAVVGTALIKKYPKLESEFVYGDYKVYDVRKMIAKSEQEIGKATAKYFFYSNIMNFFKTEITLANGEIRKRPLIETNGETGEIVWDKGRDFATVRKVLSMPQVNIVKKTEVQTGGFSKESILPKRNSDKLIARKKDWDPKKYGGFDSPTVAYSVLVVAKVEKGKSKKLKSVKELLGITIMERSSFEKNPIDFLEAKGYKEVKKDLIIKLPKYSLFELENGRKRMLASAGELQKGNELALPSKYVNFLYLASHYEKLKGSPEDNEQKQLFVEQHKHYLDEIIEQISEFSKRVILADANLDKVLSAYNKHRDKPIREQAENIIHLFTLTNLGAPAAFKYFDTTIDRKRYTSTKEVLDATLIHQSITGLYETRIDLSQLGGDGGEAAAKEAAAKGGTLNLEDEYRLYETSAEPEVSPGSTWLSDFPQAWAETGGMGLAVRQAPLIIPLKATSTPVSIKQYPMSQEAKLGIKPHIQRLLDQGILVPCQSPWNTPLLPVKKPGTNDYRPVQDLREVNKRVEDIHPTVPNPYNLLSGLPPSHRWYTVLDLKDAFFCLRLHPTSQPLFAFEWRDPGMGISGQLTWTRLPQGFKNSPTLFNEALHRDLADFRIQHPDLILLQYVDDILLAATSELDCQQGTRALLLTLGNLGYRASAKKAQLCQKQVKYLGYLLKEGQRWLTEARKETVMGQPTPKTPRQLREFLGTAGFCRLWIPGFAEMAAPLYPLTKPGTLFNWGPDQQKAYQEIKQALLTAPALGLPDLTKPFELFVDEKQGYAKGVLTQKLGPWRRPVAYLSKKLDPVAAGWPPCLRMVAAIAVLRKDAGKLTMGQPLVILAPHAVEALVKQPPDRWLSNARMTHYQAMLLDTDRVQFGPVVALNPATLLPLPEEGAPHDCLEILAETHGTRPDLTDQPIPDADHTWYTDGSSFLQEGQRKAGAAVTTETEVIWARALPAGTSAQRAELIALTQALKMAEGKRLNVYTDSRYAFATAHIHGEIYRRRGWLTSEGREIKNKSEILALLKALFLPKRLSIIHCLGHQKGDSAEARGNRLADQAAREAAIKTPPDTSTLLAGKRTADGSEFEKRTADGSEFESPKKKAKVE

SEQ ID NO: 1848 - protein, 2091 aa, synthetic construct
MPAAKRVKLDGGDKKYSIGLDIGTNSVGWAVITDEYKVPSKKFKVLGNTDRHSIKKNLIGALLFDSGETAEATRLKRTARRRYTRRKNRICYLQEIFSNEMAKVDDSFFHRLEESFLVEEDKKHERHPIFGNIVDEVAYHEKYPTIYHLRKKLVDSTDKADLRLIYLALAHMIKFRGHFLIEGDLNPDNSDVDKLFIQLVQTYNQLFEENPINASGVDAKAILSARLSKSRRLENLIAQLPGEKKNGLFGNLIALSLGLTPNFKSNFDLAEDAKLQLSKDTYDDDLDNLLAQIGDQYADLFLAAKNLSDAILLSDILRVNTEITKAPLSASMIKRYDEHHQDLTLLKALVRQQLPEKYKEIFFDQSKNGYAGYIDGGASQEEFYKFIKPILEKMDGTEELLVKLNREDLLRKQRTFDNGSIPHQIHLGELHAILRRQEDFYPFLKDNREKIEKILTFRIPYYVGPLARGNSRFAWMTRKSEETITPWNFEEVVDKGASAQSFIERMTNFDKNLPNEKVLPKHSLLYEYFTVYNELTKVKYVTEGMRKPAFLSGEQKKAIVDLLFKTNRKVTVKQLKEDYFKKIECFDSVEISGVEDRFNASLGTYHDLLKIIKDKDFLDNEENEDILEDIVLTLTLFEDREMIEERLKTYAHLFDDKVMKQLKRRRYTGWGRLSRKLINGIRDKQSGKTILDFLKSDGFANRNFMQLIHDDSLTFKEDIQKAQVSGQGDSLHEHIANLAGSPAIKKGILQTVKVVDELVKVMGRHKPENIVIEMARENQTTQKGQKNSRERMKRIEEGIKELGSQILKEHPVENTQLQNEKLYLYYLQNGRDMYVDQELDINRLSDYDVDHIVPQSFLKDDSIDNKVLTRSDKARGKSDNVPSEEVVKKMKNYWRQLLNAKLITQRKFDNLTKAERGGLSELDKAGFIKRQLVETRQITKHVAQILDSRMNTKYDENDKLIREVKVITLKSKLVSDFRKDFQFYKVREINNYHHAHDAYLNAVVGTALIKKYPKLESEFVYGDYKVYDVRKMIAKSEQEIGKATAKYFFYSNIMNFFKTEITLANGEIRKRPLIETNGETGEIVWDKGRDFATVRKVLSMPQVNIVKKTEVQTGGFSKESILPKRNSDKLIARKKDWDPKKYGGFDSPTVAYSVLVVAKVEKGKSKKLKSVKELLGITIMERSSFEKNPIDFLEAKGYKEVKKDLIIKLPKYSLFELENGRKRMLASAGELQKGNELALPSKYVNFLYLASHYEKLKGSPEDNEQKQLFVEQHKHYLDEIIEQISEFSKRVILADANLDKVLSAYNKHRDKPIREQAENIIHLFTLTNLGAPAAFKYFDTTIDRKRYTSTKEVLDATLIHQSITGLYETRIDLSQLGGDGGPAPGGGGGTLNLEDEYRLYETSAEPEVSPGSTWLSDFPQAWAETGGMGLAVRQAPLIIPLKATSTPVSIKQYPMSQEAKLGIKPHIQRLLDQGILVPCQSPWNTPLLPVKKPGTNDYRPVQDLREVNKRVEDIHPTVPNPYNLLSGLPPSHRWYTVLDLKDAFFCLRLHPTSQPLFAFEWRDPGMGISGQLTWTRLPQGFKNSPTLFNEALHRDLADFRIQHPDLILLQYVDDILLAATSELDCQQGTRALLLTLGNLGYRASAKKAQLCQKQVKYLGYLLKEGQRWLTEARKETVMGQPTPKTPRQLREFLGTAGFCRLWIPGFAEMAAPLYPLTKPGTLFNWGPDQQKAYQEIKQALLTAPALGLPDLTKPFELFVDEKQGYAKGVLTQKLGPWRRPVAYLSKKLDPVAAGWPPCLRMVAAIAVLRKDAGKLTMGQPLVILAPHAVEALVKQPPDRWLSNARMTHYQAMLLDTDRVQFGPVVALNPATLLPLPEEGAPHDCLEILAETHGTRPDLTDQPIPDADHTWYTDGSSFLQEGQRKAGAAVTTETEVIWARALPAGTSAQRAELIALTQALKMAEGKRLNVYTDSRYAFATAHIHGEIYRRRGWLTSEGREIKNKSEILALLKALFLPKRLSIIHCLGHQKGDSAEARGNRLADQAAREAAIKTPPDTSTLLAGKRTADGSEFEKRTADGSEFESPKKKAKVE

SEQ ID NO: 1849 - protein, 2097 aa, synthetic construct
MPAAKRVKLDGGDKKYSIGLDIGTNSVGWAVITDEYKVPSKKFKVLGNTDRHSIKKNLIGALLFDSGETAEATRLKRTARRRYTRRKNRICYLQEIFSNEMAKVDDSFFHRLEESFLVEEDKKHERHPIFGNIVDEVAYHEKYPTIYHLRKKLVDSTDKADLRLIYLALAHMIKFRGHFLIEGDLNPDNSDVDKLFIQLVQTYNQLFEENPINASGVDAKAILSARLSKSRRLENLIAQLPGEKKNGLFGNLIALSLGLTPNFKSNFDLAEDAKLQLSKDTYDDDLDNLLAQIGDQYADLFLAAKNLSDAILLSDILRVNTEITKAPLSASMIKRYDEHHQDLTLLKALVRQQLPEKYKEIFFDQSKNGYAGYIDGGASQEEFYKFIKPILEKMDGTEELLVKLNREDLLRKQRTFDNGSIPHQIHLGELHAILRRQEDFYPFLKDNREKIEKILTFRIPYYVGPLARGNSRFAWMTRKSEETITPWNFEEVVDKGASAQSFIERMTNFDKNLPNEKVLPKHSLLYEYFTVYNELTKVKYVTEGMRKPAFLSGEQKKAIVDLLFKTNRKVTVKQLKEDYFKKIECFDSVEISGVEDRFNASLGTYHDLLKIIKDKDFLDNEENEDILEDIVLTLTLFEDREMIEERLKTYAHLFDDKVMKQLKRRRYTGWGRLSRKLINGIRDKQSGKTILDFLKSDGFANRNFMQLIHDDSLTFKEDIQKAQVSGQGDSLHEHIANLAGSPAIKKGILQTVKVVDELVKVMGRHKPENIVIEMARENQTTQKGQKNSRERMKRIEEGIKELGSQILKEHPVENTQLQNEKLYLYYLQNGRDMYVDQELDINRLSDYDVDHIVPQSFLKDDSIDNKVLTRSDKARGKSDNVPSEEVVKKMKNYWRQLLNAKLITQRKFDNLTKAERGGLSELDKAGFIKRQLVETRQITKHVAQILDSRMNTKYDENDKLIREVKVITLKSKLVSDFRKDFQFYKVREINNYHHAHDAYLNAVVGTALIKKYPKLESEFVYGDYKVYDVRKMIAKSEQEIGKATAKYFFYSNIMNFFKTEITLANGEIRKRPLIETNGETGEIVWDKGRDFATVRKVLSMPQVNIVKKTEVQTGGFSKESILPKRNSDKLIARKKDWDPKKYGGFDSPTVAYSVLVVAKVEKGKSKKLKSVKELLGITIMERSSFEKNPIDFLEAKGYKEVKKDLIIKLPKYSLFELENGRKRMLASAGELQKGNELALPSKYVNFLYLASHYEKLKGSPEDNEQKQLFVEQHKHYLDEIIEQISEFSKRVILADANLDKVLSAYNKHRDKPIREQAENIIHLFTLTNLGAPAAFKYFDTTIDRKRYTSTKEVLDATLIHQSITGLYETRIDLSQLGGDGGGGSGGSGGSGGSGGTLNLEDEYRLYETSAEPEVSPGSTWLSDFPQAWAETGGMGLAVRQAPLIIPLKATSTPVSIKQYPMSQEAKLGIKPHIQRLLDQGILVPCQSPWNTPLLPVKKPGTNDYRPVQDLREVNKRVEDIHPTVPNPYNLLSGLPPSHRWYTVLDLKDAFFCLRLHPTSQPLFAFEWRDPGMGISGQLTWTRLPQGFKNSPTLFNEALHRDLADFRIQHPDLILLQYVDDILLAATSELDCQQGTRALLLTLGNLGYRASAKKAQLCQKQVKYLGYLLKEGQRWLTEARKETVMGQPTPKTPRQLREFLGTAGFCRLWIPGFAEMAAPLYPLTKPGTLFNWGPDQQKAYQEIKQALLTAPALGLPDLTKPFELFVDEKQGYAKGVLTQKLGPWRRPVAYLSKKLDPVAAGWPPCLRMVAAIAVLRKDAGKLTMGQPLVILAPHAVEALVKQPPDRWLSNARMTHYQAMLLDTDRVQFGPVVALNPATLLPLPEEGAPHDCLEILAETHGTRPDLTDQPIPDADHTWYTDGSSFLQEGQRKAGAAVTTETEVIWARALPAGTSAQRAELIALTQALKMAEGKRLNVYTDSRYAFATAHIHGEIYRRRGWLTSEGREIKNKSEILALLKALFLPKRLSIIHCLGHQKGDSAEARGNRLADQAAREAAIKTPPDTSTLLAGKRTADGSEFEKRTADGSEFESPKKKAKVE

SEQ ID NO: 1850 - protein, 2096 aa, synthetic construct
MPAAKRVKLDGGDKKYSIGLDIGTNSVGWAVITDEYKVPSKKFKVLGNTDRHSIKKNLIGALLFDSGETAEATRLKRTARRRYTRRKNRICYLQEIFSNEMAKVDDSFFHRLEESFLVEEDKKHERHPIFGNIVDEVAYHEKYPTIYHLRKKLVDSTDKADLRLIYLALAHMIKFRGHFLIEGDLNPDNSDVDKLFIQLVQTYNQLFEENPINASGVDAKAILSARLSKSRRLENLIAQLPGEKKNGLFGNLIALSLGLTPNFKSNFDLAEDAKLQLSKDTYDDDLDNLLAQIGDQYADLFLAAKNLSDAILLSDILRVNTEITKAPLSASMIKRYDEHHQDLTLLKALVRQQLPEKYKEIFFDQSKNGYAGYIDGGASQEEFYKFIKPILEKMDGTEELLVKLNREDLLRKQRTFDNGSIPHQIHLGELHAILRRQEDFYPFLKDNREKIEKILTFRIPYYVGPLARGNSRFAWMTRKSEETITPWNFEEVVDKGASAQSFIERMTNFDKNLPNEKVLPKHSLLYEYFTVYNELTKVKYVTEGMRKPAFLSGEQKKAIVDLLFKTNRKVTVKQLKEDYFKKIECFDSVEISGVEDRFNASLGTYHDLLKIIKDKDFLDNEENEDILEDIVLTLTLFEDREMIEERLKTYAHLFDDKVMKQLKRRRYTGWGRLSRKLINGIRDKQSGKTILDFLKSDGFANRNFMQLIHDDSLTFKEDIQKAQVSGQGDSLHEHIANLAGSPAIKKGILQTVKVVDELVKVMGRHKPENIVIEMARENQTTQKGQKNSRERMKRIEEGIKELGSQILKEHPVENTQLQNEKLYLYYLQNGRDMYVDQELDINRLSDYDVDHIVPQSFLKDDSIDNKVLTRSDKARGKSDNVPSEEVVKKMKNYWRQLLNAKLITQRKFDNLTKAERGGLSELDKAGFIKRQLVETRQITKHVAQILDSRMNTKYDENDKLIREVKVITLKSKLVSDFRKDFQFYKVREINNYHHAHDAYLNAVVGTALIKKYPKLESEFVYGDYKVYDVRKMIAKSEQEIGKATAKYFFYSNIMNFFKTEITLANGEIRKRPLIETNGETGEIVWDKGRDFATVRKVLSMPQVNIVKKTEVQTGGFSKESILPKRNSDKLIARKKDWDPKKYGGFDSPTVAYSVLVVAKVEKGKSKKLKSVKELLGITIMERSSFEKNPIDFLEAKGYKEVKKDLIIKLPKYSLFELENGRKRMLASAGELQKGNELALPSKYVNFLYLASHYEKLKGSPEDNEQKQLFVEQHKHYLDEIIEQISEFSKRVILADANLDKVLSAYNKHRDKPIREQAENIIHLFTLTNLGAPAAFKYFDTTIDRKRYTSTKEVLDATLIHQSITGLYETRIDLSQLGGDGGGSSEAAAKGGGGGTLNLEDEYRLYETSAEPEVSPGSTWLSDFPQAWAETGGMGLAVRQAPLIIPLKATSTPVSIKQYPMSQEAKLGIKPHIQRLLDQGILVPCQSPWNTPLLPVKKPGTNDYRPVQDLREVNKRVEDIHPTVPNPYNLLSGLPPSHRWYTVLDLKDAFFCLRLHPTSQPLFAFEWRDPGMGISGQLTWTRLPQGFKNSPTLFNEALHRDLADFRIQHPDLILLQYVDDILLAATSELDCQQGTRALLLTLGNLGYRASAKKAQLCQKQVKYLGYLLKEGQRWLTEARKETVMGQPTPKTPRQLREFLGTAGFCRLWIPGFAEMAAPLYPLTKPGTLFNWGPDQQKAYQEIKQALLTAPALGLPDLTKPFELFVDEKQGYAKGVLTQKLGPWRRPVAYLSKKLDPVAAGWPPCLRMVAAIAVLRKDAGKLTMGQPLVILAPHAVEALVKQPPDRWLSNARMTHYQAMLLDTDRVQFGPVVALNPATLLPLPEEGAPHDCLEILAETHGTRPDLTDQPIPDADHTWYTDGSSFLQEGQRKAGAAVTTETEVIWARALPAGTSAQRAELIALTQALKMAEGKRLNVYTDSRYAFATAHIHGEIYRRRGWLTSEGREIKNKSEILALLKALFLPKRLSIIHCLGHQKGDSAEARGNRLADQAAREAAIKTPPDTSTLLAGKRTADGSEFEKRTADGSEFESPKKKAKVE

SEQ ID NO: 1851 - protein, 2096 aa, synthetic construct
MPAAKRVKLDGGDKKYSIGLDIGTNSVGWAVITDEYKVPSKKFKVLGNTDRHSIKKNLIGALLFDSGETAEATRLKRTARRRYTRRKNRICYLQEIFSNEMAKVDDSFFHRLEESFLVEEDKKHERHPIFGNIVDEVAYHEKYPTIYHLRKKLVDSTDKADLRLIYLALAHMIKFRGHFLIEGDLNPDNSDVDKLFIQLVQTYNQLFEENPINASGVDAKAILSARLSKSRRLENLIAQLPGEKKNGLFGNLIALSLGLTPNFKSNFDLAEDAKLQLSKDTYDDDLDNLLAQIGDQYADLFLAAKNLSDAILLSDILRVNTEITKAPLSASMIKRYDEHHQDLTLLKALVRQQLPEKYKEIFFDQSKNGYAGYIDGGASQEEFYKFIKPILEKMDGTEELLVKLNREDLLRKQRTFDNGSIPHQIHLGELHAILRRQEDFYPFLKDNREKIEKILTFRIPYYVGPLARGNSRFAWMTRKSEETITPWNFEEVVDKGASAQSFIERMTNFDKNLPNEKVLPKHSLLYEYFTVYNELTKVKYVTEGMRKPAFLSGEQKKAIVDLLFKTNRKVTVKQLKEDYFKKIECFDSVEISGVEDRFNASLGTYHDLLKIIKDKDFLDNEENEDILEDIVLTLTLFEDREMIEERLKTYAHLFDDKVMKQLKRRRYTGWGRLSRKLINGIRDKQSGKTILDFLKSDGFANRNFMQLIHDDSLTFKEDIQKAQVSGQGDSLHEHIANLAGSPAIKKGILQTVKVVDELVKVMGRHKPENIVIEMARENQTTQKGQKNSRERMKRIEEGIKELGSQILKEHPVENTQLQNEKLYLYYLQNGRDMYVDQELDINRLSDYDVDHIVPQSFLKDDSIDNKVLTRSDKARGKSDNVPSEEVVKKMKNYWRQLLNAKLITQRKFDNLTKAERGGLSELDKAGFIKRQLVETRQITKHVAQILDSRMNTKYDENDKLIREVKVITLKSKLVSDFRKDFQFYKVREINNYHHAHDAYLNAVVGTALIKKYPKLESEFVYGDYKVYDVRKMIAKSEQEIGKATAKYFFYSNIMNFFKTEITLANGEIRKRPLIETNGETGEIVWDKGRDFATVRKVLSMPQVNIVKKTEVQTGGFSKESILPKRNSDKLIARKKDWDPKKYGGFDSPTVAYSVLVVAKVEKGKSKKLKSVKELLGITIMERSSFEKNPIDFLEAKGYKEVKKDLIIKLPKYSLFELENGRKRMLASAGELQKGNELALPSKYVNFLYLASHYEKLKGSPEDNEQKQLFVEQHKHYLDEIIEQISEFSKRVILADANLDKVLSAYNKHRDKPIREQAENIIHLFTLTNLGAPAAFKYFDTTIDRKRYTSTKEVLDATLIHQSITGLYETRIDLSQLGGDGGEAAAKPAPGGSGGTLNLEDEYRLYETSAEPEVSPGSTWLSDFPQAWAETGGMGLAVRQAPLIIPLKATSTPVSIKQYPMSQEAKLGIKPHIQRLLDQGILVPCQSPWNTPLLPVKKPGTNDYRPVQDLREVNKRVEDIHPTVPNPYNLLSGLPPSHRWYTVLDLKDAFFCLRLHPTSQPLFAFEWRDPGMGISGQLTWTRLPQGFKNSPTLFNEALHRDLADFRIQHPDLILLQYVDDILLAATSELDCQQGTRALLLTLGNLGYRASAKKAQLCQKQVKYLGYLLKEGQRWLTEARKETVMGQPTPKTPRQLREFLGTAGFCRLWIPGFAEMAAPLYPLTKPGTLFNWGPDQQKAYQEIKQALLTAPALGLPDLTKPFELFVDEKQGYAKGVLTQKLGPWRRPVAYLSKKLDPVAAGWPPCLRMVAAIAVLRKDAGKLTMGQPLVILAPHAVEALVKQPPDRWLSNARMTHYQAMLLDTDRVQFGPVVALNPATLLPLPEEGAPHDCLEILAETHGTRPDLTDQPIPDADHTWYTDGSSFLQEGQRKAGAAVTTETEVIWARALPAGTSAQRAELIALTQALKMAEGKRLNVYTDSRYAFATAHIHGEIYRRRGWLTSEGREIKNKSEILALLKALFLPKRLSIIHCLGHQKGDSAEARGNRLADQAAREAAIKTPPDTSTLLAGKRTADGSEFEKRTADGSEFESPKKKAKVE

SEQ ID NO: 1852 - protein, 2094 aa, synthetic construct
MPAAKRVKLDGGDKKYSIGLDIGTNSVGWAVITDEYKVPSKKFKVLGNTDRHSIKKNLIGALLFDSGETAEATRLKRTARRRYTRRKNRICYLQEIFSNEMAKVDDSFFHRLEESFLVEEDKKHERHPIFGNIVDEVAYHEKYPTIYHLRKKLVDSTDKADLRLIYLALAHMIKFRGHFLIEGDLNPDNSDVDKLFIQLVQTYNQLFEENPINASGVDAKAILSARLSKSRRLENLIAQLPGEKKNGLFGNLIALSLGLTPNFKSNFDLAEDAKLQLSKDTYDDDLDNLLAQIGDQYADLFLAAKNLSDAILLSDILRVNTEITKAPLSASMIKRYDEHHQDLTLLKALVRQQLPEKYKEIFFDQSKNGYAGYIDGGASQEEFYKFIKPILEKMDGTEELLVKLNREDLLRKQRTFDNGSIPHQIHLGELHAILRRQEDFYPFLKDNREKIEKILTFRIPYYVGPLARGNSRFAWMTRKSEETITPWNFEEVVDKGASAQSFIERMTNFDKNLPNEKVLPKHSLLYEYFTVYNELTKVKYVTEGMRKPAFLSGEQKKAIVDLLFKTNRKVTVKQLKEDYFKKIECFDSVEISGVEDRFNASLGTYHDLLKIIKDKDFLDNEENEDILEDIVLTLTLFEDREMIEERLKTYAHLFDDKVMKQLKRRRYTGWGRLSRKLINGIRDKQSGKTILDFLKSDGFANRNFMQLIHDDSLTFKEDIQKAQVSGQGDSLHEHIANLAGSPAIKKGILQTVKVVDELVKVMGRHKPENIVIEMARENQTTQKGQKNSRERMKRIEEGIKELGSQILKEHPVENTQLQNEKLYLYYLQNGRDMYVDQELDINRLSDYDVDHIVPQSFLKDDSIDNKVLTRSDKARGKSDNVPSEEVVKKMKNYWRQLLNAKLITQRKFDNLTKAERGGLSELDKAGFIKRQLVETRQITKHVAQILDSRMNTKYDENDKLIREVKVITLKSKLVSDFRKDFQFYKVREINNYHHAHDAYLNAVVGTALIKKYPKLESEFVYGDYKVYDVRKMIAKSEQEIGKATAKYFFYSNIMNFFKTEITLANGEIRKRPLIETNGETGEIVWDKGRDFATVRKVLSMPQVNIVKKTEVQTGGFSKESILPKRNSDKLIARKKDWDPKKYGGFDSPTVAYSVLVVAKVEKGKSKKLKSVKELLGITIMERSSFEKNPIDFLEAKGYKEVKKDLIIKLPKYSLFELENGRKRMLASAGELQKGNELALPSKYVNFLYLASHYEKLKGSPEDNEQKQLFVEQHKHYLDEIIEQISEFSKRVILADANLDKVLSAYNKHRDKPIREQAENIIHLFTLTNLGAPAAFKYFDTTIDRKRYTSTKEVLDATLIHQSITGLYETRIDLSQLGGDGGPAPAPAPAPGGTLNLEDEYRLYETSAEPEVSPGSTWLSDFPQAWAETGGMGLAVRQAPLIIPLKATSTPVSIKQYPMSQEAKLGIKPHIQRLLDQGILVPCQSPWNTPLLPVKKPGTNDYRPVQDLREVNKRVEDIHPTVPNPYNLLSGLPPSHRWYTVLDLKDAFFCLRLHPTSQPLFAFEWRDPGMGISGQLTWTRLPQGFKNSPTLFNEALHRDLADFRIQHPDLILLQYVDDILLAATSELDCQQGTRALLLTLGNLGYRASAKKAQLCQKQVKYLGYLLKEGQRWLTEARKETVMGQPTPKTPRQLREFLGTAGFCRLWIPGFAEMAAPLYPLTKPGTLFNWGPDQQKAYQEIKQALLTAPALGLPDLTKPFELFVDEKQGYAKGVLTQKLGPWRRPVAYLSKKLDPVAAGWPPCLRMVAAIAVLRKDAGKLTMGQPLVILAPHAVEALVKQPPDRWLSNARMTHYQAMLLDTDRVQFGPVVALNPATLLPLPEEGAPHDCLEILAETHGTRPDLTDQPIPDADHTWYTDGSSFLQEGQRKAGAAVTTETEVIWARALPAGTSAQRAELIALTQALKMAEGKRLNVYTDSRYAFATAHIHGEIYRRRGWLTSEGREIKNKSEILALLKALFLPKRLSIIHCLGHQKGDSAEARGNRLADQAAREAAIKTPPDTSTLLAGKRTADGSEFEKRTADGSEFESPKKKAKVE

SEQ ID NO: 1853 - protein, 2091 aa, synthetic construct
MPAAKRVKLDGGDKKYSIGLDIGTNSVGWAVITDEYKVPSKKFKVLGNTDRHSIKKNLIGALLFDSGETAEATRLKRTARRRYTRRKNRICYLQEIFSNEMAKVDDSFFHRLEESFLVEEDKKHERHPIFGNIVDEVAYHEKYPTIYHLRKKLVDSTDKADLRLIYLALAHMIKFRGHFLIEGDLNPDNSDVDKLFIQLVQTYNQLFEENPINASGVDAKAILSARLSKSRRLENLIAQLPGEKKNGLFGNLIALSLGLTPNFKSNFDLAEDAKLQLSKDTYDDDLDNLLAQIGDQYADLFLAAKNLSDAILLSDILRVNTEITKAPLSASMIKRYDEHHQDLTLLKALVRQQLPEKYKEIFFDQSKNGYAGYIDGGASQEEFYKFIKPILEKMDGTEELLVKLNREDLLRKQRTFDNGSIPHQIHLGELHAILRRQEDFYPFLKDNREKIEKILTFRIPYYVGPLARGNSRFAWMTRKSEETITPWNFEEVVDKGASAQSFIERMTNFDKNLPNEKVLPKHSLLYEYFTVYNELTKVKYVTEGMRKPAFLSGEQKKAIVDLLFKTNRKVTVKQLKEDYFKKIECFDSVEISGVEDRFNASLGTYHDLLKIIKDKDFLDNEENEDILEDIVLTLTLFEDREMIEERLKTYAHLFDDKVMKQLKRRRYTGWGRLSRKLINGIRDKQSGKTILDFLKSDGFANRNFMQLIHDDSLTFKEDIQKAQVSGQGDSLHEHIANLAGSPAIKKGILQTVKVVDELVKVMGRHKPENIVIEMARENQTTQKGQKNSRERMKRIEEGIKELGSQILKEHPVENTQLQNEKLYLYYLQNGRDMYVDQELDINRLSDYDVDHIVPQSFLKDDSIDNKVLTRSDKARGKSDNVPSEEVVKKMKNYWRQLLNAKLITQRKFDNLTKAERGGLSELDKAGFIKRQLVETRQITKHVAQILDSRMNTKYDENDKLIREVKVITLKSKLVSDFRKDFQFYKVREINNYHHAHDAYLNAVVGTALIKKYPKLESEFVYGDYKVYDVRKMIAKSEQEIGKATAKYFFYSNIMNFFKTEITLANGEIRKRPLIETNGETGEIVWDKGRDFATVRKVLSMPQVNIVKKTEVQTGGFSKESILPKRNSDKLIARKKDWDPKKYGGFDSPTVAYSVLVVAKVEKGKSKKLKSVKELLGITIMERSSFEKNPIDFLEAKGYKEVKKDLIIKLPKYSLFELENGRKRMLASAGELQKGNELALPSKYVNFLYLASHYEKLKGSPEDNEQKQLFVEQHKHYLDEIIEQISEFSKRVILADANLDKVLSAYNKHRDKPIREQAENIIHLFTLTNLGAPAAFKYFDTTIDRKRYTSTKEVLDATLIHQSITGLYETRIDLSQLGGDGGGGGGSSGGTLNLEDEYRLYETSAEPEVSPGSTWLSDFPQAWAETGGMGLAVRQAPLIIPLKATSTPVSIKQYPMSQEAKLGIKPHIQRLLDQGILVPCQSPWNTPLLPVKKPGTNDYRPVQDLREVNKRVEDIHPTVPNPYNLLSGLPPSHRWYTVLDLKDAFFCLRLHPTSQPLFAFEWRDPGMGISGQLTWTRLPQGFKNSPTLFNEALHRDLADFRIQHPDLILLQYVDDILLAATSELDCQQGTRALLLTLGNLGYRASAKKAQLCQKQVKYLGYLLKEGQRWLTEARKETVMGQPTPKTPRQLREFLGTAGFCRLWIPGFAEMAAPLYPLTKPGTLFNWGPDQQKAYQEIKQALLTAPALGLPDLTKPFELFVDEKQGYAKGVLTQKLGPWRRPVAYLSKKLDPVAAGWPPCLRMVAAIAVLRKDAGKLTMGQPLVILAPHAVEALVKQPPDRWLSNARMTHYQAMLLDTDRVQFGPVVALNPATLLPLPEEGAPHDCLEILAETHGTRPDLTDQPIPDADHTWYTDGSSFLQEGQRKAGAAVTTETEVIWARALPAGTSAQRAELIALTQALKMAEGKRLNVYTDSRYAFATAHIHGEIYRRRGWLTSEGREIKNKSEILALLKALFLPKRLSIIHCLGHQKGDSAEARGNRLADQAAREAAIKTPPDTSTLLAGKRTADGSEFEKRTADGSEFESPKKKAKVE

SEQ ID NO: 1854 - protein, 2091 aa, synthetic construct
MPAAKRVKLDGGDKKYSIGLDIGTNSVGWAVITDEYKVPSKKFKVLGNTDRHSIKKNLIGALLFDSGETAEATRLKRTARRRYTRRKNRICYLQEIFSNEMAKVDDSFFHRLEESFLVEEDKKHERHPIFGNIVDEVAYHEKYPTIYHLRKKLVDSTDKADLRLIYLALAHMIKFRGHFLIEGDLNPDNSDVDKLFIQLVQTYNQLFEENPINASGVDAKAILSARLSKSRRLENLIAQLPGEKKNGLFGNLIALSLGLTPNFKSNFDLAEDAKLQLSKDTYDDDLDNLLAQIGDQYADLFLAAKNLSDAILLSDILRVNTEITKAPLSASMIKRYDEHHQDLTLLKALVRQQLPEKYKEIFFDQSKNGYAGYIDGGASQEEFYKFIKPILEKMDGTEELLVKLNREDLLRKQRTFDNGSIPHQIHLGELHAILRRQEDFYPFLKDNREKIEKILTFRIPYYVGPLARGNSRFAWMTRKSEETITPWNFEEVVDKGASAQSFIERMTNFDKNLPNEKVLPKHSLLYEYFTVYNELTKVKYVTEGMRKPAFLSGEQKKAIVDLLFKTNRKVTVKQLKEDYFKKIECFDSVEISGVEDRFNASLGTYHDLLKIIKDKDFLDNEENEDILEDIVLTLTLFEDREMIEERLKTYAHLFDDKVMKQLKRRRYTGWGRLSRKLINGIRDKQSGKTILDFLKSDGFANRNFMQLIHDDSLTFKEDIQKAQVSGQGDSLHEHIANLAGSPAIKKGILQTVKVVDELVKVMGRHKPENIVIEMARENQTTQKGQKNSRERMKRIEEGIKELGSQILKEHPVENTQLQNEKLYLYYLQNGRDMYVDQELDINRLSDYDVDHIVPQSFLKDDSIDNKVLTRSDKARGKSDNVPSEEVVKKMKNYWRQLLNAKLITQRKFDNLTKAERGGLSELDKAGFIKRQLVETRQITKHVAQILDSRMNTKYDENDKLIREVKVITLKSKLVSDFRKDFQFYKVREINNYHHAHDAYLNAVVGTALIKKYPKLESEFVYGDYKVYDVRKMIAKSEQEIGKATAKYFFYSNIMNFFKTEITLANGEIRKRPLIETNGETGEIVWDKGRDFATVRKVLSMPQVNIVKKTEVQTGGFSKESILPKRNSDKLIARKKDWDPKKYGGFDSPTVAYSVLVVAKVEKGKSKKLKSVKELLGITIMERSSFEKNPIDFLEAKGYKEVKKDLIIKLPKYSLFELENGRKRMLASAGELQKGNELALPSKYVNFLYLASHYEKLKGSPEDNEQKQLFVEQHKHYLDEIIEQISEFSKRVILADANLDKVLSAYNKHRDKPIREQAENIIHLFTLTNLGAPAAFKYFDTTIDRKRYTSTKEVLDATLIHQSITGLYETRIDLSQLGGDGGGGGPAPGGTLNLEDEYRLYETSAEPEVSPGSTWLSDFPQAWAETGGMGLAVRQAPLIIPLKATSTPVSIKQYPMSQEAKLGIKPHIQRLLDQGILVPCQSPWNTPLLPVKKPGTNDYRPVQDLREVNKRVEDIHPTVPNPYNLLSGLPPSHRWYTVLDLKDAFFCLRLHPTSQPLFAFEWRDPGMGISGQLTWTRLPQGFKNSPTLFNEALHRDLADFRIQHPDLILLQYVDDILLAATSELDCQQGTRALLLTLGNLGYRASAKKAQLCQKQVKYLGYLLKEGQRWLTEARKETVMGQPTPKTPRQLREFLGTAGFCRLWIPGFAEMAAPLYPLTKPGTLFNWGPDQQKAYQEIKQALLTAPALGLPDLTKPFELFVDEKQGYAKGVLTQKLGPWRRPVAYLSKKLDPVAAGWPPCLRMVAAIAVLRKDAGKLTMGQPLVILAPHAVEALVKQPPDRWLSNARMTHYQAMLLDTDRVQFGPVVALNPATLLPLPEEGAPHDCLEILAETHGTRPDLTDQPIPDADHTWYTDGSSFLQEGQRKAGAAVTTETEVIWARALPAGTSAQRAELIALTQALKMAEGKRLNVYTDSRYAFATAHIHGEIYRRRGWLTSEGREIKNKSEILALLKALFLPKRLSIIHCLGHQKGDSAEARGNRLADQAAREAAIKTPPDTSTLLAGKRTADGSEFEKRTADGSEFESPKKKAKVE

SEQ ID NO: 1855 - protein, 2090 aa, synthetic construct
MPAAKRVKLDGGDKKYSIGLDIGTNSVGWAVITDEYKVPSKKFKVLGNTDRHSIKKNLIGALLFDSGETAEATRLKRTARRRYTRRKNRICYLQEIFSNEMAKVDDSFFHRLEESFLVEEDKKHERHPIFGNIVDEVAYHEKYPTIYHLRKKLVDSTDKADLRLIYLALAHMIKFRGHFLIEGDLNPDNSDVDKLFIQLVQTYNQLFEENPINASGVDAKAILSARLSKSRRLENLIAQLPGEKKNGLFGNLIALSLGLTPNFKSNFDLAEDAKLQLSKDTYDDDLDNLLAQIGDQYADLFLAAKNLSDAILLSDILRVNTEITKAPLSASMIKRYDEHHQDLTLLKALVRQQLPEKYKEIFFDQSKNGYAGYIDGGASQEEFYKFIKPILEKMDGTEELLVKLNREDLLRKQRTFDNGSIPHQIHLGELHAILRRQEDFYPFLKDNREKIEKILTFRIPYYVGPLARGNSRFAWMTRKSEETITPWNFEEVVDKGASAQSFIERMTNFDKNLPNEKVLPKHSLLYEYFTVYNELTKVKYVTEGMRKPAFLSGEQKKAIVDLLFKTNRKVTVKQLKEDYFKKIECFDSVEISGVEDRFNASLGTYHDLLKIIKDKDFLDNEENEDILEDIVLTLTLFEDREMIEERLKTYAHLFDDKVMKQLKRRRYTGWGRLSRKLINGIRDKQSGKTILDFLKSDGFANRNFMQLIHDDSLTFKEDIQKAQVSGQGDSLHEHIANLAGSPAIKKGILQTVKVVDELVKVMGRHKPENIVIEMARENQTTQKGQKNSRERMKRIEEGIKELGSQILKEHPVENTQLQNEKLYLYYLQNGRDMYVDQELDINRLSDYDVDHIVPQSFLKDDSIDNKVLTRSDKARGKSDNVPSEEVVKKMKNYWRQLLNAKLITQRKFDNLTKAERGGLSELDKAGFIKRQLVETRQITKHVAQILDSRMNTKYDENDKLIREVKVITLKSKLVSDFRKDFQFYKVREINNYHHAHDAYLNAVVGTALIKKYPKLESEFVYGDYKVYDVRKMIAKSEQEIGKATAKYFFYSNIMNFFKTEITLANGEIRKRPLIETNGETGEIVWDKGRDFATVRKVLSMPQVNIVKKTEVQTGGFSKESILPKRNSDKLIARKKDWDPKKYGGFDSPTVAYSVLVVAKVEKGKSKKLKSVKELLGITIMERSSFEKNPIDFLEAKGYKEVKKDLIIKLPKYSLFELENGRKRMLASAGELQKGNELALPSKYVNFLYLASHYEKLKGSPEDNEQKQLFVEQHKHYLDEIIEQISEFSKRVILADANLDKVLSAYNKHRDKPIREQAENIIHLFTLTNLGAPAAFKYFDTTIDRKRYTSTKEVLDATLIHQSITGLYETRIDLSQLGGDGGPAPAPGGTLNLEDEYRLYETSAEPEVSPGSTWLSDFPQAWAETGGMGLAVRQAPLIIPLKATSTPVSIKQYPMSQEAKLGIKPHIQRLLDQGILVPCQSPWNTPLLPVKKPGTNDYRPVQDLREVNKRVEDIHPTVPNPYNLLSGLPPSHRWYTVLDLKDAFFCLRLHPTSQPLFAFEWRDPGMGISGQLTWTRLPQGFKNSPTLFNEALHRDLADFRIQHPDLILLQYVDDILLAATSELDCQQGTRALLLTLGNLGYRASAKKAQLCQKQVKYLGYLLKEGQRWLTEARKETVMGQPTPKTPRQLREFLGTAGFCRLWIPGFAEMAAPLYPLTKPGTLFNWGPDQQKAYQEIKQALLTAPALGLPDLTKPFELFVDEKQGYAKGVLTQKLGPWRRPVAYLSKKLDPVAAGWPPCLRMVAAIAVLRKDAGKLTMGQPLVILAPHAVEALVKQPPDRWLSNARMTHYQAMLLDTDRVQFGPVVALNPATLLPLPEEGAPHDCLEILAETHGTRPDLTDQPIPDADHTWYTDGSSFLQEGQRKAGAAVTTETEVIWARALPAGTSAQRAELIALTQALKMAEGKRLNVYTDSRYAFATAHIHGEIYRRRGWLTSEGREIKNKSEILALLKALFLPKRLSIIHCLGHQKGDSAEARGNRLADQAAREAAIKTPPDTSTLLAGKRTADGSEFEKRTADGSEFESPKKKAKVE

SEQ ID NO: 1856 - protein, 2096 aa, synthetic construct
MPAAKRVKLDGGDKKYSIGLDIGTNSVGWAVITDEYKVPSKKFKVLGNTDRHSIKKNLIGALLFDSGETAEATRLKRTARRRYTRRKNRICYLQEIFSNEMAKVDDSFFHRLEESFLVEEDKKHERHPIFGNIVDEVAYHEKYPTIYHLRKKLVDSTDKADLRLIYLALAHMIKFRGHFLIEGDLNPDNSDVDKLFIQLVQTYNQLFEENPINASGVDAKAILSARLSKSRRLENLIAQLPGEKKNGLFGNLIALSLGLTPNFKSNFDLAEDAKLQLSKDTYDDDLDNLLAQIGDQYADLFLAAKNLSDAILLSDILRVNTEITKAPLSASMIKRYDEHHQDLTLLKALVRQQLPEKYKEIFFDQSKNGYAGYIDGGASQEEFYKFIKPILEKMDGTEELLVKLNREDLLRKQRTFDNGSIPHQIHLGELHAILRRQEDFYPFLKDNREKIEKILTFRIPYYVGPLARGNSRFAWMTRKSEETITPWNFEEVVDKGASAQSFIERMTNFDKNLPNEKVLPKHSLLYEYFTVYNELTKVKYVTEGMRKPAFLSGEQKKAIVDLLFKTNRKVTVKQLKEDYFKKIECFDSVEISGVEDRFNASLGTYHDLLKIIKDKDFLDNEENEDILEDIVLTLTLFEDREMIEERLKTYAHLFDDKVMKQLKRRRYTGWGRLSRKLINGIRDKQSGKTILDFLKSDGFANRNFMQLIHDDSLTFKEDIQKAQVSGQGDSLHEHIANLAGSPAIKKGILQTVKVVDELVKVMGRHKPENIVIEMARENQTTQKGQKNSRERMKRIEEGIKELGSQILKEHPVENTQLQNEKLYLYYLQNGRDMYVDQELDINRLSDYDVDHIVPQSFLKDDSIDNKVLTRSDKARGKSDNVPSEEVVKKMKNYWRQLLNAKLITQRKFDNLTKAERGGLSELDKAGFIKRQLVETRQITKHVAQILDSRMNTKYDENDKLIREVKVITLKSKLVSDFRKDFQFYKVREINNYHHAHDAYLNAVVGTALIKKYPKLESEFVYGDYKVYDVRKMIAKSEQEIGKATAKYFFYSNIMNFFKTEITLANGEIRKRPLIETNGETGEIVWDKGRDFATVRKVLSMPQVNIVKKTEVQTGGFSKESILPKRNSDKLIARKKDWDPKKYGGFDSPTVAYSVLVVAKVEKGKSKKLKSVKELLGITIMERSSFEKNPIDFLEAKGYKEVKKDLIIKLPKYSLFELENGRKRMLASAGELQKGNELALPSKYVNFLYLASHYEKLKGSPEDNEQKQLFVEQHKHYLDEIIEQISEFSKRVILADANLDKVLSAYNKHRDKPIREQAENIIHLFTLTNLGAPAAFKYFDTTIDRKRYTSTKEVLDATLIHQSITGLYETRIDLSQLGGDGGPAPGGGEAAAKGGTLNLEDEYRLYETSAEPEVSPGSTWLSDFPQAWAETGGMGLAVRQAPLIIPLKATSTPVSIKQYPMSQEAKLGIKPHIQRLLDQGILVPCQSPWNTPLLPVKKPGTNDYRPVQDLREVNKRVEDIHPTVPNPYNLLSGLPPSHRWYTVLDLKDAFFCLRLHPTSQPLFAFEWRDPGMGISGQLTWTRLPQGFKNSPTLFNEALHRDLADFRIQHPDLILLQYVDDILLAATSELDCQQGTRALLLTLGNLGYRASAKKAQLCQKQVKYLGYLLKEGQRWLTEARKETVMGQPTPKTPRQLREFLGKAGFCRLFIPGFAEMAAPLYPLTKPGTLFNWGPDQQKAYQEIKQALLTAPALGLPDLTKPFELFVDEKQGYAKGVLTQKLGPWRRPVAYLSKKLDPVAAGWPPCLRMVAAIAVLRKDAGKLTMGQPLVILAPHAVEALVKQPPDRWLSNARMTHYQAMLLDTDRVQFGPVVALNPATLLPLPEEGAPHDCLEILAETHGTRPDLTDQPIPDADHTWYTDGSSFLQEGQRKAGAAVTTETEVIWARALPAGTSAQRAELIALTQALKMAEGKRLNVYTDSRYAFATAHIHGEIYRRRGWLTSEGREIKNKSEILALLKALFLPKRLSIIHCLGHQKGDSAEARGNRLADQAAREAAIKTPPDTSTLLAGKRTADGSEFEKRTADGSEFESPKKKAKVE

SEQ ID NO: 1857 - protein, 2094 aa, synthetic construct
MPAAKRVKLDGGDKKYSIGLDIGTNSVGWAVITDEYKVPSKKFKVLGNTDRHSIKKNLIGALLFDSGETAEATRLKRTARRRYTRRKNRICYLQEIFSNEMAKVDDSFFHRLEESFLVEEDKKHERHPIFGNIVDEVAYHEKYPTIYHLRKKLVDSTDKADLRLIYLALAHMIKFRGHFLIEGDLNPDNSDVDKLFIQLVQTYNQLFEENPINASGVDAKAILSARLSKSRRLENLIAQLPGEKKNGLFGNLIALSLGLTPNFKSNFDLAEDAKLQLSKDTYDDDLDNLLAQIGDQYADLFLAAKNLSDAILLSDILRVNTEITKAPLSASMIKRYDEHHQDLTLLKALVRQQLPEKYKEIFFDQSKNGYAGYIDGGASQEEFYKFIKPILEKMDGTEELLVKLNREDLLRKQRTFDNGSIPHQIHLGELHAILRRQEDFYPFLKDNREKIEKILTFRIPYYVGPLARGNSRFAWMTRKSEETITPWNFEEVVDKGASAQSFIERMTNFDKNLPNEKVLPKHSLLYEYFTVYNELTKVKYVTEGMRKPAFLSGEQKKAIVDLLFKTNRKVTVKQLKEDYFKKIECFDSVEISGVEDRFNASLGTYHDLLKIIKDKDFLDNEENEDILEDIVLTLTLFEDREMIEERLKTYAHLFDDKVMKQLKRRRYTGWGRLSRKLINGIRDKQSGKTILDFLKSDGFANRNFMQLIHDDSLTFKEDIQKAQVSGQGDSLHEHIANLAGSPAIKKGILQTVKVVDELVKVMGRHKPENIVIEMARENQTTQKGQKNSRERMKRIEEGIKELGSQILKEHPVENTQLQNEKLYLYYLQNGRDMYVDQELDINRLSDYDVDHIVPQSFLKDDSIDNKVLTRSDKARGKSDNVPSEEVVKKMKNYWRQLLNAKLITQRKFDNLTKAERGGLSELDKAGFIKRQLVETRQITKHVAQILDSRMNTKYDENDKLIREVKVITLKSKLVSDFRKDFQFYKVREINNYHHAHDAYLNAVVGTALIKKYPKLESEFVYGDYKVYDVRKMIAKSEQEIGKATAKYFFYSNIMNFFKTEITLANGEIRKRPLIETNGETGEIVWDKGRDFATVRKVLSMPQVNIVKKTEVQTGGFSKESILPKRNSDKLIARKKDWDPKKYGGFDSPTVAYSVLVVAKVEKGKSKKLKSVKELLGITIMERSSFEKNPIDFLEAKGYKEVKKDLIIKLPKYSLFELENGRKRMLASAGELQKGNELALPSKYVNFLYLASHYEKLKGSPEDNEQKQLFVEQHKHYLDEIIEQISEFSKRVILADANLDKVLSAYNKHRDKPIREQAENIIHLFTLTNLGAPAAFKYFDTTIDRKRYTSTKEVLDATLIHQSITGLYETRIDLSQLGGDGGGGGPAPGSSGGTLNLEDEYRLYETSAEPEVSPGSTWLSDFPQAWAETGGMGLAVRQAPLIIPLKATSTPVSIKQYPMSQEAKLGIKPHIQRLLDQGILVPCQSPWNTPLLPVKKPGTNDYRPVQDLREVNKRVEDIHPTVPNPYNLLSGLPPSHRWYTVLDLKDAFFCLRLHPTSQPLFAFEWRDPGMGISGQLTWTRLPQGFKNSPTLFNEALHRDLADFRIQHPDLILLQYVDDILLAATSELDCQQGTRALLLTLGNLGYRASAKKAQLCQKQVKYLGYLLKEGQRWLTEARKETVMGQPTPKTPRQLREFLGKAGFCRLFIPGFAEMAAPLYPLTKPGTLFNWGPDQQKAYQEIKQALLTAPALGLPDLTKPFELFVDEKQGYAKGVLTQKLGPWRRPVAYLSKKLDPVAAGWPPCLRMVAAIAVLRKDAGKLTMGQPLVILAPHAVEALVKQPPDRWLSNARMTHYQAMLLDTDRVQFGPVVALNPATLLPLPEEGAPHDCLEILAETHGTRPDLTDQPIPDADHTWYTDGSSFLQEGQRKAGAAVTTETEVIWARALPAGTSAQRAELIALTQALKMAEGKRLNVYTDSRYAFATAHIHGEIYRRRGWLTSEGREIKNKSEILALLKALFLPKRLSIIHCLGHQKGDSAEARGNRLADQAAREAAIKTPPDTSTLLAGKRTADGSEFEKRTADGSEFESPKKKAKVE

SEQ ID NO: 1858 - protein, 2093 aa, synthetic construct
MPAAKRVKLDGGDKKYSIGLDIGTNSVGWAVITDEYKVPSKKFKVLGNTDRHSIKKNLIGALLFDSGETAEATRLKRTARRRYTRRKNRICYLQEIFSNEMAKVDDSFFHRLEESFLVEEDKKHERHPIFGNIVDEVAYHEKYPTIYHLRKKLVDSTDKADLRLIYLALAHMIKFRGHFLIEGDLNPDNSDVDKLFIQLVQTYNQLFEENPINASGVDAKAILSARLSKSRRLENLIAQLPGEKKNGLFGNLIALSLGLTPNFKSNFDLAEDAKLQLSKDTYDDDLDNLLAQIGDQYADLFLAAKNLSDAILLSDILRVNTEITKAPLSASMIKRYDEHHQDLTLLKALVRQQLPEKYKEIFFDQSKNGYAGYIDGGASQEEFYKFIKPILEKMDGTEELLVKLNREDLLRKQRTFDNGSIPHQIHLGELHAILRRQEDFYPFLKDNREKIEKILTFRIPYYVGPLARGNSRFAWMTRKSEETITPWNFEEVVDKGASAQSFIERMTNFDKNLPNEKVLPKHSLLYEYFTVYNELTKVKYVTEGMRKPAFLSGEQKKAIVDLLFKTNRKVTVKQLKEDYFKKIECFDSVEISGVEDRFNASLGTYHDLLKIIKDKDFLDNEENEDILEDIVLTLTLFEDREMIEERLKTYAHLFDDKVMKQLKRRRYTGWGRLSRKLINGIRDKQSGKTILDFLKSDGFANRNFMQLIHDDSLTFKEDIQKAQVSGQGDSLHEHIANLAGSPAIKKGILQTVKVVDELVKVMGRHKPENIVIEMARENQTTQKGQKNSRERMKRIEEGIKELGSQILKEHPVENTQLQNEKLYLYYLQNGRDMYVDQELDINRLSDYDVDHIVPQSFLKDDSIDNKVLTRSDKARGKSDNVPSEEVVKKMKNYWRQLLNAKLITQRKFDNLTKAERGGLSELDKAGFIKRQLVETRQITKHVAQILDSRMNTKYDENDKLIREVKVITLKSKLVSDFRKDFQFYKVREINNYHHAHDAYLNAVVGTALIKKYPKLESEFVYGDYKVYDVRKMIAKSEQEIGKATAKYFFYSNIMNFFKTEITLANGEIRKRPLIETNGETGEIVWDKGRDFATVRKVLSMPQVNIVKKTEVQTGGFSKESILPKRNSDKLIARKKDWDPKKYGGFDSPTVAYSVLVVAKVEKGKSKKLKSVKELLGITIMERSSFEKNPIDFLEAKGYKEVKKDLIIKLPKYSLFELENGRKRMLASAGELQKGNELALPSKYVNFLYLASHYEKLKGSPEDNEQKQLFVEQHKHYLDEIIEQISEFSKRVILADANLDKVLSAYNKHRDKPIREQAENIIHLFTLTNLGAPAAFKYFDTTIDRKRYTSTKEVLDATLIHQSITGLYETRIDLSQLGGDGGPAPEAAAKGGTLNLEDEYRLYETSAEPEVSPGSTWLSDFPQAWAETGGMGLAVRQAPLIIPLKATSTPVSIKQYPMSQEAKLGIKPHIQRLLDQGILVPCQSPWNTPLLPVKKPGTNDYRPVQDLREVNKRVEDIHPTVPNPYNLLSGLPPSHRWYTVLDLKDAFFCLRLHPTSQPLFAFEWRDPGMGISGQLTWTRLPQGFKNSPTLFNEALHRDLADFRIQHPDLILLQYVDDILLAATSELDCQQGTRALLLTLGNLGYRASAKKAQLCQKQVKYLGYLLKEGQRWLTEARKETVMGQPTPKTPRQLREFLGKAGFCRLFIPGFAEMAAPLYPLTKPGTLFNWGPDQQKAYQEIKQALLTAPALGLPDLTKPFELFVDEKQGYAKGVLTQKLGPWRRPVAYLSKKLDPVAAGWPPCLRMVAAIAVLRKDAGKLTMGQPLVILAPHAVEALVKQPPDRWLSNARMTHYQAMLLDTDRVQFGPVVALNPATLLPLPEEGAPHDCLEILAETHGTRPDLTDQPIPDADHTWYTDGSSFLQEGQRKAGAAVTTETEVIWARALPAGTSAQRAELIALTQALKMAEGKRLNVYTDSRYAFATAHIHGEIYRRRGWLTSEGREIKNKSEILALLKALFLPKRLSIIHCLGHQKGDSAEARGNRLADQAAREAAIKTPPDTSTLLAGKRTADGSEFEKRTADGSEFESPKKKAKVE

SEQ ID NO: 1859 - protein, 2096 aa, synthetic construct
MPAAKRVKLDGGDKKYSIGLDIGTNSVGWAVITDEYKVPSKKFKVLGNTDRHSIKKNLIGALLFDSGETAEATRLKRTARRRYTRRKNRICYLQEIFSNEMAKVDDSFFHRLEESFLVEEDKKHERHPIFGNIVDEVAYHEKYPTIYHLRKKLVDSTDKADLRLIYLALAHMIKFRGHFLIEGDLNPDNSDVDKLFIQLVQTYNQLFEENPINASGVDAKAILSARLSKSRRLENLIAQLPGEKKNGLFGNLIALSLGLTPNFKSNFDLAEDAKLQLSKDTYDDDLDNLLAQIGDQYADLFLAAKNLSDAILLSDILRVNTEITKAPLSASMIKRYDEHHQDLTLLKALVRQQLPEKYKEIFFDQSKNGYAGYIDGGASQEEFYKFIKPILEKMDGTEELLVKLNREDLLRKQRTFDNGSIPHQIHLGELHAILRRQEDFYPFLKDNREKIEKILTFRIPYYVGPLARGNSRFAWMTRKSEETITPWNFEEVVDKGASAQSFIERMTNFDKNLPNEKVLPKHSLLYEYFTVYNELTKVKYVTEGMRKPAFLSGEQKKAIVDLLFKTNRKVTVKQLKEDYFKKIECFDSVEISGVEDRFNASLGTYHDLLKIIKDKDFLDNEENEDILEDIVLTLTLFEDREMIEERLKTYAHLFDDKVMKQLKRRRYTGWGRLSRKLINGIRDKQSGKTILDFLKSDGFANRNFMQLIHDDSLTFKEDIQKAQVSGQGDSLHEHIANLAGSPAIKKGILQTVKVVDELVKVMGRHKPENIVIEMARENQTTQKGQKNSRERMKRIEEGIKELGSQILKEHPVENTQLQNEKLYLYYLQNGRDMYVDQELDINRLSDYDVDHIVPQSFLKDDSIDNKVLTRSDKARGKSDNVPSEEVVKKMKNYWRQLLNAKLITQRKFDNLTKAERGGLSELDKAGFIKRQLVETRQITKHVAQILDSRMNTKYDENDKLIREVKVITLKSKLVSDFRKDFQFYKVREINNYHHAHDAYLNAVVGTALIKKYPKLESEFVYGDYKVYDVRKMIAKSEQEIGKATAKYFFYSNIMNFFKTEITLANGEIRKRPLIETNGETGEIVWDKGRDFATVRKVLSMPQVNIVKKTEVQTGGFSKESILPKRNSDKLIARKKDWDPKKYGGFDSPTVAYSVLVVAKVEKGKSKKLKSVKELLGITIMERSSFEKNPIDFLEAKGYKEVKKDLIIKLPKYSLFELENGRKRMLASAGELQKGNELALPSKYVNFLYLASHYEKLKGSPEDNEQKQLFVEQHKHYLDEIIEQISEFSKRVILADANLDKVLSAYNKHRDKPIREQAENIIHLFTLTNLGAPAAFKYFDTTIDRKRYTSTKEVLDATLIHQSITGLYETRIDLSQLGGDGGGGSEAAAKGSSGGTLNLEDEYRLYETSAEPEVSPGSTWLSDFPQAWAETGGMGLAVRQAPLIIPLKATSTPVSIKQYPMSQEAKLGIKPHIQRLLDQGILVPCQSPWNTPLLPVKKPGTNDYRPVQDLREVNKRVEDIHPTVPNPYNLLSGLPPSHRWYTVLDLKDAFFCLRLHPTSQPLFAFEWRDPGMGISGQLTWTRLPQGFKNSPTLFNEALHRDLADFRIQHPDLILLQYVDDILLAATSELDCQQGTRALLLTLGNLGYRASAKKAQLCQKQVKYLGYLLKEGQRWLTEARKETVMGQPTPKTPRQLREFLGKAGFCRLFIPGFAEMAAPLYPLTKPGTLFNWGPDQQKAYQEIKQALLTAPALGLPDLTKPFELFVDEKQGYAKGVLTQKLGPWRRPVAYLSKKLDPVAAGWPPCLRMVAAIAVLRKDAGKLTMGQPLVILAPHAVEALVKQPPDRWLSNARMTHYQAMLLDTDRVQFGPVVALNPATLLPLPEEGAPHDCLEILAETHGTRPDLTDQPIPDADHTWYTDGSSFLQEGQRKAGAAVTTETEVIWARALPAGTSAQRAELIALTQALKMAEGKRLNVYTDSRYAFATAHIHGEIYRRRGWLTSEGREIKNKSEILALLKALFLPKRLSIIHCLGHQKGDSAEARGNRLADQAAREAAIKTPPDTSTLLAGKRTADGSEFEKRTADGSEFESPKKKAKVE

SEQ ID NO: 1860 - protein, 2100 aa, synthetic construct
MPAAKRVKLDGGDKKYSIGLDIGTNSVGWAVITDEYKVPSKKFKVLGNTDRHSIKKNLIGALLFDSGETAEATRLKRTARRRYTRRKNRICYLQEIFSNEMAKVDDSFFHRLEESFLVEEDKKHERHPIFGNIVDEVAYHEKYPTIYHLRKKLVDSTDKADLRLIYLALAHMIKFRGHFLIEGDLNPDNSDVDKLFIQLVQTYNQLFEENPINASGVDAKAILSARLSKSRRLENLIAQLPGEKKNGLFGNLIALSLGLTPNFKSNFDLAEDAKLQLSKDTYDDDLDNLLAQIGDQYADLFLAAKNLSDAILLSDILRVNTEITKAPLSASMIKRYDEHHQDLTLLKALVRQQLPEKYKEIFFDQSKNGYAGYIDGGASQEEFYKFIKPILEKMDGTEELLVKLNREDLLRKQRTFDNGSIPHQIHLGELHAILRRQEDFYPFLKDNREKIEKILTFRIPYYVGPLARGNSRFAWMTRKSEETITPWNFEEVVDKGASAQSFIERMTNFDKNLPNEKVLPKHSLLYEYFTVYNELTKVKYVTEGMRKPAFLSGEQKKAIVDLLFKTNRKVTVKQLKEDYFKKIECFDSVEISGVEDRFNASLGTYHDLLKIIKDKDFLDNEENEDILEDIVLTLTLFEDREMIEERLKTYAHLFDDKVMKQLKRRRYTGWGRLSRKLINGIRDKQSGKTILDFLKSDGFANRNFMQLIHDDSLTFKEDIQKAQVSGQGDSLHEHIANLAGSPAIKKGILQTVKVVDELVKVMGRHKPENIVIEMARENQTTQKGQKNSRERMKRIEEGIKELGSQILKEHPVENTQLQNEKLYLYYLQNGRDMYVDQELDINRLSDYDVDHIVPQSFLKDDSIDNKVLTRSDKARGKSDNVPSEEVVKKMKNYWRQLLNAKLITQRKFDNLTKAERGGLSELDKAGFIKRQLVETRQITKHVAQILDSRMNTKYDENDKLIREVKVITLKSKLVSDFRKDFQFYKVREINNYHHAHDAYLNAVVGTALIKKYPKLESEFVYGDYKVYDVRKMIAKSEQEIGKATAKYFFYSNIMNFFKTEITLANGEIRKRPLIETNGETGEIVWDKGRDFATVRKVLSMPQVNIVKKTEVQTGGFSKESILPKRNSDKLIARKKDWDPKKYGGFDSPTVAYSVLVVAKVEKGKSKKLKSVKELLGITIMERSSFEKNPIDFLEAKGYKEVKKDLIIKLPKYSLFELENGRKRMLASAGELQKGNELALPSKYVNFLYLASHYEKLKGSPEDNEQKQLFVEQHKHYLDEIIEQISEFSKRVILADANLDKVLSAYNKHRDKPIREQAENIIHLFTLTNLGAPAAFKYFDTTIDRKRYTSTKEVLDATLIHQSITGLYETRIDLSQLGGDGGEAAAKGGGGSEAAAKGGTLNLEDEYRLYETSAEPEVSPGSTWLSDFPQAWAETGGMGLAVRQAPLIIPLKATSTPVSIKQYPMSQEAKLGIKPHIQRLLDQGILVPCQSPWNTPLLPVKKPGTNDYRPVQDLREVNKRVEDIHPTVPNPYNLLSGLPPSHRWYTVLDLKDAFFCLRLHPTSQPLFAFEWRDPGMGISGQLTWTRLPQGFKNSPTLFNEALHRDLADFRIQHPDLILLQYVDDILLAATSELDCQQGTRALLLTLGNLGYRASAKKAQLCQKQVKYLGYLLKEGQRWLTEARKETVMGQPTPKTPRQLREFLGKAGFCRLFIPGFAEMAAPLYPLTKPGTLFNWGPDQQKAYQEIKQALLTAPALGLPDLTKPFELFVDEKQGYAKGVLTQKLGPWRRPVAYLSKKLDPVAAGWPPCLRMVAAIAVLRKDAGKLTMGQPLVILAPHAVEALVKQPPDRWLSNARMTHYQAMLLDTDRVQFGPVVALNPATLLPLPEEGAPHDCLEILAETHGTRPDLTDQPIPDADHTWYTDGSSFLQEGQRKAGAAVTTETEVIWARALPAGTSAQRAELIALTQALKMAEGKRLNVYTDSRYAFATAHIHGEIYRRRGWLTSEGREIKNKSEILALLKALFLPKRLSIIHCLGHQKGDSAEARGNRLADQAAREAAIKTPPDTSTLLAGKRTADGSEFEKRTADGSEFESPKKKAKVE

SEQ ID NO: 1861 - protein, 2096 aa, synthetic construct
MPAAKRVKLDGGDKKYSIGLDIGTNSVGWAVITDEYKVPSKKFKVLGNTDRHSIKKNLIGALLFDSGETAEATRLKRTARRRYTRRKNRICYLQEIFSNEMAKVDDSFFHRLEESFLVEEDKKHERHPIFGNIVDEVAYHEKYPTIYHLRKKLVDSTDKADLRLIYLALAHMIKFRGHFLIEGDLNPDNSDVDKLFIQLVQTYNQLFEENPINASGVDAKAILSARLSKSRRLENLIAQLPGEKKNGLFGNLIALSLGLTPNFKSNFDLAEDAKLQLSKDTYDDDLDNLLAQIGDQYADLFLAAKNLSDAILLSDILRVNTEITKAPLSASMIKRYDEHHQDLTLLKALVRQQLPEKYKEIFFDQSKNGYAGYIDGGASQEEFYKFIKPILEKMDGTEELLVKLNREDLLRKQRTFDNGSIPHQIHLGELHAILRRQEDFYPFLKDNREKIEKILTFRIPYYVGPLARGNSRFAWMTRKSEETITPWNFEEVVDKGASAQSFIERMTNFDKNLPNEKVLPKHSLLYEYFTVYNELTKVKYVTEGMRKPAFLSGEQKKAIVDLLFKTNRKVTVKQLKEDYFKKIECFDSVEISGVEDRFNASLGTYHDLLKIIKDKDFLDNEENEDILEDIVLTLTLFEDREMIEERLKTYAHLFDDKVMKQLKRRRYTGWGRLSRKLINGIRDKQSGKTILDFLKSDGFANRNFMQLIHDDSLTFKEDIQKAQVSGQGDSLHEHIANLAGSPAIKKGILQTVKVVDELVKVMGRHKPENIVIEMARENQTTQKGQKNSRERMKRIEEGIKELGSQILKEHPVENTQLQNEKLYLYYLQNGRDMYVDQELDINRLSDYDVDHIVPQSFLKDDSIDNKVLTRSDKARGKSDNVPSEEVVKKMKNYWRQLLNAKLITQRKFDNLTKAERGGLSELDKAGFIKRQLVETRQITKHVAQILDSRMNTKYDENDKLIREVKVITLKSKLVSDFRKDFQFYKVREINNYHHAHDAYLNAVVGTALIKKYPKLESEFVYGDYKVYDVRKMIAKSEQEIGKATAKYFFYSNIMNFFKTEITLANGEIRKRPLIETNGETGEIVWDKGRDFATVRKVLSMPQVNIVKKTEVQTGGFSKESILPKRNSDKLIARKKDWDPKKYGGFDSPTVAYSVLVVAKVEKGKSKKLKSVKELLGITIMERSSFEKNPIDFLEAKGYKEVKKDLIIKLPKYSLFELENGRKRMLASAGELQKGNELALPSKYVNFLYLASHYEKLKGSPEDNEQKQLFVEQHKHYLDEIIEQISEFSKRVILADANLDKVLSAYNKHRDKPIREQAENIIHLFTLTNLGAPAAFKYFDTTIDRKRYTSTKEVLDATLIHQSITGLYETRIDLSQLGGDGGGSSEAAAKGGGGGTLNLEDEYRLYETSAEPEVSPGSTWLSDFPQAWAETGGMGLAVRQAPLIIPLKATSTPVSIKQYPMSQEAKLGIKPHIQRLLDQGILVPCQSPWNTPLLPVKKPGTNDYRPVQDLREVNKRVEDIHPTVPNPYNLLSGLPPSHRWYTVLDLKDAFFCLRLHPTSQPLFAFEWRDPGMGISGQLTWTRLPQGFKNSPTLFNEALHRDLADFRIQHPDLILLQYVDDILLAATSELDCQQGTRALLLTLGNLGYRASAKKAQLCQKQVKYLGYLLKEGQRWLTEARKETVMGQPTPKTPRQLREFLGKAGFCRLFIPGFAEMAAPLYPLTKPGTLFNWGPDQQKAYQEIKQALLTAPALGLPDLTKPFELFVDEKQGYAKGVLTQKLGPWRRPVAYLSKKLDPVAAGWPPCLRMVAAIAVLRKDAGKLTMGQPLVILAPHAVEALVKQPPDRWLSNARMTHYQAMLLDTDRVQFGPVVALNPATLLPLPEEGAPHDCLEILAETHGTRPDLTDQPIPDADHTWYTDGSSFLQEGQRKAGAAVTTETEVIWARALPAGTSAQRAELIALTQALKMAEGKRLNVYTDSRYAFATAHIHGEIYRRRGWLTSEGREIKNKSEILALLKALFLPKRLSIIHCLGHQKGDSAEARGNRLADQAAREAAIKTPPDTSTLLAGKRTADGSEFEKRTADGSEFESPKKKAKVE

SEQ ID NO: 1862 - protein, 2110 aa, synthetic construct
MPAAKRVKLDGGDKKYSIGLDIGTNSVGWAVITDEYKVPSKKFKVLGNTDRHSIKKNLIGALLFDSGETAEATRLKRTARRRYTRRKNRICYLQEIFSNEMAKVDDSFFHRLEESFLVEEDKKHERHPIFGNIVDEVAYHEKYPTIYHLRKKLVDSTDKADLRLIYLALAHMIKFRGHFLIEGDLNPDNSDVDKLFIQLVQTYNQLFEENPINASGVDAKAILSARLSKSRRLENLIAQLPGEKKNGLFGNLIALSLGLTPNFKSNFDLAEDAKLQLSKDTYDDDLDNLLAQIGDQYADLFLAAKNLSDAILLSDILRVNTEITKAPLSASMIKRYDEHHQDLTLLKALVRQQLPEKYKEIFFDQSKNGYAGYIDGGASQEEFYKFIKPILEKMDGTEELLVKLNREDLLRKQRTFDNGSIPHQIHLGELHAILRRQEDFYPFLKDNREKIEKILTFRIPYYVGPLARGNSRFAWMTRKSEETITPWNFEEVVDKGASAQSFIERMTNFDKNLPNEKVLPKHSLLYEYFTVYNELTKVKYVTEGMRKPAFLSGEQKKAIVDLLFKTNRKVTVKQLKEDYFKKIECFDSVEISGVEDRFNASLGTYHDLLKIIKDKDFLDNEENEDILEDIVLTLTLFEDREMIEERLKTYAHLFDDKVMKQLKRRRYTGWGRLSRKLINGIRDKQSGKTILDFLKSDGFANRNFMQLIHDDSLTFKEDIQKAQVSGQGDSLHEHIANLAGSPAIKKGILQTVKVVDELVKVMGRHKPENIVIEMARENQTTQKGQKNSRERMKRIEEGIKELGSQILKEHPVENTQLQNEKLYLYYLQNGRDMYVDQELDINRLSDYDVDHIVPQSFLKDDSIDNKVLTRSDKARGKSDNVPSEEVVKKMKNYWRQLLNAKLITQRKFDNLTKAERGGLSELDKAGFIKRQLVETRQITKHVAQILDSRMNTKYDENDKLIREVKVITLKSKLVSDFRKDFQFYKVREINNYHHAHDAYLNAVVGTALIKKYPKLESEFVYGDYKVYDVRKMIAKSEQEIGKATAKYFFYSNIMNFFKTEITLANGEIRKRPLIETNGETGEIVWDKGRDFATVRKVLSMPQVNIVKKTEVQTGGFSKESILPKRNSDKLIARKKDWDPKKYGGFDSPTVAYSVLVVAKVEKGKSKKLKSVKELLGITIMERSSFEKNPIDFLEAKGYKEVKKDLIIKLPKYSLFELENGRKRMLASAGELQKGNELALPSKYVNFLYLASHYEKLKGSPEDNEQKQLFVEQHKHYLDEIIEQISEFSKRVILADANLDKVLSAYNKHRDKPIREQAENIIHLFTLTNLGAPAAFKYFDTTIDRKRYTSTKEVLDATLIHQSITGLYETRIDLSQLGGDGGEAAAKEAAAKEAAAKEAAAKEAAAKGGTLNLEDEYRLYETSAEPEVSPGSTWLSDFPQAWAETGGMGLAVRQAPLIIPLKATSTPVSIKQYPMSQEAKLGIKPHIQRLLDQGILVPCQSPWNTPLLPVKKPGTNDYRPVQDLREVNKRVEDIHPTVPNPYNLLSGLPPSHRWYTVLDLKDAFFCLRLHPTSQPLFAFEWRDPGMGISGQLTWTRLPQGFKNSPTLFNEALHRDLADFRIQHPDLILLQYVDDILLAATSELDCQQGTRALLLTLGNLGYRASAKKAQLCQKQVKYLGYLLKEGQRWLTEARKETVMGQPTPKTPRQLREFLGKAGFCRLFIPGFAEMAAPLYPLTKPGTLFNWGPDQQKAYQEIKQALLTAPALGLPDLTKPFELFVDEKQGYAKGVLTQKLGPWRRPVAYLSKKLDPVAAGWPPCLRMVAAIAVLRKDAGKLTMGQPLVILAPHAVEALVKQPPDRWLSNARMTHYQAMLLDTDRVQFGPVVALNPATLLPLPEEGAPHDCLEILAETHGTRPDLTDQPIPDADHTWYTDGSSFLQEGQRKAGAAVTTETEVIWARALPAGTSAQRAELIALTQALKMAEGKRLNVYTDSRYAFATAHIHGEIYRRRGWLTSEGREIKNKSEILALLKALFLPKRLSIIHCLGHQKGDSAEARGNRLADQAAREAAIKTPPDTSTLLAGKRTADGSEFEKRTADGSEFESPKKKAKVE

SEQ ID NO: 1863 - protein, 2098 aa, synthetic construct
MPAAKRVKLDGGDKKYSIGLDIGTNSVGWAVITDEYKVPSKKFKVLGNTDRHSIKKNLIGALLFDSGETAEATRLKRTARRRYTRRKNRICYLQEIFSNEMAKVDDSFFHRLEESFLVEEDKKHERHPIFGNIVDEVAYHEKYPTIYHLRKKLVDSTDKADLRLIYLALAHMIKFRGHFLIEGDLNPDNSDVDKLFIQLVQTYNQLFEENPINASGVDAKAILSARLSKSRRLENLIAQLPGEKKNGLFGNLIALSLGLTPNFKSNFDLAEDAKLQLSKDTYDDDLDNLLAQIGDQYADLFLAAKNLSDAILLSDILRVNTEITKAPLSASMIKRYDEHHQDLTLLKALVRQQLPEKYKEIFFDQSKNGYAGYIDGGASQEEFYKFIKPILEKMDGTEELLVKLNREDLLRKQRTFDNGSIPHQIHLGELHAILRRQEDFYPFLKDNREKIEKILTFRIPYYVGPLARGNSRFAWMTRKSEETITPWNFEEVVDKGASAQSFIERMTNFDKNLPNEKVLPKHSLLYEYFTVYNELTKVKYVTEGMRKPAFLSGEQKKAIVDLLFKTNRKVTVKQLKEDYFKKIECFDSVEISGVEDRFNASLGTYHDLLKIIKDKDFLDNEENEDILEDIVLTLTLFEDREMIEERLKTYAHLFDDKVMKQLKRRRYTGWGRLSRKLINGIRDKQSGKTILDFLKSDGFANRNFMQLIHDDSLTFKEDIQKAQVSGQGDSLHEHIANLAGSPAIKKGILQTVKVVDELVKVMGRHKPENIVIEMARENQTTQKGQKNSRERMKRIEEGIKELGSQILKEHPVENTQLQNEKLYLYYLQNGRDMYVDQELDINRLSDYDVDHIVPQSFLKDDSIDNKVLTRSDKARGKSDNVPSEEVVKKMKNYWRQLLNAKLITQRKFDNLTKAERGGLSELDKAGFIKRQLVETRQITKHVAQILDSRMNTKYDENDKLIREVKVITLKSKLVSDFRKDFQFYKVREINNYHHAHDAYLNAVVGTALIKKYPKLESEFVYGDYKVYDVRKMIAKSEQEIGKATAKYFFYSNIMNFFKTEITLANGEIRKRPLIETNGETGEIVWDKGRDFATVRKVLSMPQVNIVKKTEVQTGGFSKESILPKRNSDKLIARKKDWDPKKYGGFDSPTVAYSVLVVAKVEKGKSKKLKSVKELLGITIMERSSFEKNPIDFLEAKGYKEVKKDLIIKLPKYSLFELENGRKRMLASAGELQKGNELALPSKYVNFLYLASHYEKLKGSPEDNEQKQLFVEQHKHYLDEIIEQISEFSKRVILADANLDKVLSAYNKHRDKPIREQAENIIHLFTLTNLGAPAAFKYFDTTIDRKRYTSTKEVLDATLIHQSITGLYETRIDLSQLGGDGGPAPAPAPAPAPAPGGTLNLEDEYRLYETSAEPEVSPGSTWLSDFPQAWAETGGMGLAVRQAPLIIPLKATSTPVSIKQYPMSQEAKLGIKPHIQRLLDQGILVPCQSPWNTPLLPVKKPGTNDYRPVQDLREVNKRVEDIHPTVPNPYNLLSGLPPSHRWYTVLDLKDAFFCLRLHPTSQPLFAFEWRDPGMGISGQLTWTRLPQGFKNSPTLFNEALHRDLADFRIQHPDLILLQYVDDILLAATSELDCQQGTRALLLTLGNLGYRASAKKAQLCQKQVKYLGYLLKEGQRWLTEARKETVMGQPTPKTPRQLREFLGKAGFCRLFIPGFAEMAAPLYPLTKPGTLFNWGPDQQKAYQEIKQALLTAPALGLPDLTKPFELFVDEKQGYAKGVLTQKLGPWRRPVAYLSKKLDPVAAGWPPCLRMVAAIAVLRKDAGKLTMGQPLVILAPHAVEALVKQPPDRWLSNARMTHYQAMLLDTDRVQFGPVVALNPATLLPLPEEGAPHDCLEILAETHGTRPDLTDQPIPDADHTWYTDGSSFLQEGQRKAGAAVTTETEVIWARALPAGTSAQRAELIALTQALKMAEGKRLNVYTDSRYAFATAHIHGEIYRRRGWLTSEGREIKNKSEILALLKALFLPKRLSIIHCLGHQKGDSAEARGNRLADQAAREAAIKTPPDTSTLLAGKRTADGSEFEKRTADGSEFESPKKKAKVE

SEQ ID NO: 1864 - protein, 2096 aa, synthetic construct
MPAAKRVKLDGGDKKYSIGLDIGTNSVGWAVITDEYKVPSKKFKVLGNTDRHSIKKNLIGALLFDSGETAEATRLKRTARRRYTRRKNRICYLQEIFSNEMAKVDDSFFHRLEESFLVEEDKKHERHPIFGNIVDEVAYHEKYPTIYHLRKKLVDSTDKADLRLIYLALAHMIKFRGHFLIEGDLNPDNSDVDKLFIQLVQTYNQLFEENPINASGVDAKAILSARLSKSRRLENLIAQLPGEKKNGLFGNLIALSLGLTPNFKSNFDLAEDAKLQLSKDTYDDDLDNLLAQIGDQYADLFLAAKNLSDAILLSDILRVNTEITKAPLSASMIKRYDEHHQDLTLLKALVRQQLPEKYKEIFFDQSKNGYAGYIDGGASQEEFYKFIKPILEKMDGTEELLVKLNREDLLRKQRTFDNGSIPHQIHLGELHAILRRQEDFYPFLKDNREKIEKILTFRIPYYVGPLARGNSRFAWMTRKSEETITPWNFEEVVDKGASAQSFIERMTNFDKNLPNEKVLPKHSLLYEYFTVYNELTKVKYVTEGMRKPAFLSGEQKKAIVDLLFKTNRKVTVKQLKEDYFKKIECFDSVEISGVEDRFNASLGTYHDLLKIIKDKDFLDNEENEDILEDIVLTLTLFEDREMIEERLKTYAHLFDDKVMKQLKRRRYTGWGRLSRKLINGIRDKQSGKTILDFLKSDGFANRNFMQLIHDDSLTFKEDIQKAQVSGQGDSLHEHIANLAGSPAIKKGILQTVKVVDELVKVMGRHKPENIVIEMARENQTTQKGQKNSRERMKRIEEGIKELGSQILKEHPVENTQLQNEKLYLYYLQNGRDMYVDQELDINRLSDYDVDHIVPQSFLKDDSIDNKVLTRSDKARGKSDNVPSEEVVKKMKNYWRQLLNAKLITQRKFDNLTKAERGGLSELDKAGFIKRQLVETRQITKHVAQILDSRMNTKYDENDKLIREVKVITLKSKLVSDFRKDFQFYKVREINNYHHAHDAYLNAVVGTALIKKYPKLESEFVYGDYKVYDVRKMIAKSEQEIGKATAKYFFYSNIMNFFKTEITLANGEIRKRPLIETNGETGEIVWDKGRDFATVRKVLSMPQVNIVKKTEVQTGGFSKESILPKRNSDKLIARKKDWDPKKYGGFDSPTVAYSVLVVAKVEKGKSKKLKSVKELLGITIMERSSFEKNPIDFLEAKGYKEVKKDLIIKLPKYSLFELENGRKRMLASAGELQKGNELALPSKYVNFLYLASHYEKLKGSPEDNEQKQLFVEQHKHYLDEIIEQISEFSKRVILADANLDKVLSAYNKHRDKPIREQAENIIHLFTLTNLGAPAAFKYFDTTIDRKRYTSTKEVLDATLIHQSITGLYETRIDLSQLGGDGGPAPEAAAKGGGGGTLNLEDEYRLYETSAEPEVSPGSTWLSDFPQAWAETGGMGLAVRQAPLIIPLKATSTPVSIKQYPMSQEAKLGIKPHIQRLLDQGILVPCQSPWNTPLLPVKKPGTNDYRPVQDLREVNKRVEDIHPTVPNPYNLLSGLPPSHRWYTVLDLKDAFFCLRLHPTSQPLFAFEWRDPGMGISGQLTWTRLPQGFKNSPTLFNEALHRDLADFRIQHPDLILLQYVDDILLAATSELDCQQGTRALLLTLGNLGYRASAKKAQLCQKQVKYLGYLLKEGQRWLTEARKETVMGQPTPKTPRQLREFLGKAGFCRLFIPGFAEMAAPLYPLTKPGTLFNWGPDQQKAYQEIKQALLTAPALGLPDLTKPFELFVDEKQGYAKGVLTQKLGPWRRPVAYLSKKLDPVAAGWPPCLRMVAAIAVLRKDAGKLTMGQPLVILAPHAVEALVKQPPDRWLSNARMTHYQAMLLDTDRVQFGPVVALNPATLLPLPEEGAPHDCLEILAETHGTRPDLTDQPIPDADHTWYTDGSSFLQEGQRKAGAAVTTETEVIWARALPAGTSAQRAELIALTQALKMAEGKRLNVYTDSRYAFATAHIHGEIYRRRGWLTSEGREIKNKSEILALLKALFLPKRLSIIHCLGHQKGDSAEARGNRLADQAAREAAIKTPPDTSTLLAGKRTADGSEFEKRTADGSEFESPKKKAKVE

SEQ ID NO: 1865 - protein, 2105 aa, synthetic construct
MPAAKRVKLDGGDKKYSIGLDIGTNSVGWAVITDEYKVPSKKFKVLGNTDRHSIKKNLIGALLFDSGETAEATRLKRTARRRYTRRKNRICYLQEIFSNEMAKVDDSFFHRLEESFLVEEDKKHERHPIFGNIVDEVAYHEKYPTIYHLRKKLVDSTDKADLRLIYLALAHMIKFRGHFLIEGDLNPDNSDVDKLFIQLVQTYNQLFEENPINASGVDAKAILSARLSKSRRLENLIAQLPGEKKNGLFGNLIALSLGLTPNFKSNFDLAEDAKLQLSKDTYDDDLDNLLAQIGDQYADLFLAAKNLSDAILLSDILRVNTEITKAPLSASMIKRYDEHHQDLTLLKALVRQQLPEKYKEIFFDQSKNGYAGYIDGGASQEEFYKFIKPILEKMDGTEELLVKLNREDLLRKQRTFDNGSIPHQIHLGELHAILRRQEDFYPFLKDNREKIEKILTFRIPYYVGPLARGNSRFAWMTRKSEETITPWNFEEVVDKGASAQSFIERMTNFDKNLPNEKVLPKHSLLYEYFTVYNELTKVKYVTEGMRKPAFLSGEQKKAIVDLLFKTNRKVTVKQLKEDYFKKIECFDSVEISGVEDRFNASLGTYHDLLKIIKDKDFLDNEENEDILEDIVLTLTLFEDREMIEERLKTYAHLFDDKVMKQLKRRRYTGWGRLSRKLINGIRDKQSGKTILDFLKSDGFANRNFMQLIHDDSLTFKEDIQKAQVSGQGDSLHEHIANLAGSPAIKKGILQTVKVVDELVKVMGRHKPENIVIEMARENQTTQKGQKNSRERMKRIEEGIKELGSQILKEHPVENTQLQNEKLYLYYLQNGRDMYVDQELDINRLSDYDVDHIVPQSFLKDDSIDNKVLTRSDKARGKSDNVPSEEVVKKMKNYWRQLLNAKLITQRKFDNLTKAERGGLSELDKAGFIKRQLVETRQITKHVAQILDSRMNTKYDENDKLIREVKVITLKSKLVSDFRKDFQFYKVREINNYHHAHDAYLNAVVGTALIKKYPKLESEFVYGDYKVYDVRKMIAKSEQEIGKATAKYFFYSNIMNFFKTEITLANGEIRKRPLIETNGETGEIVWDKGRDFATVRKVLSMPQVNIVKKTEVQTGGFSKESILPKRNSDKLIARKKDWDPKKYGGFDSPTVAYSVLVVAKVEKGKSKKLKSVKELLGITIMERSSFEKNPIDFLEAKGYKEVKKDLIIKLPKYSLFELENGRKRMLASAGELQKGNELALPSKYVNFLYLASHYEKLKGSPEDNEQKQLFVEQHKHYLDEIIEQISEFSKRVILADANLDKVLSAYNKHRDKPIREQAENIIHLFTLTNLGAPAAFKYFDTTIDRKRYTSTKEVLDATLIHQSITGLYETRIDLSQLGGDGGEAAAKEAAAKEAAAKEAAAKGGTLNLEDEYRLYETSAEPEVSPGSTWLSDFPQAWAETGGMGLAVRQAPLIIPLKATSTPVSIKQYPMSQEAKLGIKPHIQRLLDQGILVPCQSPWNTPLLPVKKPGTNDYRPVQDLREVNKRVEDIHPTVPNPYNLLSGLPPSHRWYTVLDLKDAFFCLRLHPTSQPLFAFEWRDPGMGISGQLTWTRLPQGFKNSPTLFNEALHRDLADFRIQHPDLILLQYVDDILLAATSELDCQQGTRALLLTLGNLGYRASAKKAQLCQKQVKYLGYLLKEGQRWLTEARKETVMGQPTPKTPRQLREFLGKAGFCRLFIPGFAEMAAPLYPLTKPGTLFNWGPDQQKAYQEIKQALLTAPALGLPDLTKPFELFVDEKQGYAKGVLTQKLGPWRRPVAYLSKKLDPVAAGWPPCLRMVAAIAVLRKDAGKLTMGQPLVILAPHAVEALVKQPPDRWLSNARMTHYQAMLLDTDRVQFGPVVALNPATLLPLPEEGAPHDCLEILAETHGTRPDLTDQPIPDADHTWYTDGSSFLQEGQRKAGAAVTTETEVIWARALPAGTSAQRAELIALTQALKMAEGKRLNVYTDSRYAFATAHIHGEIYRRRGWLTSEGREIKNKSEILALLKALFLPKRLSIIHCLGHQKGDSAEARGNRLADQAAREAAIKTPPDTSTLLAGKRTADGSEFEKRTADGSEFESPKKKAKVE

SEQ ID NO: 1866 - protein, 2096 aa, synthetic construct
MPAAKRVKLDGGDKKYSIGLDIGTNSVGWAVITDEYKVPSKKFKVLGNTDRHSIKKNLIGALLFDSGETAEATRLKRTARRRYTRRKNRICYLQEIFSNEMAKVDDSFFHRLEESFLVEEDKKHERHPIFGNIVDEVAYHEKYPTIYHLRKKLVDSTDKADLRLIYLALAHMIKFRGHFLIEGDLNPDNSDVDKLFIQLVQTYNQLFEENPINASGVDAKAILSARLSKSRRLENLIAQLPGEKKNGLFGNLIALSLGLTPNFKSNFDLAEDAKLQLSKDTYDDDLDNLLAQIGDQYADLFLAAKNLSDAILLSDILRVNTEITKAPLSASMIKRYDEHHQDLTLLKALVRQQLPEKYKEIFFDQSKNGYAGYIDGGASQEEFYKFIKPILEKMDGTEELLVKLNREDLLRKQRTFDNGSIPHQIHLGELHAILRRQEDFYPFLKDNREKIEKILTFRIPYYVGPLARGNSRFAWMTRKSEETITPWNFEEVVDKGASAQSFIERMTNFDKNLPNEKVLPKHSLLYEYFTVYNELTKVKYVTEGMRKPAFLSGEQKKAIVDLLFKTNRKVTVKQLKEDYFKKIECFDSVEISGVEDRFNASLGTYHDLLKIIKDKDFLDNEENEDILEDIVLTLTLFEDREMIEERLKTYAHLFDDKVMKQLKRRRYTGWGRLSRKLINGIRDKQSGKTILDFLKSDGFANRNFMQLIHDDSLTFKEDIQKAQVSGQGDSLHEHIANLAGSPAIKKGILQTVKVVDELVKVMGRHKPENIVIEMARENQTTQKGQKNSRERMKRIEEGIKELGSQILKEHPVENTQLQNEKLYLYYLQNGRDMYVDQELDINRLSDYDVDHIVPQSFLKDDSIDNKVLTRSDKARGKSDNVPSEEVVKKMKNYWRQLLNAKLITQRKFDNLTKAERGGLSELDKAGFIKRQLVETRQITKHVAQILDSRMNTKYDENDKLIREVKVITLKSKLVSDFRKDFQFYKVREINNYHHAHDAYLNAVVGTALIKKYPKLESEFVYGDYKVYDVRKMIAKSEQEIGKATAKYFFYSNIMNFFKTEITLANGEIRKRPLIETNGETGEIVWDKGRDFATVRKVLSMPQVNIVKKTEVQTGGFSKESILPKRNSDKLIARKKDWDPKKYGGFDSPTVAYSVLVVAKVEKGKSKKLKSVKELLGITIMERSSFEKNPIDFLEAKGYKEVKKDLIIKLPKYSLFELENGRKRMLASAGELQKGNELALPSKYVNFLYLASHYEKLKGSPEDNEQKQLFVEQHKHYLDEIIEQISEFSKRVILADANLDKVLSAYNKHRDKPIREQAENIIHLFTLTNLGAPAAFKYFDTTIDRKRYTSTKEVLDATLIHQSITGLYETRIDLSQLGGDGGPAPGGSEAAAKGGTLNLEDEYRLYETSAEPEVSPGSTWLSDFPQAWAETGGMGLAVRQAPLIIPLKATSTPVSIKQYPMSQEAKLGIKPHIQRLLDQGILVPCQSPWNTPLLPVKKPGTNDYRPVQDLREVNKRVEDIHPTVPNPYNLLSGLPPSHRWYTVLDLKDAFFCLRLHPTSQPLFAFEWRDPGMGISGQLTWTRLPQGFKNSPTLFNEALHRDLADFRIQHPDLILLQYVDDILLAATSELDCQQGTRALLLTLGNLGYRASAKKAQLCQKQVKYLGYLLKEGQRWLTEARKETVMGQPTPKTPRQLREFLGKAGFCRLFIPGFAEMAAPLYPLTKPGTLFNWGPDQQKAYQEIKQALLTAPALGLPDLTKPFELFVDEKQGYAKGVLTQKLGPWRRPVAYLSKKLDPVAAGWPPCLRMVAAIAVLRKDAGKLTMGQPLVILAPHAVEALVKQPPDRWLSNARMTHYQAMLLDTDRVQFGPVVALNPATLLPLPEEGAPHDCLEILAETHGTRPDLTDQPIPDADHTWYTDGSSFLQEGQRKAGAAVTTETEVIWARALPAGTSAQRAELIALTQALKMAEGKRLNVYTDSRYAFATAHIHGEIYRRRGWLTSEGREIKNKSEILALLKALFLPKRLSIIHCLGHQKGDSAEARGNRLADQAAREAAIKTPPDTSTLLAGKRTADGSEFEKRTADGSEFESPKKKAKVE

SEQ ID NO: 1867 - protein, 2096 aa, synthetic construct
MPAAKRVKLDGGDKKYSIGLDIGTNSVGWAVITDEYKVPSKKFKVLGNTDRHSIKKNLIGALLFDSGETAEATRLKRTARRRYTRRKNRICYLQEIFSNEMAKVDDSFFHRLEESFLVEEDKKHERHPIFGNIVDEVAYHEKYPTIYHLRKKLVDSTDKADLRLIYLALAHMIKFRGHFLIEGDLNPDNSDVDKLFIQLVQTYNQLFEENPINASGVDAKAILSARLSKSRRLENLIAQLPGEKKNGLFGNLIALSLGLTPNFKSNFDLAEDAKLQLSKDTYDDDLDNLLAQIGDQYADLFLAAKNLSDAILLSDILRVNTEITKAPLSASMIKRYDEHHQDLTLLKALVRQQLPEKYKEIFFDQSKNGYAGYIDGGASQEEFYKFIKPILEKMDGTEELLVKLNREDLLRKQRTFDNGSIPHQIHLGELHAILRRQEDFYPFLKDNREKIEKILTFRIPYYVGPLARGNSRFAWMTRKSEETITPWNFEEVVDKGASAQSFIERMTNFDKNLPNEKVLPKHSLLYEYFTVYNELTKVKYVTEGMRKPAFLSGEQKKAIVDLLFKTNRKVTVKQLKEDYFKKIECFDSVEISGVEDRFNASLGTYHDLLKIIKDKDFLDNEENEDILEDIVLTLTLFEDREMIEERLKTYAHLFDDKVMKQLKRRRYTGWGRLSRKLINGIRDKQSGKTILDFLKSDGFANRNFMQLIHDDSLTFKEDIQKAQVSGQGDSLHEHIANLAGSPAIKKGILQTVKVVDELVKVMGRHKPENIVIEMARENQTTQKGQKNSRERMKRIEEGIKELGSQILKEHPVENTQLQNEKLYLYYLQNGRDMYVDQELDINRLSDYDVDHIVPQSFLKDDSIDNKVLTRSDKARGKSDNVPSEEVVKKMKNYWRQLLNAKLITQRKFDNLTKAERGGLSELDKAGFIKRQLVETRQITKHVAQILDSRMNTKYDENDKLIREVKVITLKSKLVSDFRKDFQFYKVREINNYHHAHDAYLNAVVGTALIKKYPKLESEFVYGDYKVYDVRKMIAKSEQEIGKATAKYFFYSNIMNFFKTEITLANGEIRKRPLIETNGETGEIVWDKGRDFATVRKVLSMPQVNIVKKTEVQTGGFSKESILPKRNSDKLIARKKDWDPKKYGGFDSPTVAYSVLVVAKVEKGKSKKLKSVKELLGITIMERSSFEKNPIDFLEAKGYKEVKKDLIIKLPKYSLFELENGRKRMLASAGELQKGNELALPSKYVNFLYLASHYEKLKGSPEDNEQKQLFVEQHKHYLDEIIEQISEFSKRVILADANLDKVLSAYNKHRDKPIREQAENIIHLFTLTNLGAPAAFKYFDTTIDRKRYTSTKEVLDATLIHQSITGLYETRIDLSQLGGDGGEAAAKGGGPAPGGTLNLEDEYRLYETSAEPEVSPGSTWLSDFPQAWAETGGMGLAVRQAPLIIPLKATSTPVSIKQYPMSQEAKLGIKPHIQRLLDQGILVPCQSPWNTPLLPVKKPGTNDYRPVQDLREVNKRVEDIHPTVPNPYNLLSGLPPSHRWYTVLDLKDAFFCLRLHPTSQPLFAFEWRDPGMGISGQLTWTRLPQGFKNSPTLFNEALHRDLADFRIQHPDLILLQYVDDILLAATSELDCQQGTRALLLTLGNLGYRASAKKAQLCQKQVKYLGYLLKEGQRWLTEARKETVMGQPTPKTPRQLREFLGKAGFCRLFIPGFAEMAAPLYPLTKPGTLFNWGPDQQKAYQEIKQALLTAPALGLPDLTKPFELFVDEKQGYAKGVLTQKLGPWRRPVAYLSKKLDPVAAGWPPCLRMVAAIAVLRKDAGKLTMGQPLVILAPHAVEALVKQPPDRWLSNARMTHYQAMLLDTDRVQFGPVVALNPATLLPLPEEGAPHDCLEILAETHGTRPDLTDQPIPDADHTWYTDGSSFLQEGQRKAGAAVTTETEVIWARALPAGTSAQRAELIALTQALKMAEGKRLNVYTDSRYAFATAHIHGEIYRRRGWLTSEGREIKNKSEILALLKALFLPKRLSIIHCLGHQKGDSAEARGNRLADQAAREAAIKTPPDTSTLLAGKRTADGSEFEKRTADGSEFESPKKKAKVE

SEQ ID NO: 1868 - protein, 2090 aa, synthetic construct
MPAAKRVKLDGGDKKYSIGLDIGTNSVGWAVITDEYKVPSKKFKVLGNTDRHSIKKNLIGALLFDSGETAEATRLKRTARRRYTRRKNRICYLQEIFSNEMAKVDDSFFHRLEESFLVEEDKKHERHPIFGNIVDEVAYHEKYPTIYHLRKKLVDSTDKADLRLIYLALAHMIKFRGHFLIEGDLNPDNSDVDKLFIQLVQTYNQLFEENPINASGVDAKAILSARLSKSRRLENLIAQLPGEKKNGLFGNLIALSLGLTPNFKSNFDLAEDAKLQLSKDTYDDDLDNLLAQIGDQYADLFLAAKNLSDAILLSDILRVNTEITKAPLSASMIKRYDEHHQDLTLLKALVRQQLPEKYKEIFFDQSKNGYAGYIDGGASQEEFYKFIKPILEKMDGTEELLVKLNREDLLRKQRTFDNGSIPHQIHLGELHAILRRQEDFYPFLKDNREKIEKILTFRIPYYVGPLARGNSRFAWMTRKSEETITPWNFEEVVDKGASAQSFIERMTNFDKNLPNEKVLPKHSLLYEYFTVYNELTKVKYVTEGMRKPAFLSGEQKKAIVDLLFKTNRKVTVKQLKEDYFKKIECFDSVEISGVEDRFNASLGTYHDLLKIIKDKDFLDNEENEDILEDIVLTLTLFEDREMIEERLKTYAHLFDDKVMKQLKRRRYTGWGRLSRKLINGIRDKQSGKTILDFLKSDGFANRNFMQLIHDDSLTFKEDIQKAQVSGQGDSLHEHIANLAGSPAIKKGILQTVKVVDELVKVMGRHKPENIVIEMARENQTTQKGQKNSRERMKRIEEGIKELGSQILKEHPVENTQLQNEKLYLYYLQNGRDMYVDQELDINRLSDYDVDHIVPQSFLKDDSIDNKVLTRSDKARGKSDNVPSEEVVKKMKNYWRQLLNAKLITQRKFDNLTKAERGGLSELDKAGFIKRQLVETRQITKHVAQILDSRMNTKYDENDKLIREVKVITLKSKLVSDFRKDFQFYKVREINNYHHAHDAYLNAVVGTALIKKYPKLESEFVYGDYKVYDVRKMIAKSEQEIGKATAKYFFYSNIMNFFKTEITLANGEIRKRPLIETNGETGEIVWDKGRDFATVRKVLSMPQVNIVKKTEVQTGGFSKESILPKRNSDKLIARKKDWDPKKYGGFDSPTVAYSVLVVAKVEKGKSKKLKSVKELLGITIMERSSFEKNPIDFLEAKGYKEVKKDLIIKLPKYSLFELENGRKRMLASAGELQKGNELALPSKYVNFLYLASHYEKLKGSPEDNEQKQLFVEQHKHYLDEIIEQISEFSKRVILADANLDKVLSAYNKHRDKPIREQAENIIHLFTLTNLGAPAAFKYFDTTIDRKRYTSTKEVLDATLIHQSITGLYETRIDLSQLGGDGGEAAAKGGTLNLEDEYRLYETSAEPEVSPGSTWLSDFPQAWAETGGMGLAVRQAPLIIPLKATSTPVSIKQYPMSQEAKLGIKPHIQRLLDQGILVPCQSPWNTPLLPVKKPGTNDYRPVQDLREVNKRVEDIHPTVPNPYNLLSGLPPSHRWYTVLDLKDAFFCLRLHPTSQPLFAFEWRDPGMGISGQLTWTRLPQGFKNSPTLFNEALHRDLADFRIQHPDLILLQYVDDILLAATSELDCQQGTRALLLTLGNLGYRASAKKAQLCQKQVKYLGYLLKEGQRWLTEARKETVMGQPTPKTPRQLREFLGKAGFCRLFIPGFAEMAAPLYPLTKPGTLFNWGPDQQKAYQEIKQALLTAPALGLPDLTKPFELFVDEKQGYAKGVLTQKLGPWRRPVAYLSKKLDPVAAGWPPCLRMVAAIAVLRKDAGKLTMGQPLVILAPHAVEALVKQPPDRWLSNARMTHYQAMLLDTDRVQFGPVVALNPATLLPLPEEGAPHDCLEILAETHGTRPDLTDQPIPDADHTWYTDGSSFLQEGQRKAGAAVTTETEVIWARALPAGTSAQRAELIALTQALKMAEGKRLNVYTDSRYAFATAHIHGEIYRRRGWLTSEGREIKNKSEILALLKALFLPKRLSIIHCLGHQKGDSAEARGNRLADQAAREAAIKTPPDTSTLLAGKRTADGSEFEKRTADGSEFESPKKKAKVE

SEQ ID NO: 1869 - protein, 2096 aa, synthetic construct
MPAAKRVKLDGGDKKYSIGLDIGTNSVGWAVITDEYKVPSKKFKVLGNTDRHSIKKNLIGALLFDSGETAEATRLKRTARRRYTRRKNRICYLQEIFSNEMAKVDDSFFHRLEESFLVEEDKKHERHPIFGNIVDEVAYHEKYPTIYHLRKKLVDSTDKADLRLIYLALAHMIKFRGHFLIEGDLNPDNSDVDKLFIQLVQTYNQLFEENPINASGVDAKAILSARLSKSRRLENLIAQLPGEKKNGLFGNLIALSLGLTPNFKSNFDLAEDAKLQLSKDTYDDDLDNLLAQIGDQYADLFLAAKNLSDAILLSDILRVNTEITKAPLSASMIKRYDEHHQDLTLLKALVRQQLPEKYKEIFFDQSKNGYAGYIDGGASQEEFYKFIKPILEKMDGTEELLVKLNREDLLRKQRTFDNGSIPHQIHLGELHAILRRQEDFYPFLKDNREKIEKILTFRIPYYVGPLARGNSRFAWMTRKSEETITPWNFEEVVDKGASAQSFIERMTNFDKNLPNEKVLPKHSLLYEYFTVYNELTKVKYVTEGMRKPAFLSGEQKKAIVDLLFKTNRKVTVKQLKEDYFKKIECFDSVEISGVEDRFNASLGTYHDLLKIIKDKDFLDNEENEDILEDIVLTLTLFEDREMIEERLKTYAHLFDDKVMKQLKRRRYTGWGRLSRKLINGIRDKQSGKTILDFLKSDGFANRNFMQLIHDDSLTFKEDIQKAQVSGQGDSLHEHIANLAGSPAIKKGILQTVKVVDELVKVMGRHKPENIVIEMARENQTTQKGQKNSRERMKRIEEGIKELGSQILKEHPVENTQLQNEKLYLYYLQNGRDMYVDQELDINRLSDYDVDHIVPQSFLKDDSIDNKVLTRSDKARGKSDNVPSEEVVKKMKNYWRQLLNAKLITQRKFDNLTKAERGGLSELDKAGFIKRQLVETRQITKHVAQILDSRMNTKYDENDKLIREVKVITLKSKLVSDFRKDFQFYKVREINNYHHAHDAYLNAVVGTALIKKYPKLESEFVYGDYKVYDVRKMIAKSEQEIGKATAKYFFYSNIMNFFKTEITLANGEIRKRPLIETNGETGEIVWDKGRDFATVRKVLSMPQVNIVKKTEVQTGGFSKESILPKRNSDKLIARKKDWDPKKYGGFDSPTVAYSVLVVAKVEKGKSKKLKSVKELLGITIMERSSFEKNPIDFLEAKGYKEVKKDLIIKLPKYSLFELENGRKRMLASAGELQKGNELALPSKYVNFLYLASHYEKLKGSPEDNEQKQLFVEQHKHYLDEIIEQISEFSKRVILADANLDKVLSAYNKHRDKPIREQAENIIHLFTLTNLGAPAAFKYFDTTIDRKRYTSTKEVLDATLIHQSITGLYETRIDLSQLGGDGGEAAAKGGGGSSGGTLNLEDEYRLYETSAEPEVSPGSTWLSDFPQAWAETGGMGLAVRQAPLIIPLKATSTPVSIKQYPMSQEAKLGIKPHIQRLLDQGILVPCQSPWNTPLLPVKKPGTNDYRPVQDLREVNKRVEDIHPTVPNPYNLLSGLPPSHRWYTVLDLKDAFFCLRLHPTSQPLFAFEWRDPGMGISGQLTWTRLPQGFKNSPTLFNEALHRDLADFRIQHPDLILLQYVDDILLAATSELDCQQGTRALLLTLGNLGYRASAKKAQLCQKQVKYLGYLLKEGQRWLTEARKETVMGQPTPKTPRQLREFLGKAGFCRLFIPGFAEMAAPLYPLTKPGTLFNWGPDQQKAYQEIKQALLTAPALGLPDLTKPFELFVDEKQGYAKGVLTQKLGPWRRPVAYLSKKLDPVAAGWPPCLRMVAAIAVLRKDAGKLTMGQPLVILAPHAVEALVKQPPDRWLSNARMTHYQAMLLDTDRVQFGPVVALNPATLLPLPEEGAPHDCLEILAETHGTRPDLTDQPIPDADHTWYTDGSSFLQEGQRKAGAAVTTETEVIWARALPAGTSAQRAELIALTQALKMAEGKRLNVYTDSRYAFATAHIHGEIYRRRGWLTSEGREIKNKSEILALLKALFLPKRLSIIHCLGHQKGDSAEARGNRLADQAAREAAIKTPPDTSTLLAGKRTADGSEFEKRTADGSEFESPKKKAKVE

SEQ ID NO: 1870 - protein, 2097 aa, synthetic construct
MPAAKRVKLDGGDKKYSIGLDIGTNSVGWAVITDEYKVPSKKFKVLGNTDRHSIKKNLIGALLFDSGETAEATRLKRTARRRYTRRKNRICYLQEIFSNEMAKVDDSFFHRLEESFLVEEDKKHERHPIFGNIVDEVAYHEKYPTIYHLRKKLVDSTDKADLRLIYLALAHMIKFRGHFLIEGDLNPDNSDVDKLFIQLVQTYNQLFEENPINASGVDAKAILSARLSKSRRLENLIAQLPGEKKNGLFGNLIALSLGLTPNFKSNFDLAEDAKLQLSKDTYDDDLDNLLAQIGDQYADLFLAAKNLSDAILLSDILRVNTEITKAPLSASMIKRYDEHHQDLTLLKALVRQQLPEKYKEIFFDQSKNGYAGYIDGGASQEEFYKFIKPILEKMDGTEELLVKLNREDLLRKQRTFDNGSIPHQIHLGELHAILRRQEDFYPFLKDNREKIEKILTFRIPYYVGPLARGNSRFAWMTRKSEETITPWNFEEVVDKGASAQSFIERMTNFDKNLPNEKVLPKHSLLYEYFTVYNELTKVKYVTEGMRKPAFLSGEQKKAIVDLLFKTNRKVTVKQLKEDYFKKIECFDSVEISGVEDRFNASLGTYHDLLKIIKDKDFLDNEENEDILEDIVLTLTLFEDREMIEERLKTYAHLFDDKVMKQLKRRRYTGWGRLSRKLINGIRDKQSGKTILDFLKSDGFANRNFMQLIHDDSLTFKEDIQKAQVSGQGDSLHEHIANLAGSPAIKKGILQTVKVVDELVKVMGRHKPENIVIEMARENQTTQKGQKNSRERMKRIEEGIKELGSQILKEHPVENTQLQNEKLYLYYLQNGRDMYVDQELDINRLSDYDVDHIVPQSFLKDDSIDNKVLTRSDKARGKSDNVPSEEVVKKMKNYWRQLLNAKLITQRKFDNLTKAERGGLSELDKAGFIKRQLVETRQITKHVAQILDSRMNTKYDENDKLIREVKVITLKSKLVSDFRKDFQFYKVREINNYHHAHDAYLNAVVGTALIKKYPKLESEFVYGDYKVYDVRKMIAKSEQEIGKATAKYFFYSNIMNFFKTEITLANGEIRKRPLIETNGETGEIVWDKGRDFATVRKVLSMPQVNIVKKTEVQTGGFSKESILPKRNSDKLIARKKDWDPKKYGGFDSPTVAYSVLVVAKVEKGKSKKLKSVKELLGITIMERSSFEKNPIDFLEAKGYKEVKKDLIIKLPKYSLFELENGRKRMLASAGELQKGNELALPSKYVNFLYLASHYEKLKGSPEDNEQKQLFVEQHKHYLDEIIEQISEFSKRVILADANLDKVLSAYNKHRDKPIREQAENIIHLFTLTNLGAPAAFKYFDTTIDRKRYTSTKEVLDATLIHQSITGLYETRIDLSQLGGDGGGSAGSAAGSGEFGGTLNLEDEYRLYETSAEPEVSPGSTWLSDFPQAWAETGGMGLAVRQAPLIIPLKATSTPVSIKQYPMSQEAKLGIKPHIQRLLDQGILVPCQSPWNTPLLPVKKPGTNDYRPVQDLREVNKRVEDIHPTVPNPYNLLSGLPPSHRWYTVLDLKDAFFCLRLHPTSQPLFAFEWRDPGMGISGQLTWTRLPQGFKNSPTLFNEALHRDLADFRIQHPDLILLQYVDDILLAATSELDCQQGTRALLLTLGNLGYRASAKKAQLCQKQVKYLGYLLKEGQRWLTEARKETVMGQPTPKTPRQLREFLGKAGFCRLFIPGFAEMAAPLYPLTKPGTLFNWGPDQQKAYQEIKQALLTAPALGLPDLTKPFELFVDEKQGYAKGVLTQKLGPWRRPVAYLSKKLDPVAAGWPPCLRMVAAIAVLRKDAGKLTMGQPLVILAPHAVEALVKQPPDRWLSNARMTHYQAMLLDTDRVQFGPVVALNPATLLPLPEEGAPHDCLEILAETHGTRPDLTDQPIPDADHTWYTDGSSFLQEGQRKAGAAVTTETEVIWARALPAGTSAQRAELIALTQALKMAEGKRLNVYTDSRYAFATAHIHGEIYRRRGWLTSEGREIKNKSEILALLKALFLPKRLSIIHCLGHQKGDSAEARGNRLADQAAREAAIKTPPDTSTLLAGKRTADGSEFEKRTADGSEFESPKKKAKVE

SEQ ID NO: 1871 - protein, 2096 aa, synthetic construct
MPAAKRVKLDGGDKKYSIGLDIGTNSVGWAVITDEYKVPSKKFKVLGNTDRHSIKKNLIGALLFDSGETAEATRLKRTARRRYTRRKNRICYLQEIFSNEMAKVDDSFFHRLEESFLVEEDKKHERHPIFGNIVDEVAYHEKYPTIYHLRKKLVDSTDKADLRLIYLALAHMIKFRGHFLIEGDLNPDNSDVDKLFIQLVQTYNQLFEENPINASGVDAKAILSARLSKSRRLENLIAQLPGEKKNGLFGNLIALSLGLTPNFKSNFDLAEDAKLQLSKDTYDDDLDNLLAQIGDQYADLFLAAKNLSDAILLSDILRVNTEITKAPLSASMIKRYDEHHQDLTLLKALVRQQLPEKYKEIFFDQSKNGYAGYIDGGASQEEFYKFIKPILEKMDGTEELLVKLNREDLLRKQRTFDNGSIPHQIHLGELHAILRRQEDFYPFLKDNREKIEKILTFRIPYYVGPLARGNSRFAWMTRKSEETITPWNFEEVVDKGASAQSFIERMTNFDKNLPNEKVLPKHSLLYEYFTVYNELTKVKYVTEGMRKPAFLSGEQKKAIVDLLFKTNRKVTVKQLKEDYFKKIECFDSVEISGVEDRFNASLGTYHDLLKIIKDKDFLDNEENEDILEDIVLTLTLFEDREMIEERLKTYAHLFDDKVMKQLKRRRYTGWGRLSRKLINGIRDKQSGKTILDFLKSDGFANRNFMQLIHDDSLTFKEDIQKAQVSGQGDSLHEHIANLAGSPAIKKGILQTVKVVDELVKVMGRHKPENIVIEMARENQTTQKGQKNSRERMKRIEEGIKELGSQILKEHPVENTQLQNEKLYLYYLQNGRDMYVDQELDINRLSDYDVDHIVPQSFLKDDSIDNKVLTRSDKARGKSDNVPSEEVVKKMKNYWRQLLNAKLITQRKFDNLTKAERGGLSELDKAGFIKRQLVETRQITKHVAQILDSRMNTKYDENDKLIREVKVITLKSKLVSDFRKDFQFYKVREINNYHHAHDAYLNAVVGTALIKKYPKLESEFVYGDYKVYDVRKMIAKSEQEIGKATAKYFFYSNIMNFFKTEITLANGEIRKRPLIETNGETGEIVWDKGRDFATVRKVLSMPQVNIVKKTEVQTGGFSKESILPKRNSDKLIARKKDWDPKKYGGFDSPTVAYSVLVVAKVEKGKSKKLKSVKELLGITIMERSSFEKNPIDFLEAKGYKEVKKDLIIKLPKYSLFELENGRKRMLASAGELQKGNELALPSKYVNFLYLASHYEKLKGSPEDNEQKQLFVEQHKHYLDEIIEQISEFSKRVILADANLDKVLSAYNKHRDKPIREQAENIIHLFTLTNLGAPAAFKYFDTTIDRKRYTSTKEVLDATLIHQSITGLYETRIDLSQLGGDGGEAAAKPAPGGSGGTLNLEDEYRLYETSAEPEVSPGSTWLSDFPQAWAETGGMGLAVRQAPLIIPLKATSTPVSIKQYPMSQEAKLGIKPHIQRLLDQGILVPCQSPWNTPLLPVKKPGTNDYRPVQDLREVNKRVEDIHPTVPNPYNLLSGLPPSHRWYTVLDLKDAFFCLRLHPTSQPLFAFEWRDPGMGISGQLTWTRLPQGFKNSPTLFNEALHRDLADFRIQHPDLILLQYVDDILLAATSELDCQQGTRALLLTLGNLGYRASAKKAQLCQKQVKYLGYLLKEGQRWLTEARKETVMGQPTPKTPRQLREFLGKAGFCRLFIPGFAEMAAPLYPLTKPGTLFNWGPDQQKAYQEIKQALLTAPALGLPDLTKPFELFVDEKQGYAKGVLTQKLGPWRRPVAYLSKKLDPVAAGWPPCLRMVAAIAVLRKDAGKLTMGQPLVILAPHAVEALVKQPPDRWLSNARMTHYQAMLLDTDRVQFGPVVALNPATLLPLPEEGAPHDCLEILAETHGTRPDLTDQPIPDADHTWYTDGSSFLQEGQRKAGAAVTTETEVIWARALPAGTSAQRAELIALTQALKMAEGKRLNVYTDSRYAFATAHIHGEIYRRRGWLTSEGREIKNKSEILALLKALFLPKRLSIIHCLGHQKGDSAEARGNRLADQAAREAAIKTPPDTSTLLAGKRTADGSEFEKRTADGSEFESPKKKAKVE

SEQ ID NO: 1872 - protein, 2096 aa, synthetic construct
MPAAKRVKLDGGDKKYSIGLDIGTNSVGWAVITDEYKVPSKKFKVLGNTDRHSIKKNLIGALLFDSGETAEATRLKRTARRRYTRRKNRICYLQEIFSNEMAKVDDSFFHRLEESFLVEEDKKHERHPIFGNIVDEVAYHEKYPTIYHLRKKLVDSTDKADLRLIYLALAHMIKFRGHFLIEGDLNPDNSDVDKLFIQLVQTYNQLFEENPINASGVDAKAILSARLSKSRRLENLIAQLPGEKKNGLFGNLIALSLGLTPNFKSNFDLAEDAKLQLSKDTYDDDLDNLLAQIGDQYADLFLAAKNLSDAILLSDILRVNTEITKAPLSASMIKRYDEHHQDLTLLKALVRQQLPEKYKEIFFDQSKNGYAGYIDGGASQEEFYKFIKPILEKMDGTEELLVKLNREDLLRKQRTFDNGSIPHQIHLGELHAILRRQEDFYPFLKDNREKIEKILTFRIPYYVGPLARGNSRFAWMTRKSEETITPWNFEEVVDKGASAQSFIERMTNFDKNLPNEKVLPKHSLLYEYFTVYNELTKVKYVTEGMRKPAFLSGEQKKAIVDLLFKTNRKVTVKQLKEDYFKKIECFDSVEISGVEDRFNASLGTYHDLLKIIKDKDFLDNEENEDILEDIVLTLTLFEDREMIEERLKTYAHLFDDKVMKQLKRRRYTGWGRLSRKLINGIRDKQSGKTILDFLKSDGFANRNFMQLIHDDSLTFKEDIQKAQVSGQGDSLHEHIANLAGSPAIKKGILQTVKVVDELVKVMGRHKPENIVIEMARENQTTQKGQKNSRERMKRIEEGIKELGSQILKEHPVENTQLQNEKLYLYYLQNGRDMYVDQELDINRLSDYDVDHIVPQSFLKDDSIDNKVLTRSDKARGKSDNVPSEEVVKKMKNYWRQLLNAKLITQRKFDNLTKAERGGLSELDKAGFIKRQLVETRQITKHVAQILDSRMNTKYDENDKLIREVKVITLKSKLVSDFRKDFQFYKVREINNYHHAHDAYLNAVVGTALIKKYPKLESEFVYGDYKVYDVRKMIAKSEQEIGKATAKYFFYSNIMNFFKTEITLANGEIRKRPLIETNGETGEIVWDKGRDFATVRKVLSMPQVNIVKKTEVQTGGFSKESILPKRNSDKLIARKKDWDPKKYGGFDSPTVAYSVLVVAKVEKGKSKKLKSVKELLGITIMERSSFEKNPIDFLEAKGYKEVKKDLIIKLPKYSLFELENGRKRMLASAGELQKGNELALPSKYVNFLYLASHYEKLKGSPEDNEQKQLFVEQHKHYLDEIIEQISEFSKRVILADANLDKVLSAYNKHRDKPIREQAENIIHLFTLTNLGAPAAFKYFDTTIDRKRYTSTKEVLDATLIHQSITGLYETRIDLSQLGGDGGEAAAKGSSPAPGGTLNLEDEYRLYETSAEPEVSPGSTWLSDFPQAWAETGGMGLAVRQAPLIIPLKATSTPVSIKQYPMSQEAKLGIKPHIQRLLDQGILVPCQSPWNTPLLPVKKPGTNDYRPVQDLREVNKRVEDIHPTVPNPYNLLSGLPPSHRWYTVLDLKDAFFCLRLHPTSQPLFAFEWRDPGMGISGQLTWTRLPQGFKNSPTLFNEALHRDLADFRIQHPDLILLQYVDDILLAATSELDCQQGTRALLLTLGNLGYRASAKKAQLCQKQVKYLGYLLKEGQRWLTEARKETVMGQPTPKTPRQLREFLGKAGFCRLFIPGFAEMAAPLYPLTKPGTLFNWGPDQQKAYQEIKQALLTAPALGLPDLTKPFELFVDEKQGYAKGVLTQKLGPWRRPVAYLSKKLDPVAAGWPPCLRMVAAIAVLRKDAGKLTMGQPLVILAPHAVEALVKQPPDRWLSNARMTHYQAMLLDTDRVQFGPVVALNPATLLPLPEEGAPHDCLEILAETHGTRPDLTDQPIPDADHTWYTDGSSFLQEGQRKAGAAVTTETEVIWARALPAGTSAQRAELIALTQALKMAEGKRLNVYTDSRYAFATAHIHGEIYRRRGWLTSEGREIKNKSEILALLKALFLPKRLSIIHCLGHQKGDSAEARGNRLADQAAREAAIKTPPDTSTLLAGKRTADGSEFEKRTADGSEFESPKKKAKVE

SEQ ID NO: 1873 - protein, 2091 aa, synthetic construct
MPAAKRVKLDGGDKKYSIGLDIGTNSVGWAVITDEYKVPSKKFKVLGNTDRHSIKKNLIGALLFDSGETAEATRLKRTARRRYTRRKNRICYLQEIFSNEMAKVDDSFFHRLEESFLVEEDKKHERHPIFGNIVDEVAYHEKYPTIYHLRKKLVDSTDKADLRLIYLALAHMIKFRGHFLIEGDLNPDNSDVDKLFIQLVQTYNQLFEENPINASGVDAKAILSARLSKSRRLENLIAQLPGEKKNGLFGNLIALSLGLTPNFKSNFDLAEDAKLQLSKDTYDDDLDNLLAQIGDQYADLFLAAKNLSDAILLSDILRVNTEITKAPLSASMIKRYDEHHQDLTLLKALVRQQLPEKYKEIFFDQSKNGYAGYIDGGASQEEFYKFIKPILEKMDGTEELLVKLNREDLLRKQRTFDNGSIPHQIHLGELHAILRRQEDFYPFLKDNREKIEKILTFRIPYYVGPLARGNSRFAWMTRKSEETITPWNFEEVVDKGASAQSFIERMTNFDKNLPNEKVLPKHSLLYEYFTVYNELTKVKYVTEGMRKPAFLSGEQKKAIVDLLFKTNRKVTVKQLKEDYFKKIECFDSVEISGVEDRFNASLGTYHDLLKIIKDKDFLDNEENEDILEDIVLTLTLFEDREMIEERLKTYAHLFDDKVMKQLKRRRYTGWGRLSRKLINGIRDKQSGKTILDFLKSDGFANRNFMQLIHDDSLTFKEDIQKAQVSGQGDSLHEHIANLAGSPAIKKGILQTVKVVDELVKVMGRHKPENIVIEMARENQTTQKGQKNSRERMKRIEEGIKELGSQILKEHPVENTQLQNEKLYLYYLQNGRDMYVDQELDINRLSDYDVDHIVPQSFLKDDSIDNKVLTRSDKARGKSDNVPSEEVVKKMKNYWRQLLNAKLITQRKFDNLTKAERGGLSELDKAGFIKRQLVETRQITKHVAQILDSRMNTKYDENDKLIREVKVITLKSKLVSDFRKDFQFYKVREINNYHHAHDAYLNAVVGTALIKKYPKLESEFVYGDYKVYDVRKMIAKSEQEIGKATAKYFFYSNIMNFFKTEITLANGEIRKRPLIETNGETGEIVWDKGRDFATVRKVLSMPQVNIVKKTEVQTGGFSKESILPKRNSDKLIARKKDWDPKKYGGFDSPTVAYSVLVVAKVEKGKSKKLKSVKELLGITIMERSSFEKNPIDFLEAKGYKEVKKDLIIKLPKYSLFELENGRKRMLASAGELQKGNELALPSKYVNFLYLASHYEKLKGSPEDNEQKQLFVEQHKHYLDEIIEQISEFSKRVILADANLDKVLSAYNKHRDKPIREQAENIIHLFTLTNLGAPAAFKYFDTTIDRKRYTSTKEVLDATLIHQSITGLYETRIDLSQLGGDGGGGGGGGGGTLNLEDEYRLYETSAEPEVSPGSTWLSDFPQAWAETGGMGLAVRQAPLIIPLKATSTPVSIKQYPMSQEAKLGIKPHIQRLLDQGILVPCQSPWNTPLLPVKKPGTNDYRPVQDLREVNKRVEDIHPTVPNPYNLLSGLPPSHRWYTVLDLKDAFFCLRLHPTSQPLFAFEWRDPGMGISGQLTWTRLPQGFKNSPTLFNEALHRDLADFRIQHPDLILLQYVDDILLAATSELDCQQGTRALLLTLGNLGYRASAKKAQLCQKQVKYLGYLLKEGQRWLTEARKETVMGQPTPKTPRQLREFLGKAGFCRLFIPGFAEMAAPLYPLTKPGTLFNWGPDQQKAYQEIKQALLTAPALGLPDLTKPFELFVDEKQGYAKGVLTQKLGPWRRPVAYLSKKLDPVAAGWPPCLRMVAAIAVLRKDAGKLTMGQPLVILAPHAVEALVKQPPDRWLSNARMTHYQAMLLDTDRVQFGPVVALNPATLLPLPEEGAPHDCLEILAETHGTRPDLTDQPIPDADHTWYTDGSSFLQEGQRKAGAAVTTETEVIWARALPAGTSAQRAELIALTQALKMAEGKRLNVYTDSRYAFATAHIHGEIYRRRGWLTSEGREIKNKSEILALLKALFLPKRLSIIHCLGHQKGDSAEARGNRLADQAAREAAIKTPPDTSTLLAGKRTADGSEFEKRTADGSEFESPKKKAKVE

SEQ ID NO: 1874 - protein, 2094 aa, synthetic construct
MPAAKRVKLDGGDKKYSIGLDIGTNSVGWAVITDEYKVPSKKFKVLGNTDRHSIKKNLIGALLFDSGETAEATRLKRTARRRYTRRKNRICYLQEIFSNEMAKVDDSFFHRLEESFLVEEDKKHERHPIFGNIVDEVAYHEKYPTIYHLRKKLVDSTDKADLRLIYLALAHMIKFRGHFLIEGDLNPDNSDVDKLFIQLVQTYNQLFEENPINASGVDAKAILSARLSKSRRLENLIAQLPGEKKNGLFGNLIALSLGLTPNFKSNFDLAEDAKLQLSKDTYDDDLDNLLAQIGDQYADLFLAAKNLSDAILLSDILRVNTEITKAPLSASMIKRYDEHHQDLTLLKALVRQQLPEKYKEIFFDQSKNGYAGYIDGGASQEEFYKFIKPILEKMDGTEELLVKLNREDLLRKQRTFDNGSIPHQIHLGELHAILRRQEDFYPFLKDNREKIEKILTFRIPYYVGPLARGNSRFAWMTRKSEETITPWNFEEVVDKGASAQSFIERMTNFDKNLPNEKVLPKHSLLYEYFTVYNELTKVKYVTEGMRKPAFLSGEQKKAIVDLLFKTNRKVTVKQLKEDYFKKIECFDSVEISGVEDRFNASLGTYHDLLKIIKDKDFLDNEENEDILEDIVLTLTLFEDREMIEERLKTYAHLFDDKVMKQLKRRRYTGWGRLSRKLINGIRDKQSGKTILDFLKSDGFANRNFMQLIHDDSLTFKEDIQKAQVSGQGDSLHEHIANLAGSPAIKKGILQTVKVVDELVKVMGRHKPENIVIEMARENQTTQKGQKNSRERMKRIEEGIKELGSQILKEHPVENTQLQNEKLYLYYLQNGRDMYVDQELDINRLSDYDVDHIVPQSFLKDDSIDNKVLTRSDKARGKSDNVPSEEVVKKMKNYWRQLLNAKLITQRKFDNLTKAERGGLSELDKAGFIKRQLVETRQITKHVAQILDSRMNTKYDENDKLIREVKVITLKSKLVSDFRKDFQFYKVREINNYHHAHDAYLNAVVGTALIKKYPKLESEFVYGDYKVYDVRKMIAKSEQEIGKATAKYFFYSNIMNFFKTEITLANGEIRKRPLIETNGETGEIVWDKGRDFATVRKVLSMPQVNIVKKTEVQTGGFSKESILPKRNSDKLIARKKDWDPKKYGGFDSPTVAYSVLVVAKVEKGKSKKLKSVKELLGITIMERSSFEKNPIDFLEAKGYKEVKKDLIIKLPKYSLFELENGRKRMLASAGELQKGNELALPSKYVNFLYLASHYEKLKGSPEDNEQKQLFVEQHKHYLDEIIEQISEFSKRVILADANLDKVLSAYNKHRDKPIREQAENIIHLFTLTNLGAPAAFKYFDTTIDRKRYTSTKEVLDATLIHQSITGLYETRIDLSQLGGDGGGSSPAPGGGGGTLNLEDEYRLYETSAEPEVSPGSTWLSDFPQAWAETGGMGLAVRQAPLIIPLKATSTPVSIKQYPMSQEAKLGIKPHIQRLLDQGILVPCQSPWNTPLLPVKKPGTNDYRPVQDLREVNKRVEDIHPTVPNPYNLLSGLPPSHRWYTVLDLKDAFFCLRLHPTSQPLFAFEWRDPGMGISGQLTWTRLPQGFKNSPTLFNEALHRDLADFRIQHPDLILLQYVDDILLAATSELDCQQGTRALLLTLGNLGYRASAKKAQLCQKQVKYLGYLLKEGQRWLTEARKETVMGQPTPKTPRQLREFLGKAGFCRLFIPGFAEMAAPLYPLTKPGTLFNWGPDQQKAYQEIKQALLTAPALGLPDLTKPFELFVDEKQGYAKGVLTQKLGPWRRPVAYLSKKLDPVAAGWPPCLRMVAAIAVLRKDAGKLTMGQPLVILAPHAVEALVKQPPDRWLSNARMTHYQAMLLDTDRVQFGPVVALNPATLLPLPEEGAPHDCLEILAETHGTRPDLTDQPIPDADHTWYTDGSSFLQEGQRKAGAAVTTETEVIWARALPAGTSAQRAELIALTQALKMAEGKRLNVYTDSRYAFATAHIHGEIYRRRGWLTSEGREIKNKSEILALLKALFLPKRLSIIHCLGHQKGDSAEARGNRLADQAAREAAIKTPPDTSTLLAGKRTADGSEFEKRTADGSEFESPKKKAKVE

SEQ ID NO: 1875 - protein, 2096 aa, synthetic construct
MPAAKRVKLDGGDKKYSIGLDIGTNSVGWAVITDEYKVPSKKFKVLGNTDRHSIKKNLIGALLFDSGETAEATRLKRTARRRYTRRKNRICYLQEIFSNEMAKVDDSFFHRLEESFLVEEDKKHERHPIFGNIVDEVAYHEKYPTIYHLRKKLVDSTDKADLRLIYLALAHMIKFRGHFLIEGDLNPDNSDVDKLFIQLVQTYNQLFEENPINASGVDAKAILSARLSKSRRLENLIAQLPGEKKNGLFGNLIALSLGLTPNFKSNFDLAEDAKLQLSKDTYDDDLDNLLAQIGDQYADLFLAAKNLSDAILLSDILRVNTEITKAPLSASMIKRYDEHHQDLTLLKALVRQQLPEKYKEIFFDQSKNGYAGYIDGGASQEEFYKFIKPILEKMDGTEELLVKLNREDLLRKQRTFDNGSIPHQIHLGELHAILRRQEDFYPFLKDNREKIEKILTFRIPYYVGPLARGNSRFAWMTRKSEETITPWNFEEVVDKGASAQSFIERMTNFDKNLPNEKVLPKHSLLYEYFTVYNELTKVKYVTEGMRKPAFLSGEQKKAIVDLLFKTNRKVTVKQLKEDYFKKIECFDSVEISGVEDRFNASLGTYHDLLKIIKDKDFLDNEENEDILEDIVLTLTLFEDREMIEERLKTYAHLFDDKVMKQLKRRRYTGWGRLSRKLINGIRDKQSGKTILDFLKSDGFANRNFMQLIHDDSLTFKEDIQKAQVSGQGDSLHEHIANLAGSPAIKKGILQTVKVVDELVKVMGRHKPENIVIEMARENQTTQKGQKNSRERMKRIEEGIKELGSQILKEHPVENTQLQNEKLYLYYLQNGRDMYVDQELDINRLSDYDVDHIVPQSFLKDDSIDNKVLTRSDKARGKSDNVPSEEVVKKMKNYWRQLLNAKLITQRKFDNLTKAERGGLSELDKAGFIKRQLVETRQITKHVAQILDSRMNTKYDENDKLIREVKVITLKSKLVSDFRKDFQFYKVREINNYHHAHDAYLNAVVGTALIKKYPKLESEFVYGDYKVYDVRKMIAKSEQEIGKATAKYFFYSNIMNFFKTEITLANGEIRKRPLIETNGETGEIVWDKGRDFATVRKVLSMPQVNIVKKTEVQTGGFSKESILPKRNSDKLIARKKDWDPKKYGGFDSPTVAYSVLVVAKVEKGKSKKLKSVKELLGITIMERSSFEKNPIDFLEAKGYKEVKKDLIIKLPKYSLFELENGRKRMLASAGELQKGNELALPSKYVNFLYLASHYEKLKGSPEDNEQKQLFVEQHKHYLDEIIEQISEFSKRVILADANLDKVLSAYNKHRDKPIREQAENIIHLFTLTNLGAPAAFKYFDTTIDRKRYTSTKEVLDATLIHQSITGLYETRIDLSQLGGDGGGSSGGGEAAAKGGTLNLEDEYRLYETSAEPEVSPGSTWLSDFPQAWAETGGMGLAVRQAPLIIPLKATSTPVSIKQYPMSQEAKLGIKPHIQRLLDQGILVPCQSPWNTPLLPVKKPGTNDYRPVQDLREVNKRVEDIHPTVPNPYNLLSGLPPSHRWYTVLDLKDAFFCLRLHPTSQPLFAFEWRDPGMGISGQLTWTRLPQGFKNSPTLFNEALHRDLADFRIQHPDLILLQYVDDILLAATSELDCQQGTRALLLTLGNLGYRASAKKAQLCQKQVKYLGYLLKEGQRWLTEARKETVMGQPTPKTPRQLREFLGKAGFCRLFIPGFAEMAAPLYPLTKPGTLFNWGPDQQKAYQEIKQALLTAPALGLPDLTKPFELFVDEKQGYAKGVLTQKLGPWRRPVAYLSKKLDPVAAGWPPCLRMVAAIAVLRKDAGKLTMGQPLVILAPHAVEALVKQPPDRWLSNARMTHYQAMLLDTDRVQFGPVVALNPATLLPLPEEGAPHDCLEILAETHGTRPDLTDQPIPDADHTWYTDGSSFLQEGQRKAGAAVTTETEVIWARALPAGTSAQRAELIALTQALKMAEGKRLNVYTDSRYAFATAHIHGEIYRRRGWLTSEGREIKNKSEILALLKALFLPKRLSIIHCLGHQKGDSAEARGNRLADQAAREAAIKTPPDTSTLLAGKRTADGSEFEKRTADGSEFESPKKKAKVE

SEQ ID NO: 1876 - protein, 2105 aa, synthetic construct
MPAAKRVKLDGGDKKYSIGLDIGTNSVGWAVITDEYKVPSKKFKVLGNTDRHSIKKNLIGALLFDSGETAEATRLKRTARRRYTRRKNRICYLQEIFSNEMAKVDDSFFHRLEESFLVEEDKKHERHPIFGNIVDEVAYHEKYPTIYHLRKKLVDSTDKADLRLIYLALAHMIKFRGHFLIEGDLNPDNSDVDKLFIQLVQTYNQLFEENPINASGVDAKAILSARLSKSRRLENLIAQLPGEKKNGLFGNLIALSLGLTPNFKSNFDLAEDAKLQLSKDTYDDDLDNLLAQIGDQYADLFLAAKNLSDAILLSDILRVNTEITKAPLSASMIKRYDEHHQDLTLLKALVRQQLPEKYKEIFFDQSKNGYAGYIDGGASQEEFYKFIKPILEKMDGTEELLVKLNREDLLRKQRTFDNGSIPHQIHLGELHAILRRQEDFYPFLKDNREKIEKILTFRIPYYVGPLARGNSRFAWMTRKSEETITPWNFEEVVDKGASAQSFIERMTNFDKNLPNEKVLPKHSLLYEYFTVYNELTKVKYVTEGMRKPAFLSGEQKKAIVDLLFKTNRKVTVKQLKEDYFKKIECFDSVEISGVEDRFNASLGTYHDLLKIIKDKDFLDNEENEDILEDIVLTLTLFEDREMIEERLKTYAHLFDDKVMKQLKRRRYTGWGRLSRKLINGIRDKQSGKTILDFLKSDGFANRNFMQLIHDDSLTFKEDIQKAQVSGQGDSLHEHIANLAGSPAIKKGILQTVKVVDELVKVMGRHKPENIVIEMARENQTTQKGQKNSRERMKRIEEGIKELGSQILKEHPVENTQLQNEKLYLYYLQNGRDMYVDQELDINRLSDYDVDHIVPQSFLKDDSIDNKVLTRSDKARGKSDNVPSEEVVKKMKNYWRQLLNAKLITQRKFDNLTKAERGGLSELDKAGFIKRQLVETRQITKHVAQILDSRMNTKYDENDKLIREVKVITLKSKLVSDFRKDFQFYKVREINNYHHAHDAYLNAVVGTALIKKYPKLESEFVYGDYKVYDVRKMIAKSEQEIGKATAKYFFYSNIMNFFKTEITLANGEIRKRPLIETNGETGEIVWDKGRDFATVRKVLSMPQVNIVKKTEVQTGGFSKESILPKRNSDKLIARKKDWDPKKYGGFDSPTVAYSVLVVAKVEKGKSKKLKSVKELLGITIMERSSFEKNPIDFLEAKGYKEVKKDLIIKLPKYSLFELENGRKRMLASAGELQKGNELALPSKYVNFLYLASHYEKLKGSPEDNEQKQLFVEQHKHYLDEIIEQISEFSKRVILADANLDKVLSAYNKHRDKPIREQAENIIHLFTLTNLGAPAAFKYFDTTIDRKRYTSTKEVLDATLIHQSITGLYETRIDLSQLGGDGGGGGGSGGGGSGGGGSGGGGSGGTLNLEDEYRLYETSAEPEVSPGSTWLSDFPQAWAETGGMGLAVRQAPLIIPLKATSTPVSIKQYPMSQEAKLGIKPHIQRLLDQGILVPCQSPWNTPLLPVKKPGTNDYRPVQDLREVNKRVEDIHPTVPNPYNLLSGLPPSHRWYTVLDLKDAFFCLRLHPTSQPLFAFEWRDPGMGISGQLTWTRLPQGFKNSPTLFNEALHRDLADFRIQHPDLILLQYVDDILLAATSELDCQQGTRALLLTLGNLGYRASAKKAQLCQKQVKYLGYLLKEGQRWLTEARKETVMGQPTPKTPRQLREFLGKAGFCRLFIPGFAEMAAPLYPLTKPGTLFNWGPDQQKAYQEIKQALLTAPALGLPDLTKPFELFVDEKQGYAKGVLTQKLGPWRRPVAYLSKKLDPVAAGWPPCLRMVAAIAVLRKDAGKLTMGQPLVILAPHAVEALVKQPPDRWLSNARMTHYQAMLLDTDRVQFGPVVALNPATLLPLPEEGAPHDCLEILAETHGTRPDLTDQPIPDADHTWYTDGSSFLQEGQRKAGAAVTTETEVIWARALPAGTSAQRAELIALTQALKMAEGKRLNVYTDSRYAFATAHIHGEIYRRRGWLTSEGREIKNKSEILALLKALFLPKRLSIIHCLGHQKGDSAEARGNRLADQAAREAAIKTPPDTSTLLAGKRTADGSEFEKRTADGSEFESPKKKAKVE

SEQ ID NO: 1877 - protein, 2097 aa, synthetic construct
MPAAKRVKLDGGDKKYSIGLDIGTNSVGWAVITDEYKVPSKKFKVLGNTDRHSIKKNLIGALLFDSGETAEATRLKRTARRRYTRRKNRICYLQEIFSNEMAKVDDSFFHRLEESFLVEEDKKHERHPIFGNIVDEVAYHEKYPTIYHLRKKLVDSTDKADLRLIYLALAHMIKFRGHFLIEGDLNPDNSDVDKLFIQLVQTYNQLFEENPINASGVDAKAILSARLSKSRRLENLIAQLPGEKKNGLFGNLIALSLGLTPNFKSNFDLAEDAKLQLSKDTYDDDLDNLLAQIGDQYADLFLAAKNLSDAILLSDILRVNTEITKAPLSASMIKRYDEHHQDLTLLKALVRQQLPEKYKEIFFDQSKNGYAGYIDGGASQEEFYKFIKPILEKMDGTEELLVKLNREDLLRKQRTFDNGSIPHQIHLGELHAILRRQEDFYPFLKDNREKIEKILTFRIPYYVGPLARGNSRFAWMTRKSEETITPWNFEEVVDKGASAQSFIERMTNFDKNLPNEKVLPKHSLLYEYFTVYNELTKVKYVTEGMRKPAFLSGEQKKAIVDLLFKTNRKVTVKQLKEDYFKKIECFDSVEISGVEDRFNASLGTYHDLLKIIKDKDFLDNEENEDILEDIVLTLTLFEDREMIEERLKTYAHLFDDKVMKQLKRRRYTGWGRLSRKLINGIRDKQSGKTILDFLKSDGFANRNFMQLIHDDSLTFKEDIQKAQVSGQGDSLHEHIANLAGSPAIKKGILQTVKVVDELVKVMGRHKPENIVIEMARENQTTQKGQKNSRERMKRIEEGIKELGSQILKEHPVENTQLQNEKLYLYYLQNGRDMYVDQELDINRLSDYDVDHIVPQSFLKDDSIDNKVLTRSDKARGKSDNVPSEEVVKKMKNYWRQLLNAKLITQRKFDNLTKAERGGLSELDKAGFIKRQLVETRQITKHVAQILDSRMNTKYDENDKLIREVKVITLKSKLVSDFRKDFQFYKVREINNYHHAHDAYLNAVVGTALIKKYPKLESEFVYGDYKVYDVRKMIAKSEQEIGKATAKYFFYSNIMNFFKTEITLANGEIRKRPLIETNGETGEIVWDKGRDFATVRKVLSMPQVNIVKKTEVQTGGFSKESILPKRNSDKLIARKKDWDPKKYGGFDSPTVAYSVLVVAKVEKGKSKKLKSVKELLGITIMERSSFEKNPIDFLEAKGYKEVKKDLIIKLPKYSLFELENGRKRMLASAGELQKGNELALPSKYVNFLYLASHYEKLKGSPEDNEQKQLFVEQHKHYLDEIIEQISEFSKRVILADANLDKVLSAYNKHRDKPIREQAENIIHLFTLTNLGAPAAFKYFDTTIDRKRYTSTKEVLDATLIHQSITGLYETRIDLSQLGGDGGGSSGSSGSSGSSGGTLNLEDEYRLYETSAEPEVSPGSTWLSDFPQAWAETGGMGLAVRQAPLIIPLKATSTPVSIKQYPMSQEAKLGIKPHIQRLLDQGILVPCQSPWNTPLLPVKKPGTNDYRPVQDLREVNKRVEDIHPTVPNPYNLLSGLPPSHRWYTVLDLKDAFFCLRLHPTSQPLFAFEWRDPGMGISGQLTWTRLPQGFKNSPTLFNEALHRDLADFRIQHPDLILLQYVDDILLAATSELDCQQGTRALLLTLGNLGYRASAKKAQLCQKQVKYLGYLLKEGQRWLTEARKETVMGQPTPKTPRQLREFLGKAGFCRLFIPGFAEMAAPLYPLTKPGTLFNWGPDQQKAYQEIKQALLTAPALGLPDLTKPFELFVDEKQGYAKGVLTQKLGPWRRPVAYLSKKLDPVAAGWPPCLRMVAAIAVLRKDAGKLTMGQPLVILAPHAVEALVKQPPDRWLSNARMTHYQAMLLDTDRVQFGPVVALNPATLLPLPEEGAPHDCLEILAETHGTRPDLTDQPIPDADHTWYTDGSSFLQEGQRKAGAAVTTETEVIWARALPAGTSAQRAELIALTQALKMAEGKRLNVYTDSRYAFATAHIHGEIYRRRGWLTSEGREIKNKSEILALLKALFLPKRLSIIHCLGHQKGDSAEARGNRLADQAAREAAIKTPPDTSTLLAGKRTADGSEFEKRTADGSEFESPKKKAKVE

SEQ ID NO: 1878 - protein, 2096 aa, synthetic construct
MPAAKRVKLDGGDKKYSIGLDIGTNSVGWAVITDEYKVPSKKFKVLGNTDRHSIKKNLIGALLFDSGETAEATRLKRTARRRYTRRKNRICYLQEIFSNEMAKVDDSFFHRLEESFLVEEDKKHERHPIFGNIVDEVAYHEKYPTIYHLRKKLVDSTDKADLRLIYLALAHMIKFRGHFLIEGDLNPDNSDVDKLFIQLVQTYNQLFEENPINASGVDAKAILSARLSKSRRLENLIAQLPGEKKNGLFGNLIALSLGLTPNFKSNFDLAEDAKLQLSKDTYDDDLDNLLAQIGDQYADLFLAAKNLSDAILLSDILRVNTEITKAPLSASMIKRYDEHHQDLTLLKALVRQQLPEKYKEIFFDQSKNGYAGYIDGGASQEEFYKFIKPILEKMDGTEELLVKLNREDLLRKQRTFDNGSIPHQIHLGELHAILRRQEDFYPFLKDNREKIEKILTFRIPYYVGPLARGNSRFAWMTRKSEETITPWNFEEVVDKGASAQSFIERMTNFDKNLPNEKVLPKHSLLYEYFTVYNELTKVKYVTEGMRKPAFLSGEQKKAIVDLLFKTNRKVTVKQLKEDYFKKIECFDSVEISGVEDRFNASLGTYHDLLKIIKDKDFLDNEENEDILEDIVLTLTLFEDREMIEERLKTYAHLFDDKVMKQLKRRRYTGWGRLSRKLINGIRDKQSGKTILDFLKSDGFANRNFMQLIHDDSLTFKEDIQKAQVSGQGDSLHEHIANLAGSPAIKKGILQTVKVVDELVKVMGRHKPENIVIEMARENQTTQKGQKNSRERMKRIEEGIKELGSQILKEHPVENTQLQNEKLYLYYLQNGRDMYVDQELDINRLSDYDVDHIVPQSFLKDDSIDNKVLTRSDKARGKSDNVPSEEVVKKMKNYWRQLLNAKLITQRKFDNLTKAERGGLSELDKAGFIKRQLVETRQITKHVAQILDSRMNTKYDENDKLIREVKVITLKSKLVSDFRKDFQFYKVREINNYHHAHDAYLNAVVGTALIKKYPKLESEFVYGDYKVYDVRKMIAKSEQEIGKATAKYFFYSNIMNFFKTEITLANGEIRKRPLIETNGETGEIVWDKGRDFATVRKVLSMPQVNIVKKTEVQTGGFSKESILPKRNSDKLIARKKDWDPKKYGGFDSPTVAYSVLVVAKVEKGKSKKLKSVKELLGITIMERSSFEKNPIDFLEAKGYKEVKKDLIIKLPKYSLFELENGRKRMLASAGELQKGNELALPSKYVNFLYLASHYEKLKGSPEDNEQKQLFVEQHKHYLDEIIEQISEFSKRVILADANLDKVLSAYNKHRDKPIREQAENIIHLFTLTNLGAPAAFKYFDTTIDRKRYTSTKEVLDATLIHQSITGLYETRIDLSQLGGDGGGGGEAAAKGSSGGTLNLEDEYRLYETSAEPEVSPGSTWLSDFPQAWAETGGMGLAVRQAPLIIPLKATSTPVSIKQYPMSQEAKLGIKPHIQRLLDQGILVPCQSPWNTPLLPVKKPGTNDYRPVQDLREVNKRVEDIHPTVPNPYNLLSGLPPSHRWYTVLDLKDAFFCLRLHPTSQPLFAFEWRDPGMGISGQLTWTRLPQGFKNSPTLFNEALHRDLADFRIQHPDLILLQYVDDILLAATSELDCQQGTRALLLTLGNLGYRASAKKAQLCQKQVKYLGYLLKEGQRWLTEARKETVMGQPTPKTPRQLREFLGKAGFCRLFIPGFAEMAAPLYPLTKPGTLFNWGPDQQKAYQEIKQALLTAPALGLPDLTKPFELFVDEKQGYAKGVLTQKLGPWRRPVAYLSKKLDPVAAGWPPCLRMVAAIAVLRKDAGKLTMGQPLVILAPHAVEALVKQPPDRWLSNARMTHYQAMLLDTDRVQFGPVVALNPATLLPLPEEGAPHDCLEILAETHGTRPDLTDQPIPDADHTWYTDGSSFLQEGQRKAGAAVTTETEVIWARALPAGTSAQRAELIALTQALKMAEGKRLNVYTDSRYAFATAHIHGEIYRRRGWLTSEGREIKNKSEILALLKALFLPKRLSIIHCLGHQKGDSAEARGNRLADQAAREAAIKTPPDTSTLLAGKRTADGSEFEKRTADGSEFESPKKKAKVE

SEQ ID NO: 1879 - protein, 2100 aa, synthetic construct
MPAAKRVKLDGGDKKYSIGLDIGTNSVGWAVITDEYKVPSKKFKVLGNTDRHSIKKNLIGALLFDSGETAEATRLKRTARRRYTRRKNRICYLQEIFSNEMAKVDDSFFHRLEESFLVEEDKKHERHPIFGNIVDEVAYHEKYPTIYHLRKKLVDSTDKADLRLIYLALAHMIKFRGHFLIEGDLNPDNSDVDKLFIQLVQTYNQLFEENPINASGVDAKAILSARLSKSRRLENLIAQLPGEKKNGLFGNLIALSLGLTPNFKSNFDLAEDAKLQLSKDTYDDDLDNLLAQIGDQYADLFLAAKNLSDAILLSDILRVNTEITKAPLSASMIKRYDEHHQDLTLLKALVRQQLPEKYKEIFFDQSKNGYAGYIDGGASQEEFYKFIKPILEKMDGTEELLVKLNREDLLRKQRTFDNGSIPHQIHLGELHAILRRQEDFYPFLKDNREKIEKILTFRIPYYVGPLARGNSRFAWMTRKSEETITPWNFEEVVDKGASAQSFIERMTNFDKNLPNEKVLPKHSLLYEYFTVYNELTKVKYVTEGMRKPAFLSGEQKKAIVDLLFKTNRKVTVKQLKEDYFKKIECFDSVEISGVEDRFNASLGTYHDLLKIIKDKDFLDNEENEDILEDIVLTLTLFEDREMIEERLKTYAHLFDDKVMKQLKRRRYTGWGRLSRKLINGIRDKQSGKTILDFLKSDGFANRNFMQLIHDDSLTFKEDIQKAQVSGQGDSLHEHIANLAGSPAIKKGILQTVKVVDELVKVMGRHKPENIVIEMARENQTTQKGQKNSRERMKRIEEGIKELGSQILKEHPVENTQLQNEKLYLYYLQNGRDMYVDQELDINRLSDYDVDHIVPQSFLKDDSIDNKVLTRSDKARGKSDNVPSEEVVKKMKNYWRQLLNAKLITQRKFDNLTKAERGGLSELDKAGFIKRQLVETRQITKHVAQILDSRMNTKYDENDKLIREVKVITLKSKLVSDFRKDFQFYKVREINNYHHAHDAYLNAVVGTALIKKYPKLESEFVYGDYKVYDVRKMIAKSEQEIGKATAKYFFYSNIMNFFKTEITLANGEIRKRPLIETNGETGEIVWDKGRDFATVRKVLSMPQVNIVKKTEVQTGGFSKESILPKRNSDKLIARKKDWDPKKYGGFDSPTVAYSVLVVAKVEKGKSKKLKSVKELLGITIMERSSFEKNPIDFLEAKGYKEVKKDLIIKLPKYSLFELENGRKRMLASAGELQKGNELALPSKYVNFLYLASHYEKLKGSPEDNEQKQLFVEQHKHYLDEIIEQISEFSKRVILADANLDKVLSAYNKHRDKPIREQAENIIHLFTLTNLGAPAAFKYFDTTIDRKRYTSTKEVLDATLIHQSITGLYETRIDLSQLGGDGGEAAAKEAAAKEAAAKGGTLNLEDEYRLYETSAEPEVSPGSTWLSDFPQAWAETGGMGLAVRQAPLIIPLKATSTPVSIKQYPMSQEAKLGIKPHIQRLLDQGILVPCQSPWNTPLLPVKKPGTNDYRPVQDLREVNKRVEDIHPTVPNPYNLLSGLPPSHRWYTVLDLKDAFFCLRLHPTSQPLFAFEWRDPGMGISGQLTWTRLPQGFKNSPTLFNEALHRDLADFRIQHPDLILLQYVDDILLAATSELDCQQGTRALLLTLGNLGYRASAKKAQLCQKQVKYLGYLLKEGQRWLTEARKETVMGQPTPKTPRQLREFLGKAGFCRLFIPGFAEMAAPLYPLTKPGTLFNWGPDQQKAYQEIKQALLTAPALGLPDLTKPFELFVDEKQGYAKGVLTQKLGPWRRPVAYLSKKLDPVAAGWPPCLRMVAAIAVLRKDAGKLTMGQPLVILAPHAVEALVKQPPDRWLSNARMTHYQAMLLDTDRVQFGPVVALNPATLLPLPEEGAPHDCLEILAETHGTRPDLTDQPIPDADHTWYTDGSSFLQEGQRKAGAAVTTETEVIWARALPAGTSAQRAELIALTQALKMAEGKRLNVYTDSRYAFATAHIHGEIYRRRGWLTSEGREIKNKSEILALLKALFLPKRLSIIHCLGHQKGDSAEARGNRLADQAAREAAIKTPPDTSTLLAGKRTADGSEFEKRTADGSEFESPKKKAKVE

SEQ ID NO: 1880 - protein, 2103 aa, synthetic construct
MPAAKRVKLDGGDKKYSIGLDIGTNSVGWAVITDEYKVPSKKFKVLGNTDRHSIKKNLIGALLFDSGETAEATRLKRTARRRYTRRKNRICYLQEIFSNEMAKVDDSFFHRLEESFLVEEDKKHERHPIFGNIVDEVAYHEKYPTIYHLRKKLVDSTDKADLRLIYLALAHMIKFRGHFLIEGDLNPDNSDVDKLFIQLVQTYNQLFEENPINASGVDAKAILSARLSKSRRLENLIAQLPGEKKNGLFGNLIALSLGLTPNFKSNFDLAEDAKLQLSKDTYDDDLDNLLAQIGDQYADLFLAAKNLSDAILLSDILRVNTEITKAPLSASMIKRYDEHHQDLTLLKALVRQQLPEKYKEIFFDQSKNGYAGYIDGGASQEEFYKFIKPILEKMDGTEELLVKLNREDLLRKQRTFDNGSIPHQIHLGELHAILRRQEDFYPFLKDNREKIEKILTFRIPYYVGPLARGNSRFAWMTRKSEETITPWNFEEVVDKGASAQSFIERMTNFDKNLPNEKVLPKHSLLYEYFTVYNELTKVKYVTEGMRKPAFLSGEQKKAIVDLLFKTNRKVTVKQLKEDYFKKIECFDSVEISGVEDRFNASLGTYHDLLKIIKDKDFLDNEENEDILEDIVLTLTLFEDREMIEERLKTYAHLFDDKVMKQLKRRRYTGWGRLSRKLINGIRDKQSGKTILDFLKSDGFANRNFMQLIHDDSLTFKEDIQKAQVSGQGDSLHEHIANLAGSPAIKKGILQTVKVVDELVKVMGRHKPENIVIEMARENQTTQKGQKNSRERMKRIEEGIKELGSQILKEHPVENTQLQNEKLYLYYLQNGRDMYVDQELDINRLSDYDVDHIVPQSFLKDDSIDNKVLTRSDKARGKSDNVPSEEVVKKMKNYWRQLLNAKLITQRKFDNLTKAERGGLSELDKAGFIKRQLVETRQITKHVAQILDSRMNTKYDENDKLIREVKVITLKSKLVSDFRKDFQFYKVREINNYHHAHDAYLNAVVGTALIKKYPKLESEFVYGDYKVYDVRKMIAKSEQEIGKATAKYFFYSNIMNFFKTEITLANGEIRKRPLIETNGETGEIVWDKGRDFATVRKVLSMPQVNIVKKTEVQTGGFSKESILPKRNSDKLIARKKDWDPKKYGGFDSPTVAYSVLVVAKVEKGKSKKLKSVKELLGITIMERSSFEKNPIDFLEAKGYKEVKKDLIIKLPKYSLFELENGRKRMLASAGELQKGNELALPSKYVNFLYLASHYEKLKGSPEDNEQKQLFVEQHKHYLDEIIEQISEFSKRVILADANLDKVLSAYNKHRDKPIREQAENIIHLFTLTNLGAPAAFKYFDTTIDRKRYTSTKEVLDATLIHQSITGLYETRIDLSQLGGDGGGGSGGSGGSGGSGGSGGSGGTLNLEDEYRLYETSAEPEVSPGSTWLSDFPQAWAETGGMGLAVRQAPLIIPLKATSTPVSIKQYPMSQEAKLGIKPHIQRLLDQGILVPCQSPWNTPLLPVKKPGTNDYRPVQDLREVNKRVEDIHPTVPNPYNLLSGLPPSHRWYTVLDLKDAFFCLRLHPTSQPLFAFEWRDPGMGISGQLTWTRLPQGFKNSPTLFNEALHRDLADFRIQHPDLILLQYVDDILLAATSELDCQQGTRALLLTLGNLGYRASAKKAQLCQKQVKYLGYLLKEGQRWLTEARKETVMGQPTPKTPRQLREFLGKAGFCRLFIPGFAEMAAPLYPLTKPGTLFNWGPDQQKAYQEIKQALLTAPALGLPDLTKPFELFVDEKQGYAKGVLTQKLGPWRRPVAYLSKKLDPVAAGWPPCLRMVAAIAVLRKDAGKLTMGQPLVILAPHAVEALVKQPPDRWLSNARMTHYQAMLLDTDRVQFGPVVALNPATLLPLPEEGAPHDCLEILAETHGTRPDLTDQPIPDADHTWYTDGSSFLQEGQRKAGAAVTTETEVIWARALPAGTSAQRAELIALTQALKMAEGKRLNVYTDSRYAFATAHIHGEIYRRRGWLTSEGREIKNKSEILALLKALFLPKRLSIIHCLGHQKGDSAEARGNRLADQAAREAAIKTPPDTSTLLAGKRTADGSEFEKRTADGSEFESPKKKAKVE

SEQ ID NO: 1881 - protein, 2094 aa, synthetic construct
MPAAKRVKLDGGDKKYSIGLDIGTNSVGWAVITDEYKVPSKKFKVLGNTDRHSIKKNLIGALLFDSGETAEATRLKRTARRRYTRRKNRICYLQEIFSNEMAKVDDSFFHRLEESFLVEEDKKHERHPIFGNIVDEVAYHEKYPTIYHLRKKLVDSTDKADLRLIYLALAHMIKFRGHFLIEGDLNPDNSDVDKLFIQLVQTYNQLFEENPINASGVDAKAILSARLSKSRRLENLIAQLPGEKKNGLFGNLIALSLGLTPNFKSNFDLAEDAKLQLSKDTYDDDLDNLLAQIGDQYADLFLAAKNLSDAILLSDILRVNTEITKAPLSASMIKRYDEHHQDLTLLKALVRQQLPEKYKEIFFDQSKNGYAGYIDGGASQEEFYKFIKPILEKMDGTEELLVKLNREDLLRKQRTFDNGSIPHQIHLGELHAILRRQEDFYPFLKDNREKIEKILTFRIPYYVGPLARGNSRFAWMTRKSEETITPWNFEEVVDKGASAQSFIERMTNFDKNLPNEKVLPKHSLLYEYFTVYNELTKVKYVTEGMRKPAFLSGEQKKAIVDLLFKTNRKVTVKQLKEDYFKKIECFDSVEISGVEDRFNASLGTYHDLLKIIKDKDFLDNEENEDILEDIVLTLTLFEDREMIEERLKTYAHLFDDKVMKQLKRRRYTGWGRLSRKLINGIRDKQSGKTILDFLKSDGFANRNFMQLIHDDSLTFKEDIQKAQVSGQGDSLHEHIANLAGSPAIKKGILQTVKVVDELVKVMGRHKPENIVIEMARENQTTQKGQKNSRERMKRIEEGIKELGSQILKEHPVENTQLQNEKLYLYYLQNGRDMYVDQELDINRLSDYDVDHIVPQSFLKDDSIDNKVLTRSDKARGKSDNVPSEEVVKKMKNYWRQLLNAKLITQRKFDNLTKAERGGLSELDKAGFIKRQLVETRQITKHVAQILDSRMNTKYDENDKLIREVKVITLKSKLVSDFRKDFQFYKVREINNYHHAHDAYLNAVVGTALIKKYPKLESEFVYGDYKVYDVRKMIAKSEQEIGKATAKYFFYSNIMNFFKTEITLANGEIRKRPLIETNGETGEIVWDKGRDFATVRKVLSMPQVNIVKKTEVQTGGFSKESILPKRNSDKLIARKKDWDPKKYGGFDSPTVAYSVLVVAKVEKGKSKKLKSVKELLGITIMERSSFEKNPIDFLEAKGYKEVKKDLIIKLPKYSLFELENGRKRMLASAGELQKGNELALPSKYVNFLYLASHYEKLKGSPEDNEQKQLFVEQHKHYLDEIIEQISEFSKRVILADANLDKVLSAYNKHRDKPIREQAENIIHLFTLTNLGAPAAFKYFDTTIDRKRYTSTKEVLDATLIHQSITGLYETRIDLSQLGGDGGPAPAPAPAPGGTLNLEDEYRLYETSAEPEVSPGSTWLSDFPQAWAETGGMGLAVRQAPLIIPLKATSTPVSIKQYPMSQEAKLGIKPHIQRLLDQGILVPCQSPWNTPLLPVKKPGTNDYRPVQDLREVNKRVEDIHPTVPNPYNLLSGLPPSHRWYTVLDLKDAFFCLRLHPTSQPLFAFEWRDPGMGISGQLTWTRLPQGFKNSPTLFNEALHRDLADFRIQHPDLILLQYVDDILLAATSELDCQQGTRALLLTLGNLGYRASAKKAQLCQKQVKYLGYLLKEGQRWLTEARKETVMGQPTPKTPRQLREFLGKAGFCRLFIPGFAEMAAPLYPLTKPGTLFNWGPDQQKAYQEIKQALLTAPALGLPDLTKPFELFVDEKQGYAKGVLTQKLGPWRRPVAYLSKKLDPVAAGWPPCLRMVAAIAVLRKDAGKLTMGQPLVILAPHAVEALVKQPPDRWLSNARMTHYQAMLLDTDRVQFGPVVALNPATLLPLPEEGAPHDCLEILAETHGTRPDLTDQPIPDADHTWYTDGSSFLQEGQRKAGAAVTTETEVIWARALPAGTSAQRAELIALTQALKMAEGKRLNVYTDSRYAFATAHIHGEIYRRRGWLTSEGREIKNKSEILALLKALFLPKRLSIIHCLGHQKGDSAEARGNRLADQAAREAAIKTPPDTSTLLAGKRTADGSEFEKRTADGSEFESPKKKAKVE

SEQ ID NO: 1882 - protein, 2093 aa, synthetic construct
MPAAKRVKLDGGDKKYSIGLDIGTNSVGWAVITDEYKVPSKKFKVLGNTDRHSIKKNLIGALLFDSGETAEATRLKRTARRRYTRRKNRICYLQEIFSNEMAKVDDSFFHRLEESFLVEEDKKHERHPIFGNIVDEVAYHEKYPTIYHLRKKLVDSTDKADLRLIYLALAHMIKFRGHFLIEGDLNPDNSDVDKLFIQLVQTYNQLFEENPINASGVDAKAILSARLSKSRRLENLIAQLPGEKKNGLFGNLIALSLGLTPNFKSNFDLAEDAKLQLSKDTYDDDLDNLLAQIGDQYADLFLAAKNLSDAILLSDILRVNTEITKAPLSASMIKRYDEHHQDLTLLKALVRQQLPEKYKEIFFDQSKNGYAGYIDGGASQEEFYKFIKPILEKMDGTEELLVKLNREDLLRKQRTFDNGSIPHQIHLGELHAILRRQEDFYPFLKDNREKIEKILTFRIPYYVGPLARGNSRFAWMTRKSEETITPWNFEEVVDKGASAQSFIERMTNFDKNLPNEKVLPKHSLLYEYFTVYNELTKVKYVTEGMRKPAFLSGEQKKAIVDLLFKTNRKVTVKQLKEDYFKKIECFDSVEISGVEDRFNASLGTYHDLLKIIKDKDFLDNEENEDILEDIVLTLTLFEDREMIEERLKTYAHLFDDKVMKQLKRRRYTGWGRLSRKLINGIRDKQSGKTILDFLKSDGFANRNFMQLIHDDSLTFKEDIQKAQVSGQGDSLHEHIANLAGSPAIKKGILQTVKVVDELVKVMGRHKPENIVIEMARENQTTQKGQKNSRERMKRIEEGIKELGSQILKEHPVENTQLQNEKLYLYYLQNGRDMYVDQELDINRLSDYDVDHIVPQSFLKDDSIDNKVLTRSDKARGKSDNVPSEEVVKKMKNYWRQLLNAKLITQRKFDNLTKAERGGLSELDKAGFIKRQLVETRQITKHVAQILDSRMNTKYDENDKLIREVKVITLKSKLVSDFRKDFQFYKVREINNYHHAHDAYLNAVVGTALIKKYPKLESEFVYGDYKVYDVRKMIAKSEQEIGKATAKYFFYSNIMNFFKTEITLANGEIRKRPLIETNGETGEIVWDKGRDFATVRKVLSMPQVNIVKKTEVQTGGFSKESILPKRNSDKLIARKKDWDPKKYGGFDSPTVAYSVLVVAKVEKGKSKKLKSVKELLGITIMERSSFEKNPIDFLEAKGYKEVKKDLIIKLPKYSLFELENGRKRMLASAGELQKGNELALPSKYVNFLYLASHYEKLKGSPEDNEQKQLFVEQHKHYLDEIIEQISEFSKRVILADANLDKVLSAYNKHRDKPIREQAENIIHLFTLTNLGAPAAFKYFDTTIDRKRYTSTKEVLDATLIHQSITGLYETRIDLSQLGGDGGEAAAKGGSGGTLNLEDEYRLYETSAEPEVSPGSTWLSDFPQAWAETGGMGLAVRQAPLIIPLKATSTPVSIKQYPMSQEAKLGIKPHIQRLLDQGILVPCQSPWNTPLLPVKKPGTNDYRPVQDLREVNKRVEDIHPTVPNPYNLLSGLPPSHRWYTVLDLKDAFFCLRLHPTSQPLFAFEWRDPGMGISGQLTWTRLPQGFKNSPTLFNEALHRDLADFRIQHPDLILLQYVDDILLAATSELDCQQGTRALLLTLGNLGYRASAKKAQLCQKQVKYLGYLLKEGQRWLTEARKETVMGQPTPKTPRQLREFLGKAGFCRLFIPGFAEMAAPLYPLTKPGTLFNWGPDQQKAYQEIKQALLTAPALGLPDLTKPFELFVDEKQGYAKGVLTQKLGPWRRPVAYLSKKLDPVAAGWPPCLRMVAAIAVLRKDAGKLTMGQPLVILAPHAVEALVKQPPDRWLSNARMTHYQAMLLDTDRVQFGPVVALNPATLLPLPEEGAPHDCLEILAETHGTRPDLTDQPIPDADHTWYTDGSSFLQEGQRKAGAAVTTETEVIWARALPAGTSAQRAELIALTQALKMAEGKRLNVYTDSRYAFATAHIHGEIYRRRGWLTSEGREIKNKSEILALLKALFLPKRLSIIHCLGHQKGDSAEARGNRLADQAAREAAIKTPPDTSTLLAGKRTADGSEFEKRTADGSEFESPKKKAKVE

SEQ ID NO: 1883 - protein, 2094 aa, synthetic construct
MPAAKRVKLDGGDKKYSIGLDIGTNSVGWAVITDEYKVPSKKFKVLGNTDRHSIKKNLIGALLFDSGETAEATRLKRTARRRYTRRKNRICYLQEIFSNEMAKVDDSFFHRLEESFLVEEDKKHERHPIFGNIVDEVAYHEKYPTIYHLRKKLVDSTDKADLRLIYLALAHMIKFRGHFLIEGDLNPDNSDVDKLFIQLVQTYNQLFEENPINASGVDAKAILSARLSKSRRLENLIAQLPGEKKNGLFGNLIALSLGLTPNFKSNFDLAEDAKLQLSKDTYDDDLDNLLAQIGDQYADLFLAAKNLSDAILLSDILRVNTEITKAPLSASMIKRYDEHHQDLTLLKALVRQQLPEKYKEIFFDQSKNGYAGYIDGGASQEEFYKFIKPILEKMDGTEELLVKLNREDLLRKQRTFDNGSIPHQIHLGELHAILRRQEDFYPFLKDNREKIEKILTFRIPYYVGPLARGNSRFAWMTRKSEETITPWNFEEVVDKGASAQSFIERMTNFDKNLPNEKVLPKHSLLYEYFTVYNELTKVKYVTEGMRKPAFLSGEQKKAIVDLLFKTNRKVTVKQLKEDYFKKIECFDSVEISGVEDRFNASLGTYHDLLKIIKDKDFLDNEENEDILEDIVLTLTLFEDREMIEERLKTYAHLFDDKVMKQLKRRRYTGWGRLSRKLINGIRDKQSGKTILDFLKSDGFANRNFMQLIHDDSLTFKEDIQKAQVSGQGDSLHEHIANLAGSPAIKKGILQTVKVVDELVKVMGRHKPENIVIEMARENQTTQKGQKNSRERMKRIEEGIKELGSQILKEHPVENTQLQNEKLYLYYLQNGRDMYVDQELDINRLSDYDVDHIVPQSFLKDDSIDNKVLTRSDKARGKSDNVPSEEVVKKMKNYWRQLLNAKLITQRKFDNLTKAERGGLSELDKAGFIKRQLVETRQITKHVAQILDSRMNTKYDENDKLIREVKVITLKSKLVSDFRKDFQFYKVREINNYHHAHDAYLNAVVGTALIKKYPKLESEFVYGDYKVYDVRKMIAKSEQEIGKATAKYFFYSNIMNFFKTEITLANGEIRKRPLIETNGETGEIVWDKGRDFATVRKVLSMPQVNIVKKTEVQTGGFSKESILPKRNSDKLIARKKDWDPKKYGGFDSPTVAYSVLVVAKVEKGKSKKLKSVKELLGITIMERSSFEKNPIDFLEAKGYKEVKKDLIIKLPKYSLFELENGRKRMLASAGELQKGNELALPSKYVNFLYLASHYEKLKGSPEDNEQKQLFVEQHKHYLDEIIEQISEFSKRVILADANLDKVLSAYNKHRDKPIREQAENIIHLFTLTNLGAPAAFKYFDTTIDRKRYTSTKEVLDATLIHQSITGLYETRIDLSQLGGDGGPAPGSSGGSGGTLNLEDEYRLYETSAEPEVSPGSTWLSDFPQAWAETGGMGLAVRQAPLIIPLKATSTPVSIKQYPMSQEAKLGIKPHIQRLLDQGILVPCQSPWNTPLLPVKKPGTNDYRPVQDLREVNKRVEDIHPTVPNPYNLLSGLPPSHRWYTVLDLKDAFFCLRLHPTSQPLFAFEWRDPGMGISGQLTWTRLPQGFKNSPTLFNEALHRDLADFRIQHPDLILLQYVDDILLAATSELDCQQGTRALLLTLGNLGYRASAKKAQLCQKQVKYLGYLLKEGQRWLTEARKETVMGQPTPKTPRQLREFLGKAGFCRLFIPGFAEMAAPLYPLTKPGTLFNWGPDQQKAYQEIKQALLTAPALGLPDLTKPFELFVDEKQGYAKGVLTQKLGPWRRPVAYLSKKLDPVAAGWPPCLRMVAAIAVLRKDAGKLTMGQPLVILAPHAVEALVKQPPDRWLSNARMTHYQAMLLDTDRVQFGPVVALNPATLLPLPEEGAPHDCLEILAETHGTRPDLTDQPIPDADHTWYTDGSSFLQEGQRKAGAAVTTETEVIWARALPAGTSAQRAELIALTQALKMAEGKRLNVYTDSRYAFATAHIHGEIYRRRGWLTSEGREIKNKSEILALLKALFLPKRLSIIHCLGHQKGDSAEARGNRLADQAAREAAIKTPPDTSTLLAGKRTADGSEFEKRTADGSEFESPKKKAKVE

SEQ ID NO: 1884 - protein, 2094 aa, synthetic construct
MPAAKRVKLDGGDKKYSIGLDIGTNSVGWAVITDEYKVPSKKFKVLGNTDRHSIKKNLIGALLFDSGETAEATRLKRTARRRYTRRKNRICYLQEIFSNEMAKVDDSFFHRLEESFLVEEDKKHERHPIFGNIVDEVAYHEKYPTIYHLRKKLVDSTDKADLRLIYLALAHMIKFRGHFLIEGDLNPDNSDVDKLFIQLVQTYNQLFEENPINASGVDAKAILSARLSKSRRLENLIAQLPGEKKNGLFGNLIALSLGLTPNFKSNFDLAEDAKLQLSKDTYDDDLDNLLAQIGDQYADLFLAAKNLSDAILLSDILRVNTEITKAPLSASMIKRYDEHHQDLTLLKALVRQQLPEKYKEIFFDQSKNGYAGYIDGGASQEEFYKFIKPILEKMDGTEELLVKLNREDLLRKQRTFDNGSIPHQIHLGELHAILRRQEDFYPFLKDNREKIEKILTFRIPYYVGPLARGNSRFAWMTRKSEETITPWNFEEVVDKGASAQSFIERMTNFDKNLPNEKVLPKHSLLYEYFTVYNELTKVKYVTEGMRKPAFLSGEQKKAIVDLLFKTNRKVTVKQLKEDYFKKIECFDSVEISGVEDRFNASLGTYHDLLKIIKDKDFLDNEENEDILEDIVLTLTLFEDREMIEERLKTYAHLFDDKVMKQLKRRRYTGWGRLSRKLINGIRDKQSGKTILDFLKSDGFANRNFMQLIHDDSLTFKEDIQKAQVSGQGDSLHEHIANLAGSPAIKKGILQTVKVVDELVKVMGRHKPENIVIEMARENQTTQKGQKNSRERMKRIEEGIKELGSQILKEHPVENTQLQNEKLYLYYLQNGRDMYVDQELDINRLSDYDVDHIVPQSFLKDDSIDNKVLTRSDKARGKSDNVPSEEVVKKMKNYWRQLLNAKLITQRKFDNLTKAERGGLSELDKAGFIKRQLVETRQITKHVAQILDSRMNTKYDENDKLIREVKVITLKSKLVSDFRKDFQFYKVREINNYHHAHDAYLNAVVGTALIKKYPKLESEFVYGDYKVYDVRKMIAKSEQEIGKATAKYFFYSNIMNFFKTEITLANGEIRKRPLIETNGETGEIVWDKGRDFATVRKVLSMPQVNIVKKTEVQTGGFSKESILPKRNSDKLIARKKDWDPKKYGGFDSPTVAYSVLVVAKVEKGKSKKLKSVKELLGITIMERSSFEKNPIDFLEAKGYKEVKKDLIIKLPKYSLFELENGRKRMLASAGELQKGNELALPSKYVNFLYLASHYEKLKGSPEDNEQKQLFVEQHKHYLDEIIEQISEFSKRVILADANLDKVLSAYNKHRDKPIREQAENIIHLFTLTNLGAPAAFKYFDTTIDRKRYTSTKEVLDATLIHQSITGLYETRIDLSQLGGDGGGGGGSSGGSGGTLNLEDEYRLYETSAEPEVSPGSTWLSDFPQAWAETGGMGLAVRQAPLIIPLKATSTPVSIKQYPMSQEAKLGIKPHIQRLLDQGILVPCQSPWNTPLLPVKKPGTNDYRPVQDLREVNKRVEDIHPTVPNPYNLLSGLPPSHRWYTVLDLKDAFFCLRLHPTSQPLFAFEWRDPGMGISGQLTWTRLPQGFKNSPTLFNEALHRDLADFRIQHPDLILLQYVDDILLAATSELDCQQGTRALLLTLGNLGYRASAKKAQLCQKQVKYLGYLLKEGQRWLTEARKETVMGQPTPKTPRQLREFLGKAGFCRLFIPGFAEMAAPLYPLTKPGTLFNWGPDQQKAYQEIKQALLTAPALGLPDLTKPFELFVDEKQGYAKGVLTQKLGPWRRPVAYLSKKLDPVAAGWPPCLRMVAAIAVLRKDAGKLTMGQPLVILAPHAVEALVKQPPDRWLSNARMTHYQAMLLDTDRVQFGPVVALNPATLLPLPEEGAPHDCLEILAETHGTRPDLTDQPIPDADHTWYTDGSSFLQEGQRKAGAAVTTETEVIWARALPAGTSAQRAELIALTQALKMAEGKRLNVYTDSRYAFATAHIHGEIYRRRGWLTSEGREIKNKSEILALLKALFLPKRLSIIHCLGHQKGDSAEARGNRLADQAAREAAIKTPPDTSTLLAGKRTADGSEFEKRTADGSEFESPKKKAKVE

SEQ ID NO: 1885 - protein, 2090 aa, synthetic construct
MPAAKRVKLDGGDKKYSIGLDIGTNSVGWAVITDEYKVPSKKFKVLGNTDRHSIKKNLIGALLFDSGETAEATRLKRTARRRYTRRKNRICYLQEIFSNEMAKVDDSFFHRLEESFLVEEDKKHERHPIFGNIVDEVAYHEKYPTIYHLRKKLVDSTDKADLRLIYLALAHMIKFRGHFLIEGDLNPDNSDVDKLFIQLVQTYNQLFEENPINASGVDAKAILSARLSKSRRLENLIAQLPGEKKNGLFGNLIALSLGLTPNFKSNFDLAEDAKLQLSKDTYDDDLDNLLAQIGDQYADLFLAAKNLSDAILLSDILRVNTEITKAPLSASMIKRYDEHHQDLTLLKALVRQQLPEKYKEIFFDQSKNGYAGYIDGGASQEEFYKFIKPILEKMDGTEELLVKLNREDLLRKQRTFDNGSIPHQIHLGELHAILRRQEDFYPFLKDNREKIEKILTFRIPYYVGPLARGNSRFAWMTRKSEETITPWNFEEVVDKGASAQSFIERMTNFDKNLPNEKVLPKHSLLYEYFTVYNELTKVKYVTEGMRKPAFLSGEQKKAIVDLLFKTNRKVTVKQLKEDYFKKIECFDSVEISGVEDRFNASLGTYHDLLKIIKDKDFLDNEENEDILEDIVLTLTLFEDREMIEERLKTYAHLFDDKVMKQLKRRRYTGWGRLSRKLINGIRDKQSGKTILDFLKSDGFANRNFMQLIHDDSLTFKEDIQKAQVSGQGDSLHEHIANLAGSPAIKKGILQTVKVVDELVKVMGRHKPENIVIEMARENQTTQKGQKNSRERMKRIEEGIKELGSQILKEHPVENTQLQNEKLYLYYLQNGRDMYVDQELDINRLSDYDVDHIVPQSFLKDDSIDNKVLTRSDKARGKSDNVPSEEVVKKMKNYWRQLLNAKLITQRKFDNLTKAERGGLSELDKAGFIKRQLVETRQITKHVAQILDSRMNTKYDENDKLIREVKVITLKSKLVSDFRKDFQFYKVREINNYHHAHDAYLNAVVGTALIKKYPKLESEFVYGDYKVYDVRKMIAKSEQEIGKATAKYFFYSNIMNFFKTEITLANGEIRKRPLIETNGETGEIVWDKGRDFATVRKVLSMPQVNIVKKTEVQTGGFSKESILPKRNSDKLIARKKDWDPKKYGGFDSPTVAYSVLVVAKVEKGKSKKLKSVKELLGITIMERSSFEKNPIDFLEAKGYKEVKKDLIIKLPKYSLFELENGRKRMLASAGELQKGNELALPSKYVNFLYLASHYEKLKGSPEDNEQKQLFVEQHKHYLDEIIEQISEFSKRVILADANLDKVLSAYNKHRDKPIREQAENIIHLFTLTNLGAPAAFKYFDTTIDRKRYTSTKEVLDATLIHQSITGLYETRIDLSQLGGDGGGGGGSGGTLNLEDEYRLYETSAEPEVSPGSTWLSDFPQAWAETGGMGLAVRQAPLIIPLKATSTPVSIKQYPMSQEAKLGIKPHIQRLLDQGILVPCQSPWNTPLLPVKKPGTNDYRPVQDLREVNKRVEDIHPTVPNPYNLLSGLPPSHRWYTVLDLKDAFFCLRLHPTSQPLFAFEWRDPGMGISGQLTWTRLPQGFKNSPTLFNEALHRDLADFRIQHPDLILLQYVDDILLAATSELDCQQGTRALLLTLGNLGYRASAKKAQLCQKQVKYLGYLLKEGQRWLTEARKETVMGQPTPKTPRQLREFLGKAGFCRLFIPGFAEMAAPLYPLTKPGTLFNWGPDQQKAYQEIKQALLTAPALGLPDLTKPFELFVDEKQGYAKGVLTQKLGPWRRPVAYLSKKLDPVAAGWPPCLRMVAAIAVLRKDAGKLTMGQPLVILAPHAVEALVKQPPDRWLSNARMTHYQAMLLDTDRVQFGPVVALNPATLLPLPEEGAPHDCLEILAETHGTRPDLTDQPIPDADHTWYTDGSSFLQEGQRKAGAAVTTETEVIWARALPAGTSAQRAELIALTQALKMAEGKRLNVYTDSRYAFATAHIHGEIYRRRGWLTSEGREIKNKSEILALLKALFLPKRLSIIHCLGHQKGDSAEARGNRLADQAAREAAIKTPPDTSTLLAGKRTADGSEFEKRTADGSEFESPKKKAKVE

SEQ ID NO: 1886 - protein, 2096 aa, synthetic construct
MPAAKRVKLDGGDKKYSIGLDIGTNSVGWAVITDEYKVPSKKFKVLGNTDRHSIKKNLIGALLFDSGETAEATRLKRTARRRYTRRKNRICYLQEIFSNEMAKVDDSFFHRLEESFLVEEDKKHERHPIFGNIVDEVAYHEKYPTIYHLRKKLVDSTDKADLRLIYLALAHMIKFRGHFLIEGDLNPDNSDVDKLFIQLVQTYNQLFEENPINASGVDAKAILSARLSKSRRLENLIAQLPGEKKNGLFGNLIALSLGLTPNFKSNFDLAEDAKLQLSKDTYDDDLDNLLAQIGDQYADLFLAAKNLSDAILLSDILRVNTEITKAPLSASMIKRYDEHHQDLTLLKALVRQQLPEKYKEIFFDQSKNGYAGYIDGGASQEEFYKFIKPILEKMDGTEELLVKLNREDLLRKQRTFDNGSIPHQIHLGELHAILRRQEDFYPFLKDNREKIEKILTFRIPYYVGPLARGNSRFAWMTRKSEETITPWNFEEVVDKGASAQSFIERMTNFDKNLPNEKVLPKHSLLYEYFTVYNELTKVKYVTEGMRKPAFLSGEQKKAIVDLLFKTNRKVTVKQLKEDYFKKIECFDSVEISGVEDRFNASLGTYHDLLKIIKDKDFLDNEENEDILEDIVLTLTLFEDREMIEERLKTYAHLFDDKVMKQLKRRRYTGWGRLSRKLINGIRDKQSGKTILDFLKSDGFANRNFMQLIHDDSLTFKEDIQKAQVSGQGDSLHEHIANLAGSPAIKKGILQTVKVVDELVKVMGRHKPENIVIEMARENQTTQKGQKNSRERMKRIEEGIKELGSQILKEHPVENTQLQNEKLYLYYLQNGRDMYVDQELDINRLSDYDVDHIVPQSFLKDDSIDNKVLTRSDKARGKSDNVPSEEVVKKMKNYWRQLLNAKLITQRKFDNLTKAERGGLSELDKAGFIKRQLVETRQITKHVAQILDSRMNTKYDENDKLIREVKVITLKSKLVSDFRKDFQFYKVREINNYHHAHDAYLNAVVGTALIKKYPKLESEFVYGDYKVYDVRKMIAKSEQEIGKATAKYFFYSNIMNFFKTEITLANGEIRKRPLIETNGETGEIVWDKGRDFATVRKVLSMPQVNIVKKTEVQTGGFSKESILPKRNSDKLIARKKDWDPKKYGGFDSPTVAYSVLVVAKVEKGKSKKLKSVKELLGITIMERSSFEKNPIDFLEAKGYKEVKKDLIIKLPKYSLFELENGRKRMLASAGELQKGNELALPSKYVNFLYLASHYEKLKGSPEDNEQKQLFVEQHKHYLDEIIEQISEFSKRVILADANLDKVLSAYNKHRDKPIREQAENIIHLFTLTNLGAPAAFKYFDTTIDRKRYTSTKEVLDATLIHQSITGLYETRIDLSQLGGDGGGGGEAAAKPAPGGTLNLEDEYRLYETSAEPEVSPGSTWLSDFPQAWAETGGMGLAVRQAPLIIPLKATSTPVSIKQYPMSQEAKLGIKPHIQRLLDQGILVPCQSPWNTPLLPVKKPGTNDYRPVQDLREVNKRVEDIHPTVPNPYNLLSGLPPSHRWYTVLDLKDAFFCLRLHPTSQPLFAFEWRDPGMGISGQLTWTRLPQGFKNSPTLFNEALHRDLADFRIQHPDLILLQYVDDILLAATSELDCQQGTRALLLTLGNLGYRASAKKAQLCQKQVKYLGYLLKEGQRWLTEARKETVMGQPTPKTPRQLREFLGKAGFCRLFIPGFAEMAAPLYPLTKPGTLFNWGPDQQKAYQEIKQALLTAPALGLPDLTKPFELFVDEKQGYAKGVLTQKLGPWRRPVAYLSKKLDPVAAGWPPCLRMVAAIAVLRKDAGKLTMGQPLVILAPHAVEALVKQPPDRWLSNARMTHYQAMLLDTDRVQFGPVVALNPATLLPLPEEGAPHDCLEILAETHGTRPDLTDQPIPDADHTWYTDGSSFLQEGQRKAGAAVTTETEVIWARALPAGTSAQRAELIALTQALKMAEGKRLNVYTDSRYAFATAHIHGEIYRRRGWLTSEGREIKNKSEILALLKALFLPKRLSIIHCLGHQKGDSAEARGNRLADQAAREAAIKTPPDTSTLLAGKRTADGSEFEKRTADGSEFESPKKKAKVE

SEQ ID NO: 1887 - protein, 2091 aa, synthetic construct
MPAAKRVKLDGGDKKYSIGLDIGTNSVGWAVITDEYKVPSKKFKVLGNTDRHSIKKNLIGALLFDSGETAEATRLKRTARRRYTRRKNRICYLQEIFSNEMAKVDDSFFHRLEESFLVEEDKKHERHPIFGNIVDEVAYHEKYPTIYHLRKKLVDSTDKADLRLIYLALAHMIKFRGHFLIEGDLNPDNSDVDKLFIQLVQTYNQLFEENPINASGVDAKAILSARLSKSRRLENLIAQLPGEKKNGLFGNLIALSLGLTPNFKSNFDLAEDAKLQLSKDTYDDDLDNLLAQIGDQYADLFLAAKNLSDAILLSDILRVNTEITKAPLSASMIKRYDEHHQDLTLLKALVRQQLPEKYKEIFFDQSKNGYAGYIDGGASQEEFYKFIKPILEKMDGTEELLVKLNREDLLRKQRTFDNGSIPHQIHLGELHAILRRQEDFYPFLKDNREKIEKILTFRIPYYVGPLARGNSRFAWMTRKSEETITPWNFEEVVDKGASAQSFIERMTNFDKNLPNEKVLPKHSLLYEYFTVYNELTKVKYVTEGMRKPAFLSGEQKKAIVDLLFKTNRKVTVKQLKEDYFKKIECFDSVEISGVEDRFNASLGTYHDLLKIIKDKDFLDNEENEDILEDIVLTLTLFEDREMIEERLKTYAHLFDDKVMKQLKRRRYTGWGRLSRKLINGIRDKQSGKTILDFLKSDGFANRNFMQLIHDDSLTFKEDIQKAQVSGQGDSLHEHIANLAGSPAIKKGILQTVKVVDELVKVMGRHKPENIVIEMARENQTTQKGQKNSRERMKRIEEGIKELGSQILKEHPVENTQLQNEKLYLYYLQNGRDMYVDQELDINRLSDYDVDHIVPQSFLKDDSIDNKVLTRSDKARGKSDNVPSEEVVKKMKNYWRQLLNAKLITQRKFDNLTKAERGGLSELDKAGFIKRQLVETRQITKHVAQILDSRMNTKYDENDKLIREVKVITLKSKLVSDFRKDFQFYKVREINNYHHAHDAYLNAVVGTALIKKYPKLESEFVYGDYKVYDVRKMIAKSEQEIGKATAKYFFYSNIMNFFKTEITLANGEIRKRPLIETNGETGEIVWDKGRDFATVRKVLSMPQVNIVKKTEVQTGGFSKESILPKRNSDKLIARKKDWDPKKYGGFDSPTVAYSVLVVAKVEKGKSKKLKSVKELLGITIMERSSFEKNPIDFLEAKGYKEVKKDLIIKLPKYSLFELENGRKRMLASAGELQKGNELALPSKYVNFLYLASHYEKLKGSPEDNEQKQLFVEQHKHYLDEIIEQISEFSKRVILADANLDKVLSAYNKHRDKPIREQAENIIHLFTLTNLGAPAAFKYFDTTIDRKRYTSTKEVLDATLIHQSITGLYETRIDLSQLGGDGGGSSPAPGGTLNLEDEYRLYETSAEPEVSPGSTWLSDFPQAWAETGGMGLAVRQAPLIIPLKATSTPVSIKQYPMSQEAKLGIKPHIQRLLDQGILVPCQSPWNTPLLPVKKPGTNDYRPVQDLREVNKRVEDIHPTVPNPYNLLSGLPPSHRWYTVLDLKDAFFCLRLHPTSQPLFAFEWRDPGMGISGQLTWTRLPQGFKNSPTLFNEALHRDLADFRIQHPDLILLQYVDDILLAATSELDCQQGTRALLLTLGNLGYRASAKKAQLCQKQVKYLGYLLKEGQRWLTEARKETVMGQPTPKTPRQLREFLGKAGFCRLFIPGFAEMAAPLYPLTKPGTLFNWGPDQQKAYQEIKQALLTAPALGLPDLTKPFELFVDEKQGYAKGVLTQKLGPWRRPVAYLSKKLDPVAAGWPPCLRMVAAIAVLRKDAGKLTMGQPLVILAPHAVEALVKQPPDRWLSNARMTHYQAMLLDTDRVQFGPVVALNPATLLPLPEEGAPHDCLEILAETHGTRPDLTDQPIPDADHTWYTDGSSFLQEGQRKAGAAVTTETEVIWARALPAGTSAQRAELIALTQALKMAEGKRLNVYTDSRYAFATAHIHGEIYRRRGWLTSEGREIKNKSEILALLKALFLPKRLSIIHCLGHQKGDSAEARGNRLADQAAREAAIKTPPDTSTLLAGKRTADGSEFEKRTADGSEFESPKKKAKVE

SEQ ID NO: 1888 - protein, 2093 aa, synthetic construct
MPAAKRVKLDGGDKKYSIGLDIGTNSVGWAVITDEYKVPSKKFKVLGNTDRHSIKKNLIGALLFDSGETAEATRLKRTARRRYTRRKNRICYLQEIFSNEMAKVDDSFFHRLEESFLVEEDKKHERHPIFGNIVDEVAYHEKYPTIYHLRKKLVDSTDKADLRLIYLALAHMIKFRGHFLIEGDLNPDNSDVDKLFIQLVQTYNQLFEENPINASGVDAKAILSARLSKSRRLENLIAQLPGEKKNGLFGNLIALSLGLTPNFKSNFDLAEDAKLQLSKDTYDDDLDNLLAQIGDQYADLFLAAKNLSDAILLSDILRVNTEITKAPLSASMIKRYDEHHQDLTLLKALVRQQLPEKYKEIFFDQSKNGYAGYIDGGASQEEFYKFIKPILEKMDGTEELLVKLNREDLLRKQRTFDNGSIPHQIHLGELHAILRRQEDFYPFLKDNREKIEKILTFRIPYYVGPLARGNSRFAWMTRKSEETITPWNFEEVVDKGASAQSFIERMTNFDKNLPNEKVLPKHSLLYEYFTVYNELTKVKYVTEGMRKPAFLSGEQKKAIVDLLFKTNRKVTVKQLKEDYFKKIECFDSVEISGVEDRFNASLGTYHDLLKIIKDKDFLDNEENEDILEDIVLTLTLFEDREMIEERLKTYAHLFDDKVMKQLKRRRYTGWGRLSRKLINGIRDKQSGKTILDFLKSDGFANRNFMQLIHDDSLTFKEDIQKAQVSGQGDSLHEHIANLAGSPAIKKGILQTVKVVDELVKVMGRHKPENIVIEMARENQTTQKGQKNSRERMKRIEEGIKELGSQILKEHPVENTQLQNEKLYLYYLQNGRDMYVDQELDINRLSDYDVDHIVPQSFLKDDSIDNKVLTRSDKARGKSDNVPSEEVVKKMKNYWRQLLNAKLITQRKFDNLTKAERGGLSELDKAGFIKRQLVETRQITKHVAQILDSRMNTKYDENDKLIREVKVITLKSKLVSDFRKDFQFYKVREINNYHHAHDAYLNAVVGTALIKKYPKLESEFVYGDYKVYDVRKMIAKSEQEIGKATAKYFFYSNIMNFFKTEITLANGEIRKRPLIETNGETGEIVWDKGRDFATVRKVLSMPQVNIVKKTEVQTGGFSKESILPKRNSDKLIARKKDWDPKKYGGFDSPTVAYSVLVVAKVEKGKSKKLKSVKELLGITIMERSSFEKNPIDFLEAKGYKEVKKDLIIKLPKYSLFELENGRKRMLASAGELQKGNELALPSKYVNFLYLASHYEKLKGSPEDNEQKQLFVEQHKHYLDEIIEQISEFSKRVILADANLDKVLSAYNKHRDKPIREQAENIIHLFTLTNLGAPAAFKYFDTTIDRKRYTSTKEVLDATLIHQSITGLYETRIDLSQLGGDGGEAAAKGGGGGTLNLEDEYRLYETSAEPEVSPGSTWLSDFPQAWAETGGMGLAVRQAPLIIPLKATSTPVSIKQYPMSQEAKLGIKPHIQRLLDQGILVPCQSPWNTPLLPVKKPGTNDYRPVQDLREVNKRVEDIHPTVPNPYNLLSGLPPSHRWYTVLDLKDAFFCLRLHPTSQPLFAFEWRDPGMGISGQLTWTRLPQGFKNSPTLFNEALHRDLADFRIQHPDLILLQYVDDILLAATSELDCQQGTRALLLTLGNLGYRASAKKAQLCQKQVKYLGYLLKEGQRWLTEARKETVMGQPTPKTPRQLREFLGKAGFCRLFIPGFAEMAAPLYPLTKPGTLFNWGPDQQKAYQEIKQALLTAPALGLPDLTKPFELFVDEKQGYAKGVLTQKLGPWRRPVAYLSKKLDPVAAGWPPCLRMVAAIAVLRKDAGKLTMGQPLVILAPHAVEALVKQPPDRWLSNARMTHYQAMLLDTDRVQFGPVVALNPATLLPLPEEGAPHDCLEILAETHGTRPDLTDQPIPDADHTWYTDGSSFLQEGQRKAGAAVTTETEVIWARALPAGTSAQRAELIALTQALKMAEGKRLNVYTDSRYAFATAHIHGEIYRRRGWLTSEGREIKNKSEILALLKALFLPKRLSIIHCLGHQKGDSAEARGNRLADQAAREAAIKTPPDTSTLLAGKRTADGSEFEKRTADGSEFESPKKKAKVE

SEQ ID NO: 1889 - protein, 2096 aa, synthetic construct
MPAAKRVKLDGGDKKYSIGLDIGTNSVGWAVITDEYKVPSKKFKVLGNTDRHSIKKNLIGALLFDSGETAEATRLKRTARRRYTRRKNRICYLQEIFSNEMAKVDDSFFHRLEESFLVEEDKKHERHPIFGNIVDEVAYHEKYPTIYHLRKKLVDSTDKADLRLIYLALAHMIKFRGHFLIEGDLNPDNSDVDKLFIQLVQTYNQLFEENPINASGVDAKAILSARLSKSRRLENLIAQLPGEKKNGLFGNLIALSLGLTPNFKSNFDLAEDAKLQLSKDTYDDDLDNLLAQIGDQYADLFLAAKNLSDAILLSDILRVNTEITKAPLSASMIKRYDEHHQDLTLLKALVRQQLPEKYKEIFFDQSKNGYAGYIDGGASQEEFYKFIKPILEKMDGTEELLVKLNREDLLRKQRTFDNGSIPHQIHLGELHAILRRQEDFYPFLKDNREKIEKILTFRIPYYVGPLARGNSRFAWMTRKSEETITPWNFEEVVDKGASAQSFIERMTNFDKNLPNEKVLPKHSLLYEYFTVYNELTKVKYVTEGMRKPAFLSGEQKKAIVDLLFKTNRKVTVKQLKEDYFKKIECFDSVEISGVEDRFNASLGTYHDLLKIIKDKDFLDNEENEDILEDIVLTLTLFEDREMIEERLKTYAHLFDDKVMKQLKRRRYTGWGRLSRKLINGIRDKQSGKTILDFLKSDGFANRNFMQLIHDDSLTFKEDIQKAQVSGQGDSLHEHIANLAGSPAIKKGILQTVKVVDELVKVMGRHKPENIVIEMARENQTTQKGQKNSRERMKRIEEGIKELGSQILKEHPVENTQLQNEKLYLYYLQNGRDMYVDQELDINRLSDYDVDHIVPQSFLKDDSIDNKVLTRSDKARGKSDNVPSEEVVKKMKNYWRQLLNAKLITQRKFDNLTKAERGGLSELDKAGFIKRQLVETRQITKHVAQILDSRMNTKYDENDKLIREVKVITLKSKLVSDFRKDFQFYKVREINNYHHAHDAYLNAVVGTALIKKYPKLESEFVYGDYKVYDVRKMIAKSEQEIGKATAKYFFYSNIMNFFKTEITLANGEIRKRPLIETNGETGEIVWDKGRDFATVRKVLSMPQVNIVKKTEVQTGGFSKESILPKRNSDKLIARKKDWDPKKYGGFDSPTVAYSVLVVAKVEKGKSKKLKSVKELLGITIMERSSFEKNPIDFLEAKGYKEVKKDLIIKLPKYSLFELENGRKRMLASAGELQKGNELALPSKYVNFLYLASHYEKLKGSPEDNEQKQLFVEQHKHYLDEIIEQISEFSKRVILADANLDKVLSAYNKHRDKPIREQAENIIHLFTLTNLGAPAAFKYFDTTIDRKRYTSTKEVLDATLIHQSITGLYETRIDLSQLGGDGGGGSGSSEAAAKGGTLNLEDEYRLYETSAEPEVSPGSTWLSDFPQAWAETGGMGLAVRQAPLIIPLKATSTPVSIKQYPMSQEAKLGIKPHIQRLLDQGILVPCQSPWNTPLLPVKKPGTNDYRPVQDLREVNKRVEDIHPTVPNPYNLLSGLPPSHRWYTVLDLKDAFFCLRLHPTSQPLFAFEWRDPGMGISGQLTWTRLPQGFKNSPTLFNEALHRDLADFRIQHPDLILLQYVDDILLAATSELDCQQGTRALLLTLGNLGYRASAKKAQLCQKQVKYLGYLLKEGQRWLTEARKETVMGQPTPKTPRQLREFLGKAGFCRLFIPGFAEMAAPLYPLTKPGTLFNWGPDQQKAYQEIKQALLTAPALGLPDLTKPFELFVDEKQGYAKGVLTQKLGPWRRPVAYLSKKLDPVAAGWPPCLRMVAAIAVLRKDAGKLTMGQPLVILAPHAVEALVKQPPDRWLSNARMTHYQAMLLDTDRVQFGPVVALNPATLLPLPEEGAPHDCLEILAETHGTRPDLTDQPIPDADHTWYTDGSSFLQEGQRKAGAAVTTETEVIWARALPAGTSAQRAELIALTQALKMAEGKRLNVYTDSRYAFATAHIHGEIYRRRGWLTSEGREIKNKSEILALLKALFLPKRLSIIHCLGHQKGDSAEARGNRLADQAAREAAIKTPPDTSTLLAGKRTADGSEFEKRTADGSEFESPKKKAKVE

SEQ ID NO: 1890 - protein, 2096 aa, synthetic construct
MPAAKRVKLDGGDKKYSIGLDIGTNSVGWAVITDEYKVPSKKFKVLGNTDRHSIKKNLIGALLFDSGETAEATRLKRTARRRYTRRKNRICYLQEIFSNEMAKVDDSFFHRLEESFLVEEDKKHERHPIFGNIVDEVAYHEKYPTIYHLRKKLVDSTDKADLRLIYLALAHMIKFRGHFLIEGDLNPDNSDVDKLFIQLVQTYNQLFEENPINASGVDAKAILSARLSKSRRLENLIAQLPGEKKNGLFGNLIALSLGLTPNFKSNFDLAEDAKLQLSKDTYDDDLDNLLAQIGDQYADLFLAAKNLSDAILLSDILRVNTEITKAPLSASMIKRYDEHHQDLTLLKALVRQQLPEKYKEIFFDQSKNGYAGYIDGGASQEEFYKFIKPILEKMDGTEELLVKLNREDLLRKQRTFDNGSIPHQIHLGELHAILRRQEDFYPFLKDNREKIEKILTFRIPYYVGPLARGNSRFAWMTRKSEETITPWNFEEVVDKGASAQSFIERMTNFDKNLPNEKVLPKHSLLYEYFTVYNELTKVKYVTEGMRKPAFLSGEQKKAIVDLLFKTNRKVTVKQLKEDYFKKIECFDSVEISGVEDRFNASLGTYHDLLKIIKDKDFLDNEENEDILEDIVLTLTLFEDREMIEERLKTYAHLFDDKVMKQLKRRRYTGWGRLSRKLINGIRDKQSGKTILDFLKSDGFANRNFMQLIHDDSLTFKEDIQKAQVSGQGDSLHEHIANLAGSPAIKKGILQTVKVVDELVKVMGRHKPENIVIEMARENQTTQKGQKNSRERMKRIEEGIKELGSQILKEHPVENTQLQNEKLYLYYLQNGRDMYVDQELDINRLSDYDVDHIVPQSFLKDDSIDNKVLTRSDKARGKSDNVPSEEVVKKMKNYWRQLLNAKLITQRKFDNLTKAERGGLSELDKAGFIKRQLVETRQITKHVAQILDSRMNTKYDENDKLIREVKVITLKSKLVSDFRKDFQFYKVREINNYHHAHDAYLNAVVGTALIKKYPKLESEFVYGDYKVYDVRKMIAKSEQEIGKATAKYFFYSNIMNFFKTEITLANGEIRKRPLIETNGETGEIVWDKGRDFATVRKVLSMPQVNIVKKTEVQTGGFSKESILPKRNSDKLIARKKDWDPKKYGGFDSPTVAYSVLVVAKVEKGKSKKLKSVKELLGITIMERSSFEKNPIDFLEAKGYKEVKKDLIIKLPKYSLFELENGRKRMLASAGELQKGNELALPSKYVNFLYLASHYEKLKGSPEDNEQKQLFVEQHKHYLDEIIEQISEFSKRVILADANLDKVLSAYNKHRDKPIREQAENIIHLFTLTNLGAPAAFKYFDTTIDRKRYTSTKEVLDATLIHQSITGLYETRIDLSQLGGDGGGSSPAPEAAAKGGTLNLEDEYRLYETSAEPEVSPGSTWLSDFPQAWAETGGMGLAVRQAPLIIPLKATSTPVSIKQYPMSQEAKLGIKPHIQRLLDQGILVPCQSPWNTPLLPVKKPGTNDYRPVQDLREVNKRVEDIHPTVPNPYNLLSGLPPSHRWYTVLDLKDAFFCLRLHPTSQPLFAFEWRDPGMGISGQLTWTRLPQGFKNSPTLFNEALHRDLADFRIQHPDLILLQYVDDILLAATSELDCQQGTRALLLTLGNLGYRASAKKAQLCQKQVKYLGYLLKEGQRWLTEARKETVMGQPTPKTPRQLREFLGKAGFCRLFIPGFAEMAAPLYPLTKPGTLFNWGPDQQKAYQEIKQALLTAPALGLPDLTKPFELFVDEKQGYAKGVLTQKLGPWRRPVAYLSKKLDPVAAGWPPCLRMVAAIAVLRKDAGKLTMGQPLVILAPHAVEALVKQPPDRWLSNARMTHYQAMLLDTDRVQFGPVVALNPATLLPLPEEGAPHDCLEILAETHGTRPDLTDQPIPDADHTWYTDGSSFLQEGQRKAGAAVTTETEVIWARALPAGTSAQRAELIALTQALKMAEGKRLNVYTDSRYAFATAHIHGEIYRRRGWLTSEGREIKNKSEILALLKALFLPKRLSIIHCLGHQKGDSAEARGNRLADQAAREAAIKTPPDTSTLLAGKRTADGSEFEKRTADGSEFESPKKKAKVE

SEQ ID NO: 1891 - protein, 2093 aa, synthetic construct
MPAAKRVKLDGGDKKYSIGLDIGTNSVGWAVITDEYKVPSKKFKVLGNTDRHSIKKNLIGALLFDSGETAEATRLKRTARRRYTRRKNRICYLQEIFSNEMAKVDDSFFHRLEESFLVEEDKKHERHPIFGNIVDEVAYHEKYPTIYHLRKKLVDSTDKADLRLIYLALAHMIKFRGHFLIEGDLNPDNSDVDKLFIQLVQTYNQLFEENPINASGVDAKAILSARLSKSRRLENLIAQLPGEKKNGLFGNLIALSLGLTPNFKSNFDLAEDAKLQLSKDTYDDDLDNLLAQIGDQYADLFLAAKNLSDAILLSDILRVNTEITKAPLSASMIKRYDEHHQDLTLLKALVRQQLPEKYKEIFFDQSKNGYAGYIDGGASQEEFYKFIKPILEKMDGTEELLVKLNREDLLRKQRTFDNGSIPHQIHLGELHAILRRQEDFYPFLKDNREKIEKILTFRIPYYVGPLARGNSRFAWMTRKSEETITPWNFEEVVDKGASAQSFIERMTNFDKNLPNEKVLPKHSLLYEYFTVYNELTKVKYVTEGMRKPAFLSGEQKKAIVDLLFKTNRKVTVKQLKEDYFKKIECFDSVEISGVEDRFNASLGTYHDLLKIIKDKDFLDNEENEDILEDIVLTLTLFEDREMIEERLKTYAHLFDDKVMKQLKRRRYTGWGRLSRKLINGIRDKQSGKTILDFLKSDGFANRNFMQLIHDDSLTFKEDIQKAQVSGQGDSLHEHIANLAGSPAIKKGILQTVKVVDELVKVMGRHKPENIVIEMARENQTTQKGQKNSRERMKRIEEGIKELGSQILKEHPVENTQLQNEKLYLYYLQNGRDMYVDQELDINRLSDYDVDHIVPQSFLKDDSIDNKVLTRSDKARGKSDNVPSEEVVKKMKNYWRQLLNAKLITQRKFDNLTKAERGGLSELDKAGFIKRQLVETRQITKHVAQILDSRMNTKYDENDKLIREVKVITLKSKLVSDFRKDFQFYKVREINNYHHAHDAYLNAVVGTALIKKYPKLESEFVYGDYKVYDVRKMIAKSEQEIGKATAKYFFYSNIMNFFKTEITLANGEIRKRPLIETNGETGEIVWDKGRDFATVRKVLSMPQVNIVKKTEVQTGGFSKESILPKRNSDKLIARKKDWDPKKYGGFDSPTVAYSVLVVAKVEKGKSKKLKSVKELLGITIMERSSFEKNPIDFLEAKGYKEVKKDLIIKLPKYSLFELENGRKRMLASAGELQKGNELALPSKYVNFLYLASHYEKLKGSPEDNEQKQLFVEQHKHYLDEIIEQISEFSKRVILADANLDKVLSAYNKHRDKPIREQAENIIHLFTLTNLGAPAAFKYFDTTIDRKRYTSTKEVLDATLIHQSITGLYETRIDLSQLGGDGGGSSEAAAKGGTLNLEDEYRLYETSAEPEVSPGSTWLSDFPQAWAETGGMGLAVRQAPLIIPLKATSTPVSIKQYPMSQEAKLGIKPHIQRLLDQGILVPCQSPWNTPLLPVKKPGTNDYRPVQDLREVNKRVEDIHPTVPNPYNLLSGLPPSHRWYTVLDLKDAFFCLRLHPTSQPLFAFEWRDPGMGISGQLTWTRLPQGFKNSPTLFNEALHRDLADFRIQHPDLILLQYVDDILLAATSELDCQQGTRALLLTLGNLGYRASAKKAQLCQKQVKYLGYLLKEGQRWLTEARKETVMGQPTPKTPRQLREFLGKAGFCRLFIPGFAEMAAPLYPLTKPGTLFNWGPDQQKAYQEIKQALLTAPALGLPDLTKPFELFVDEKQGYAKGVLTQKLGPWRRPVAYLSKKLDPVAAGWPPCLRMVAAIAVLRKDAGKLTMGQPLVILAPHAVEALVKQPPDRWLSNARMTHYQAMLLDTDRVQFGPVVALNPATLLPLPEEGAPHDCLEILAETHGTRPDLTDQPIPDADHTWYTDGSSFLQEGQRKAGAAVTTETEVIWARALPAGTSAQRAELIALTQALKMAEGKRLNVYTDSRYAFATAHIHGEIYRRRGWLTSEGREIKNKSEILALLKALFLPKRLSIIHCLGHQKGDSAEARGNRLADQAAREAAIKTPPDTSTLLAGKRTADGSEFEKRTADGSEFESPKKKAKVE

SEQ ID NO: 1892 - protein, 2094 aa, synthetic construct
MPAAKRVKLDGGDKKYSIGLDIGTNSVGWAVITDEYKVPSKKFKVLGNTDRHSIKKNLIGALLFDSGETAEATRLKRTARRRYTRRKNRICYLQEIFSNEMAKVDDSFFHRLEESFLVEEDKKHERHPIFGNIVDEVAYHEKYPTIYHLRKKLVDSTDKADLRLIYLALAHMIKFRGHFLIEGDLNPDNSDVDKLFIQLVQTYNQLFEENPINASGVDAKAILSARLSKSRRLENLIAQLPGEKKNGLFGNLIALSLGLTPNFKSNFDLAEDAKLQLSKDTYDDDLDNLLAQIGDQYADLFLAAKNLSDAILLSDILRVNTEITKAPLSASMIKRYDEHHQDLTLLKALVRQQLPEKYKEIFFDQSKNGYAGYIDGGASQEEFYKFIKPILEKMDGTEELLVKLNREDLLRKQRTFDNGSIPHQIHLGELHAILRRQEDFYPFLKDNREKIEKILTFRIPYYVGPLARGNSRFAWMTRKSEETITPWNFEEVVDKGASAQSFIERMTNFDKNLPNEKVLPKHSLLYEYFTVYNELTKVKYVTEGMRKPAFLSGEQKKAIVDLLFKTNRKVTVKQLKEDYFKKIECFDSVEISGVEDRFNASLGTYHDLLKIIKDKDFLDNEENEDILEDIVLTLTLFEDREMIEERLKTYAHLFDDKVMKQLKRRRYTGWGRLSRKLINGIRDKQSGKTILDFLKSDGFANRNFMQLIHDDSLTFKEDIQKAQVSGQGDSLHEHIANLAGSPAIKKGILQTVKVVDELVKVMGRHKPENIVIEMARENQTTQKGQKNSRERMKRIEEGIKELGSQILKEHPVENTQLQNEKLYLYYLQNGRDMYVDQELDINRLSDYDVDHIVPQSFLKDDSIDNKVLTRSDKARGKSDNVPSEEVVKKMKNYWRQLLNAKLITQRKFDNLTKAERGGLSELDKAGFIKRQLVETRQITKHVAQILDSRMNTKYDENDKLIREVKVITLKSKLVSDFRKDFQFYKVREINNYHHAHDAYLNAVVGTALIKKYPKLESEFVYGDYKVYDVRKMIAKSEQEIGKATAKYFFYSNIMNFFKTEITLANGEIRKRPLIETNGETGEIVWDKGRDFATVRKVLSMPQVNIVKKTEVQTGGFSKESILPKRNSDKLIARKKDWDPKKYGGFDSPTVAYSVLVVAKVEKGKSKKLKSVKELLGITIMERSSFEKNPIDFLEAKGYKEVKKDLIIKLPKYSLFELENGRKRMLASAGELQKGNELALPSKYVNFLYLASHYEKLKGSPEDNEQKQLFVEQHKHYLDEIIEQISEFSKRVILADANLDKVLSAYNKHRDKPIREQAENIIHLFTLTNLGAPAAFKYFDTTIDRKRYTSTKEVLDATLIHQSITGLYETRIDLSQLGGDGGGGGPAPGGSGGTLNLEDEYRLYETSAEPEVSPGSTWLSDFPQAWAETGGMGLAVRQAPLIIPLKATSTPVSIKQYPMSQEAKLGIKPHIQRLLDQGILVPCQSPWNTPLLPVKKPGTNDYRPVQDLREVNKRVEDIHPTVPNPYNLLSGLPPSHRWYTVLDLKDAFFCLRLHPTSQPLFAFEWRDPGMGISGQLTWTRLPQGFKNSPTLFNEALHRDLADFRIQHPDLILLQYVDDILLAATSELDCQQGTRALLLTLGNLGYRASAKKAQLCQKQVKYLGYLLKEGQRWLTEARKETVMGQPTPKTPRQLREFLGKAGFCRLFIPGFAEMAAPLYPLTKPGTLFNWGPDQQKAYQEIKQALLTAPALGLPDLTKPFELFVDEKQGYAKGVLTQKLGPWRRPVAYLSKKLDPVAAGWPPCLRMVAAIAVLRKDAGKLTMGQPLVILAPHAVEALVKQPPDRWLSNARMTHYQAMLLDTDRVQFGPVVALNPATLLPLPEEGAPHDCLEILAETHGTRPDLTDQPIPDADHTWYTDGSSFLQEGQRKAGAAVTTETEVIWARALPAGTSAQRAELIALTQALKMAEGKRLNVYTDSRYAFATAHIHGEIYRRRGWLTSEGREIKNKSEILALLKALFLPKRLSIIHCLGHQKGDSAEARGNRLADQAAREAAIKTPPDTSTLLAGKRTADGSEFEKRTADGSEFESPKKKAKVE

SEQ ID NO: 1893 - protein, 2094 aa, synthetic construct
MPAAKRVKLDGGDKKYSIGLDIGTNSVGWAVITDEYKVPSKKFKVLGNTDRHSIKKNLIGALLFDSGETAEATRLKRTARRRYTRRKNRICYLQEIFSNEMAKVDDSFFHRLEESFLVEEDKKHERHPIFGNIVDEVAYHEKYPTIYHLRKKLVDSTDKADLRLIYLALAHMIKFRGHFLIEGDLNPDNSDVDKLFIQLVQTYNQLFEENPINASGVDAKAILSARLSKSRRLENLIAQLPGEKKNGLFGNLIALSLGLTPNFKSNFDLAEDAKLQLSKDTYDDDLDNLLAQIGDQYADLFLAAKNLSDAILLSDILRVNTEITKAPLSASMIKRYDEHHQDLTLLKALVRQQLPEKYKEIFFDQSKNGYAGYIDGGASQEEFYKFIKPILEKMDGTEELLVKLNREDLLRKQRTFDNGSIPHQIHLGELHAILRRQEDFYPFLKDNREKIEKILTFRIPYYVGPLARGNSRFAWMTRKSEETITPWNFEEVVDKGASAQSFIERMTNFDKNLPNEKVLPKHSLLYEYFTVYNELTKVKYVTEGMRKPAFLSGEQKKAIVDLLFKTNRKVTVKQLKEDYFKKIECFDSVEISGVEDRFNASLGTYHDLLKIIKDKDFLDNEENEDILEDIVLTLTLFEDREMIEERLKTYAHLFDDKVMKQLKRRRYTGWGRLSRKLINGIRDKQSGKTILDFLKSDGFANRNFMQLIHDDSLTFKEDIQKAQVSGQGDSLHEHIANLAGSPAIKKGILQTVKVVDELVKVMGRHKPENIVIEMARENQTTQKGQKNSRERMKRIEEGIKELGSQILKEHPVENTQLQNEKLYLYYLQNGRDMYVDQELDINRLSDYDVDHIVPQSFLKDDSIDNKVLTRSDKARGKSDNVPSEEVVKKMKNYWRQLLNAKLITQRKFDNLTKAERGGLSELDKAGFIKRQLVETRQITKHVAQILDSRMNTKYDENDKLIREVKVITLKSKLVSDFRKDFQFYKVREINNYHHAHDAYLNAVVGTALIKKYPKLESEFVYGDYKVYDVRKMIAKSEQEIGKATAKYFFYSNIMNFFKTEITLANGEIRKRPLIETNGETGEIVWDKGRDFATVRKVLSMPQVNIVKKTEVQTGGFSKESILPKRNSDKLIARKKDWDPKKYGGFDSPTVAYSVLVVAKVEKGKSKKLKSVKELLGITIMERSSFEKNPIDFLEAKGYKEVKKDLIIKLPKYSLFELENGRKRMLASAGELQKGNELALPSKYVNFLYLASHYEKLKGSPEDNEQKQLFVEQHKHYLDEIIEQISEFSKRVILADANLDKVLSAYNKHRDKPIREQAENIIHLFTLTNLGAPAAFKYFDTTIDRKRYTSTKEVLDATLIHQSITGLYETRIDLSQLGGDGGPAPGGGGSSGGTLNLEDEYRLYETSAEPEVSPGSTWLSDFPQAWAETGGMGLAVRQAPLIIPLKATSTPVSIKQYPMSQEAKLGIKPHIQRLLDQGILVPCQSPWNTPLLPVKKPGTNDYRPVQDLREVNKRVEDIHPTVPNPYNLLSGLPPSHRWYTVLDLKDAFFCLRLHPTSQPLFAFEWRDPGMGISGQLTWTRLPQGFKNSPTLFNEALHRDLADFRIQHPDLILLQYVDDILLAATSELDCQQGTRALLLTLGNLGYRASAKKAQLCQKQVKYLGYLLKEGQRWLTEARKETVMGQPTPKTPRQLREFLGKAGFCRLFIPGFAEMAAPLYPLTKPGTLFNWGPDQQKAYQEIKQALLTAPALGLPDLTKPFELFVDEKQGYAKGVLTQKLGPWRRPVAYLSKKLDPVAAGWPPCLRMVAAIAVLRKDAGKLTMGQPLVILAPHAVEALVKQPPDRWLSNARMTHYQAMLLDTDRVQFGPVVALNPATLLPLPEEGAPHDCLEILAETHGTRPDLTDQPIPDADHTWYTDGSSFLQEGQRKAGAAVTTETEVIWARALPAGTSAQRAELIALTQALKMAEGKRLNVYTDSRYAFATAHIHGEIYRRRGWLTSEGREIKNKSEILALLKALFLPKRLSIIHCLGHQKGDSAEARGNRLADQAAREAAIKTPPDTSTLLAGKRTADGSEFEKRTADGSEFESPKKKAKVE

SEQ ID NO: 1894 - protein, 2094 aa, synthetic construct
MPAAKRVKLDGGDKKYSIGLDIGTNSVGWAVITDEYKVPSKKFKVLGNTDRHSIKKNLIGALLFDSGETAEATRLKRTARRRYTRRKNRICYLQEIFSNEMAKVDDSFFHRLEESFLVEEDKKHERHPIFGNIVDEVAYHEKYPTIYHLRKKLVDSTDKADLRLIYLALAHMIKFRGHFLIEGDLNPDNSDVDKLFIQLVQTYNQLFEENPINASGVDAKAILSARLSKSRRLENLIAQLPGEKKNGLFGNLIALSLGLTPNFKSNFDLAEDAKLQLSKDTYDDDLDNLLAQIGDQYADLFLAAKNLSDAILLSDILRVNTEITKAPLSASMIKRYDEHHQDLTLLKALVRQQLPEKYKEIFFDQSKNGYAGYIDGGASQEEFYKFIKPILEKMDGTEELLVKLNREDLLRKQRTFDNGSIPHQIHLGELHAILRRQEDFYPFLKDNREKIEKILTFRIPYYVGPLARGNSRFAWMTRKSEETITPWNFEEVVDKGASAQSFIERMTNFDKNLPNEKVLPKHSLLYEYFTVYNELTKVKYVTEGMRKPAFLSGEQKKAIVDLLFKTNRKVTVKQLKEDYFKKIECFDSVEISGVEDRFNASLGTYHDLLKIIKDKDFLDNEENEDILEDIVLTLTLFEDREMIEERLKTYAHLFDDKVMKQLKRRRYTGWGRLSRKLINGIRDKQSGKTILDFLKSDGFANRNFMQLIHDDSLTFKEDIQKAQVSGQGDSLHEHIANLAGSPAIKKGILQTVKVVDELVKVMGRHKPENIVIEMARENQTTQKGQKNSRERMKRIEEGIKELGSQILKEHPVENTQLQNEKLYLYYLQNGRDMYVDQELDINRLSDYDVDHIVPQSFLKDDSIDNKVLTRSDKARGKSDNVPSEEVVKKMKNYWRQLLNAKLITQRKFDNLTKAERGGLSELDKAGFIKRQLVETRQITKHVAQILDSRMNTKYDENDKLIREVKVITLKSKLVSDFRKDFQFYKVREINNYHHAHDAYLNAVVGTALIKKYPKLESEFVYGDYKVYDVRKMIAKSEQEIGKATAKYFFYSNIMNFFKTEITLANGEIRKRPLIETNGETGEIVWDKGRDFATVRKVLSMPQVNIVKKTEVQTGGFSKESILPKRNSDKLIARKKDWDPKKYGGFDSPTVAYSVLVVAKVEKGKSKKLKSVKELLGITIMERSSFEKNPIDFLEAKGYKEVKKDLIIKLPKYSLFELENGRKRMLASAGELQKGNELALPSKYVNFLYLASHYEKLKGSPEDNEQKQLFVEQHKHYLDEIIEQISEFSKRVILADANLDKVLSAYNKHRDKPIREQAENIIHLFTLTNLGAPAAFKYFDTTIDRKRYTSTKEVLDATLIHQSITGLYETRIDLSQLGGDGGGGGGGSGSSGGTLNLEDEYRLYETSAEPEVSPGSTWLSDFPQAWAETGGMGLAVRQAPLIIPLKATSTPVSIKQYPMSQEAKLGIKPHIQRLLDQGILVPCQSPWNTPLLPVKKPGTNDYRPVQDLREVNKRVEDIHPTVPNPYNLLSGLPPSHRWYTVLDLKDAFFCLRLHPTSQPLFAFEWRDPGMGISGQLTWTRLPQGFKNSPTLFNEALHRDLADFRIQHPDLILLQYVDDILLAATSELDCQQGTRALLLTLGNLGYRASAKKAQLCQKQVKYLGYLLKEGQRWLTEARKETVMGQPTPKTPRQLREFLGKAGFCRLFIPGFAEMAAPLYPLTKPGTLFNWGPDQQKAYQEIKQALLTAPALGLPDLTKPFELFVDEKQGYAKGVLTQKLGPWRRPVAYLSKKLDPVAAGWPPCLRMVAAIAVLRKDAGKLTMGQPLVILAPHAVEALVKQPPDRWLSNARMTHYQAMLLDTDRVQFGPVVALNPATLLPLPEEGAPHDCLEILAETHGTRPDLTDQPIPDADHTWYTDGSSFLQEGQRKAGAAVTTETEVIWARALPAGTSAQRAELIALTQALKMAEGKRLNVYTDSRYAFATAHIHGEIYRRRGWLTSEGREIKNKSEILALLKALFLPKRLSIIHCLGHQKGDSAEARGNRLADQAAREAAIKTPPDTSTLLAGKRTADGSEFEKRTADGSEFESPKKKAKVE

SEQ ID NO: 1895 - protein, 2091 aa, synthetic construct
MPAAKRVKLDGGDKKYSIGLDIGTNSVGWAVITDEYKVPSKKFKVLGNTDRHSIKKNLIGALLFDSGETAEATRLKRTARRRYTRRKNRICYLQEIFSNEMAKVDDSFFHRLEESFLVEEDKKHERHPIFGNIVDEVAYHEKYPTIYHLRKKLVDSTDKADLRLIYLALAHMIKFRGHFLIEGDLNPDNSDVDKLFIQLVQTYNQLFEENPINASGVDAKAILSARLSKSRRLENLIAQLPGEKKNGLFGNLIALSLGLTPNFKSNFDLAEDAKLQLSKDTYDDDLDNLLAQIGDQYADLFLAAKNLSDAILLSDILRVNTEITKAPLSASMIKRYDEHHQDLTLLKALVRQQLPEKYKEIFFDQSKNGYAGYIDGGASQEEFYKFIKPILEKMDGTEELLVKLNREDLLRKQRTFDNGSIPHQIHLGELHAILRRQEDFYPFLKDNREKIEKILTFRIPYYVGPLARGNSRFAWMTRKSEETITPWNFEEVVDKGASAQSFIERMTNFDKNLPNEKVLPKHSLLYEYFTVYNELTKVKYVTEGMRKPAFLSGEQKKAIVDLLFKTNRKVTVKQLKEDYFKKIECFDSVEISGVEDRFNASLGTYHDLLKIIKDKDFLDNEENEDILEDIVLTLTLFEDREMIEERLKTYAHLFDDKVMKQLKRRRYTGWGRLSRKLINGIRDKQSGKTILDFLKSDGFANRNFMQLIHDDSLTFKEDIQKAQVSGQGDSLHEHIANLAGSPAIKKGILQTVKVVDELVKVMGRHKPENIVIEMARENQTTQKGQKNSRERMKRIEEGIKELGSQILKEHPVENTQLQNEKLYLYYLQNGRDMYVDQELDINRLSDYDVDHIVPQSFLKDDSIDNKVLTRSDKARGKSDNVPSEEVVKKMKNYWRQLLNAKLITQRKFDNLTKAERGGLSELDKAGFIKRQLVETRQITKHVAQILDSRMNTKYDENDKLIREVKVITLKSKLVSDFRKDFQFYKVREINNYHHAHDAYLNAVVGTALIKKYPKLESEFVYGDYKVYDVRKMIAKSEQEIGKATAKYFFYSNIMNFFKTEITLANGEIRKRPLIETNGETGEIVWDKGRDFATVRKVLSMPQVNIVKKTEVQTGGFSKESILPKRNSDKLIARKKDWDPKKYGGFDSPTVAYSVLVVAKVEKGKSKKLKSVKELLGITIMERSSFEKNPIDFLEAKGYKEVKKDLIIKLPKYSLFELENGRKRMLASAGELQKGNELALPSKYVNFLYLASHYEKLKGSPEDNEQKQLFVEQHKHYLDEIIEQISEFSKRVILADANLDKVLSAYNKHRDKPIREQAENIIHLFTLTNLGAPAAFKYFDTTIDRKRYTSTKEVLDATLIHQSITGLYETRIDLSQLGGDGGPAPGGGGGTLNLEDEYRLYETSAEPEVSPGSTWLSDFPQAWAETGGMGLAVRQAPLIIPLKATSTPVSIKQYPMSQEAKLGIKPHIQRLLDQGILVPCQSPWNTPLLPVKKPGTNDYRPVQDLREVNKRVEDIHPTVPNPYNLLSGLPPSHRWYTVLDLKDAFFCLRLHPTSQPLFAFEWRDPGMGISGQLTWTRLPQGFKNSPTLFNEALHRDLADFRIQHPDLILLQYVDDILLAATSELDCQQGTRALLLTLGNLGYRASAKKAQLCQKQVKYLGYLLKEGQRWLTEARKETVMGQPTPKTPRQLREFLGKAGFCRLFIPGFAEMAAPLYPLTKPGTLFNWGPDQQKAYQEIKQALLTAPALGLPDLTKPFELFVDEKQGYAKGVLTQKLGPWRRPVAYLSKKLDPVAAGWPPCLRMVAAIAVLRKDAGKLTMGQPLVILAPHAVEALVKQPPDRWLSNARMTHYQAMLLDTDRVQFGPVVALNPATLLPLPEEGAPHDCLEILAETHGTRPDLTDQPIPDADHTWYTDGSSFLQEGQRKAGAAVTTETEVIWARALPAGTSAQRAELIALTQALKMAEGKRLNVYTDSRYAFATAHIHGEIYRRRGWLTSEGREIKNKSEILALLKALFLPKRLSIIHCLGHQKGDSAEARGNRLADQAAREAAIKTPPDTSTLLAGKRTADGSEFEKRTADGSEFESPKKKAKVE

SEQ ID NO: 1896 - protein, 2115 aa, synthetic construct
MPAAKRVKLDGGDKKYSIGLDIGTNSVGWAVITDEYKVPSKKFKVLGNTDRHSIKKNLIGALLFDSGETAEATRLKRTARRRYTRRKNRICYLQEIFSNEMAKVDDSFFHRLEESFLVEEDKKHERHPIFGNIVDEVAYHEKYPTIYHLRKKLVDSTDKADLRLIYLALAHMIKFRGHFLIEGDLNPDNSDVDKLFIQLVQTYNQLFEENPINASGVDAKAILSARLSKSRRLENLIAQLPGEKKNGLFGNLIALSLGLTPNFKSNFDLAEDAKLQLSKDTYDDDLDNLLAQIGDQYADLFLAAKNLSDAILLSDILRVNTEITKAPLSASMIKRYDEHHQDLTLLKALVRQQLPEKYKEIFFDQSKNGYAGYIDGGASQEEFYKFIKPILEKMDGTEELLVKLNREDLLRKQRTFDNGSIPHQIHLGELHAILRRQEDFYPFLKDNREKIEKILTFRIPYYVGPLARGNSRFAWMTRKSEETITPWNFEEVVDKGASAQSFIERMTNFDKNLPNEKVLPKHSLLYEYFTVYNELTKVKYVTEGMRKPAFLSGEQKKAIVDLLFKTNRKVTVKQLKEDYFKKIECFDSVEISGVEDRFNASLGTYHDLLKIIKDKDFLDNEENEDILEDIVLTLTLFEDREMIEERLKTYAHLFDDKVMKQLKRRRYTGWGRLSRKLINGIRDKQSGKTILDFLKSDGFANRNFMQLIHDDSLTFKEDIQKAQVSGQGDSLHEHIANLAGSPAIKKGILQTVKVVDELVKVMGRHKPENIVIEMARENQTTQKGQKNSRERMKRIEEGIKELGSQILKEHPVENTQLQNEKLYLYYLQNGRDMYVDQELDINRLSDYDVDHIVPQSFLKDDSIDNKVLTRSDKARGKSDNVPSEEVVKKMKNYWRQLLNAKLITQRKFDNLTKAERGGLSELDKAGFIKRQLVETRQITKHVAQILDSRMNTKYDENDKLIREVKVITLKSKLVSDFRKDFQFYKVREINNYHHAHDAYLNAVVGTALIKKYPKLESEFVYGDYKVYDVRKMIAKSEQEIGKATAKYFFYSNIMNFFKTEITLANGEIRKRPLIETNGETGEIVWDKGRDFATVRKVLSMPQVNIVKKTEVQTGGFSKESILPKRNSDKLIARKKDWDPKKYGGFDSPTVAYSVLVVAKVEKGKSKKLKSVKELLGITIMERSSFEKNPIDFLEAKGYKEVKKDLIIKLPKYSLFELENGRKRMLASAGELQKGNELALPSKYVNFLYLASHYEKLKGSPEDNEQKQLFVEQHKHYLDEIIEQISEFSKRVILADANLDKVLSAYNKHRDKPIREQAENIIHLFTLTNLGAPAAFKYFDTTIDRKRYTSTKEVLDATLIHQSITGLYETRIDLSQLGGDGGEAAAKEAAAKEAAAKEAAAKEAAAKEAAAKGGTLNLEDEYRLYETSAEPEVSPGSTWLSDFPQAWAETGGMGLAVRQAPLIIPLKATSTPVSIKQYPMSQEAKLGIKPHIQRLLDQGILVPCQSPWNTPLLPVKKPGTNDYRPVQDLREVNKRVEDIHPTVPNPYNLLSGLPPSHRWYTVLDLKDAFFCLRLHPTSQPLFAFEWRDPGMGISGQLTWTRLPQGFKNSPTLFNEALHRDLADFRIQHPDLILLQYVDDILLAATSELDCQQGTRALLLTLGNLGYRASAKKAQLCQKQVKYLGYLLKEGQRWLTEARKETVMGQPTPKTPRQLREFLGKAGFCRLFIPGFAEMAAPLYPLTKPGTLFNWGPDQQKAYQEIKQALLTAPALGLPDLTKPFELFVDEKQGYAKGVLTQKLGPWRRPVAYLSKKLDPVAAGWPPCLRMVAAIAVLRKDAGKLTMGQPLVILAPHAVEALVKQPPDRWLSNARMTHYQAMLLDTDRVQFGPVVALNPATLLPLPEEGAPHDCLEILAETHGTRPDLTDQPIPDADHTWYTDGSSFLQEGQRKAGAAVTTETEVIWARALPAGTSAQRAELIALTQALKMAEGKRLNVYTDSRYAFATAHIHGEIYRRRGWLTSEGREIKNKSEILALLKALFLPKRLSIIHCLGHQKGDSAEARGNRLADQAAREAAIKTPPDTSTLLAGKRTADGSEFEKRTADGSEFESPKKKAKVE

SEQ ID NO: 1897 - protein, 2091 aa, synthetic construct
MPAAKRVKLDGGDKKYSIGLDIGTNSVGWAVITDEYKVPSKKFKVLGNTDRHSIKKNLIGALLFDSGETAEATRLKRTARRRYTRRKNRICYLQEIFSNEMAKVDDSFFHRLEESFLVEEDKKHERHPIFGNIVDEVAYHEKYPTIYHLRKKLVDSTDKADLRLIYLALAHMIKFRGHFLIEGDLNPDNSDVDKLFIQLVQTYNQLFEENPINASGVDAKAILSARLSKSRRLENLIAQLPGEKKNGLFGNLIALSLGLTPNFKSNFDLAEDAKLQLSKDTYDDDLDNLLAQIGDQYADLFLAAKNLSDAILLSDILRVNTEITKAPLSASMIKRYDEHHQDLTLLKALVRQQLPEKYKEIFFDQSKNGYAGYIDGGASQEEFYKFIKPILEKMDGTEELLVKLNREDLLRKQRTFDNGSIPHQIHLGELHAILRRQEDFYPFLKDNREKIEKILTFRIPYYVGPLARGNSRFAWMTRKSEETITPWNFEEVVDKGASAQSFIERMTNFDKNLPNEKVLPKHSLLYEYFTVYNELTKVKYVTEGMRKPAFLSGEQKKAIVDLLFKTNRKVTVKQLKEDYFKKIECFDSVEISGVEDRFNASLGTYHDLLKIIKDKDFLDNEENEDILEDIVLTLTLFEDREMIEERLKTYAHLFDDKVMKQLKRRRYTGWGRLSRKLINGIRDKQSGKTILDFLKSDGFANRNFMQLIHDDSLTFKEDIQKAQVSGQGDSLHEHIANLAGSPAIKKGILQTVKVVDELVKVMGRHKPENIVIEMARENQTTQKGQKNSRERMKRIEEGIKELGSQILKEHPVENTQLQNEKLYLYYLQNGRDMYVDQELDINRLSDYDVDHIVPQSFLKDDSIDNKVLTRSDKARGKSDNVPSEEVVKKMKNYWRQLLNAKLITQRKFDNLTKAERGGLSELDKAGFIKRQLVETRQITKHVAQILDSRMNTKYDENDKLIREVKVITLKSKLVSDFRKDFQFYKVREINNYHHAHDAYLNAVVGTALIKKYPKLESEFVYGDYKVYDVRKMIAKSEQEIGKATAKYFFYSNIMNFFKTEITLANGEIRKRPLIETNGETGEIVWDKGRDFATVRKVLSMPQVNIVKKTEVQTGGFSKESILPKRNSDKLIARKKDWDPKKYGGFDSPTVAYSVLVVAKVEKGKSKKLKSVKELLGITIMERSSFEKNPIDFLEAKGYKEVKKDLIIKLPKYSLFELENGRKRMLASAGELQKGNELALPSKYVNFLYLASHYEKLKGSPEDNEQKQLFVEQHKHYLDEIIEQISEFSKRVILADANLDKVLSAYNKHRDKPIREQAENIIHLFTLTNLGAPAAFKYFDTTIDRKRYTSTKEVLDATLIHQSITGLYETRIDLSQLGGDGGGGSGGSGGTLNLEDEYRLYETSAEPEVSPGSTWLSDFPQAWAETGGMGLAVRQAPLIIPLKATSTPVSIKQYPMSQEAKLGIKPHIQRLLDQGILVPCQSPWNTPLLPVKKPGTNDYRPVQDLREVNKRVEDIHPTVPNPYNLLSGLPPSHRWYTVLDLKDAFFCLRLHPTSQPLFAFEWRDPGMGISGQLTWTRLPQGFKNSPTLFNEALHRDLADFRIQHPDLILLQYVDDILLAATSELDCQQGTRALLLTLGNLGYRASAKKAQLCQKQVKYLGYLLKEGQRWLTEARKETVMGQPTPKTPRQLREFLGKAGFCRLFIPGFAEMAAPLYPLTKPGTLFNWGPDQQKAYQEIKQALLTAPALGLPDLTKPFELFVDEKQGYAKGVLTQKLGPWRRPVAYLSKKLDPVAAGWPPCLRMVAAIAVLRKDAGKLTMGQPLVILAPHAVEALVKQPPDRWLSNARMTHYQAMLLDTDRVQFGPVVALNPATLLPLPEEGAPHDCLEILAETHGTRPDLTDQPIPDADHTWYTDGSSFLQEGQRKAGAAVTTETEVIWARALPAGTSAQRAELIALTQALKMAEGKRLNVYTDSRYAFATAHIHGEIYRRRGWLTSEGREIKNKSEILALLKALFLPKRLSIIHCLGHQKGDSAEARGNRLADQAAREAAIKTPPDTSTLLAGKRTADGSEFEKRTADGSEFESPKKKAKVE

SEQ ID NO: 1898 - protein, 2093 aa, synthetic construct
MPAAKRVKLDGGDKKYSIGLDIGTNSVGWAVITDEYKVPSKKFKVLGNTDRHSIKKNLIGALLFDSGETAEATRLKRTARRRYTRRKNRICYLQEIFSNEMAKVDDSFFHRLEESFLVEEDKKHERHPIFGNIVDEVAYHEKYPTIYHLRKKLVDSTDKADLRLIYLALAHMIKFRGHFLIEGDLNPDNSDVDKLFIQLVQTYNQLFEENPINASGVDAKAILSARLSKSRRLENLIAQLPGEKKNGLFGNLIALSLGLTPNFKSNFDLAEDAKLQLSKDTYDDDLDNLLAQIGDQYADLFLAAKNLSDAILLSDILRVNTEITKAPLSASMIKRYDEHHQDLTLLKALVRQQLPEKYKEIFFDQSKNGYAGYIDGGASQEEFYKFIKPILEKMDGTEELLVKLNREDLLRKQRTFDNGSIPHQIHLGELHAILRRQEDFYPFLKDNREKIEKILTFRIPYYVGPLARGNSRFAWMTRKSEETITPWNFEEVVDKGASAQSFIERMTNFDKNLPNEKVLPKHSLLYEYFTVYNELTKVKYVTEGMRKPAFLSGEQKKAIVDLLFKTNRKVTVKQLKEDYFKKIECFDSVEISGVEDRFNASLGTYHDLLKIIKDKDFLDNEENEDILEDIVLTLTLFEDREMIEERLKTYAHLFDDKVMKQLKRRRYTGWGRLSRKLINGIRDKQSGKTILDFLKSDGFANRNFMQLIHDDSLTFKEDIQKAQVSGQGDSLHEHIANLAGSPAIKKGILQTVKVVDELVKVMGRHKPENIVIEMARENQTTQKGQKNSRERMKRIEEGIKELGSQILKEHPVENTQLQNEKLYLYYLQNGRDMYVDQELDINRLSDYDVDHIVPQSFLKDDSIDNKVLTRSDKARGKSDNVPSEEVVKKMKNYWRQLLNAKLITQRKFDNLTKAERGGLSELDKAGFIKRQLVETRQITKHVAQILDSRMNTKYDENDKLIREVKVITLKSKLVSDFRKDFQFYKVREINNYHHAHDAYLNAVVGTALIKKYPKLESEFVYGDYKVYDVRKMIAKSEQEIGKATAKYFFYSNIMNFFKTEITLANGEIRKRPLIETNGETGEIVWDKGRDFATVRKVLSMPQVNIVKKTEVQTGGFSKESILPKRNSDKLIARKKDWDPKKYGGFDSPTVAYSVLVVAKVEKGKSKKLKSVKELLGITIMERSSFEKNPIDFLEAKGYKEVKKDLIIKLPKYSLFELENGRKRMLASAGELQKGNELALPSKYVNFLYLASHYEKLKGSPEDNEQKQLFVEQHKHYLDEIIEQISEFSKRVILADANLDKVLSAYNKHRDKPIREQAENIIHLFTLTNLGAPAAFKYFDTTIDRKRYTSTKEVLDATLIHQSITGLYETRIDLSQLGGDGGEAAAKGSSGGTLNLEDEYRLYETSAEPEVSPGSTWLSDFPQAWAETGGMGLAVRQAPLIIPLKATSTPVSIKQYPMSQEAKLGIKPHIQRLLDQGILVPCQSPWNTPLLPVKKPGTNDYRPVQDLREVNKRVEDIHPTVPNPYNLLSGLPPSHRWYTVLDLKDAFFCLRLHPTSQPLFAFEWRDPGMGISGQLTWTRLPQGFKNSPTLFNEALHRDLADFRIQHPDLILLQYVDDILLAATSELDCQQGTRALLLTLGNLGYRASAKKAQLCQKQVKYLGYLLKEGQRWLTEARKETVMGQPTPKTPRQLREFLGKAGFCRLFIPGFAEMAAPLYPLTKPGTLFNWGPDQQKAYQEIKQALLTAPALGLPDLTKPFELFVDEKQGYAKGVLTQKLGPWRRPVAYLSKKLDPVAAGWPPCLRMVAAIAVLRKDAGKLTMGQPLVILAPHAVEALVKQPPDRWLSNARMTHYQAMLLDTDRVQFGPVVALNPATLLPLPEEGAPHDCLEILAETHGTRPDLTDQPIPDADHTWYTDGSSFLQEGQRKAGAAVTTETEVIWARALPAGTSAQRAELIALTQALKMAEGKRLNVYTDSRYAFATAHIHGEIYRRRGWLTSEGREIKNKSEILALLKALFLPKRLSIIHCLGHQKGDSAEARGNRLADQAAREAAIKTPPDTSTLLAGKRTADGSEFEKRTADGSEFESPKKKAKVE

SEQ ID NO: 1899 - protein, 2094 aa, synthetic construct
MPAAKRVKLDGGDKKYSIGLDIGTNSVGWAVITDEYKVPSKKFKVLGNTDRHSIKKNLIGALLFDSGETAEATRLKRTARRRYTRRKNRICYLQEIFSNEMAKVDDSFFHRLEESFLVEEDKKHERHPIFGNIVDEVAYHEKYPTIYHLRKKLVDSTDKADLRLIYLALAHMIKFRGHFLIEGDLNPDNSDVDKLFIQLVQTYNQLFEENPINASGVDAKAILSARLSKSRRLENLIAQLPGEKKNGLFGNLIALSLGLTPNFKSNFDLAEDAKLQLSKDTYDDDLDNLLAQIGDQYADLFLAAKNLSDAILLSDILRVNTEITKAPLSASMIKRYDEHHQDLTLLKALVRQQLPEKYKEIFFDQSKNGYAGYIDGGASQEEFYKFIKPILEKMDGTEELLVKLNREDLLRKQRTFDNGSIPHQIHLGELHAILRRQEDFYPFLKDNREKIEKILTFRIPYYVGPLARGNSRFAWMTRKSEETITPWNFEEVVDKGASAQSFIERMTNFDKNLPNEKVLPKHSLLYEYFTVYNELTKVKYVTEGMRKPAFLSGEQKKAIVDLLFKTNRKVTVKQLKEDYFKKIECFDSVEISGVEDRFNASLGTYHDLLKIIKDKDFLDNEENEDILEDIVLTLTLFEDREMIEERLKTYAHLFDDKVMKQLKRRRYTGWGRLSRKLINGIRDKQSGKTILDFLKSDGFANRNFMQLIHDDSLTFKEDIQKAQVSGQGDSLHEHIANLAGSPAIKKGILQTVKVVDELVKVMGRHKPENIVIEMARENQTTQKGQKNSRERMKRIEEGIKELGSQILKEHPVENTQLQNEKLYLYYLQNGRDMYVDQELDINRLSDYDVDHIVPQSFLKDDSIDNKVLTRSDKARGKSDNVPSEEVVKKMKNYWRQLLNAKLITQRKFDNLTKAERGGLSELDKAGFIKRQLVETRQITKHVAQILDSRMNTKYDENDKLIREVKVITLKSKLVSDFRKDFQFYKVREINNYHHAHDAYLNAVVGTALIKKYPKLESEFVYGDYKVYDVRKMIAKSEQEIGKATAKYFFYSNIMNFFKTEITLANGEIRKRPLIETNGETGEIVWDKGRDFATVRKVLSMPQVNIVKKTEVQTGGFSKESILPKRNSDKLIARKKDWDPKKYGGFDSPTVAYSVLVVAKVEKGKSKKLKSVKELLGITIMERSSFEKNPIDFLEAKGYKEVKKDLIIKLPKYSLFELENGRKRMLASAGELQKGNELALPSKYVNFLYLASHYEKLKGSPEDNEQKQLFVEQHKHYLDEIIEQISEFSKRVILADANLDKVLSAYNKHRDKPIREQAENIIHLFTLTNLGAPAAFKYFDTTIDRKRYTSTKEVLDATLIHQSITGLYETRIDLSQLGGDGGGGSPAPGGGGGTLNLEDEYRLYETSAEPEVSPGSTWLSDFPQAWAETGGMGLAVRQAPLIIPLKATSTPVSIKQYPMSQEAKLGIKPHIQRLLDQGILVPCQSPWNTPLLPVKKPGTNDYRPVQDLREVNKRVEDIHPTVPNPYNLLSGLPPSHRWYTVLDLKDAFFCLRLHPTSQPLFAFEWRDPGMGISGQLTWTRLPQGFKNSPTLFNEALHRDLADFRIQHPDLILLQYVDDILLAATSELDCQQGTRALLLTLGNLGYRASAKKAQLCQKQVKYLGYLLKEGQRWLTEARKETVMGQPTPKTPRQLREFLGKAGFCRLFIPGFAEMAAPLYPLTKPGTLFNWGPDQQKAYQEIKQALLTAPALGLPDLTKPFELFVDEKQGYAKGVLTQKLGPWRRPVAYLSKKLDPVAAGWPPCLRMVAAIAVLRKDAGKLTMGQPLVILAPHAVEALVKQPPDRWLSNARMTHYQAMLLDTDRVQFGPVVALNPATLLPLPEEGAPHDCLEILAETHGTRPDLTDQPIPDADHTWYTDGSSFLQEGQRKAGAAVTTETEVIWARALPAGTSAQRAELIALTQALKMAEGKRLNVYTDSRYAFATAHIHGEIYRRRGWLTSEGREIKNKSEILALLKALFLPKRLSIIHCLGHQKGDSAEARGNRLADQAAREAAIKTPPDTSTLLAGKRTADGSEFEKRTADGSEFESPKKKAKVE

SEQ ID NO: 1900 - protein, 2091 aa, synthetic construct
MPAAKRVKLDGGDKKYSIGLDIGTNSVGWAVITDEYKVPSKKFKVLGNTDRHSIKKNLIGALLFDSGETAEATRLKRTARRRYTRRKNRICYLQEIFSNEMAKVDDSFFHRLEESFLVEEDKKHERHPIFGNIVDEVAYHEKYPTIYHLRKKLVDSTDKADLRLIYLALAHMIKFRGHFLIEGDLNPDNSDVDKLFIQLVQTYNQLFEENPINASGVDAKAILSARLSKSRRLENLIAQLPGEKKNGLFGNLIALSLGLTPNFKSNFDLAEDAKLQLSKDTYDDDLDNLLAQIGDQYADLFLAAKNLSDAILLSDILRVNTEITKAPLSASMIKRYDEHHQDLTLLKALVRQQLPEKYKEIFFDQSKNGYAGYIDGGASQEEFYKFIKPILEKMDGTEELLVKLNREDLLRKQRTFDNGSIPHQIHLGELHAILRRQEDFYPFLKDNREKIEKILTFRIPYYVGPLARGNSRFAWMTRKSEETITPWNFEEVVDKGASAQSFIERMTNFDKNLPNEKVLPKHSLLYEYFTVYNELTKVKYVTEGMRKPAFLSGEQKKAIVDLLFKTNRKVTVKQLKEDYFKKIECFDSVEISGVEDRFNASLGTYHDLLKIIKDKDFLDNEENEDILEDIVLTLTLFEDREMIEERLKTYAHLFDDKVMKQLKRRRYTGWGRLSRKLINGIRDKQSGKTILDFLKSDGFANRNFMQLIHDDSLTFKEDIQKAQVSGQGDSLHEHIANLAGSPAIKKGILQTVKVVDELVKVMGRHKPENIVIEMARENQTTQKGQKNSRERMKRIEEGIKELGSQILKEHPVENTQLQNEKLYLYYLQNGRDMYVDQELDINRLSDYDVDHIVPQSFLKDDSIDNKVLTRSDKARGKSDNVPSEEVVKKMKNYWRQLLNAKLITQRKFDNLTKAERGGLSELDKAGFIKRQLVETRQITKHVAQILDSRMNTKYDENDKLIREVKVITLKSKLVSDFRKDFQFYKVREINNYHHAHDAYLNAVVGTALIKKYPKLESEFVYGDYKVYDVRKMIAKSEQEIGKATAKYFFYSNIMNFFKTEITLANGEIRKRPLIETNGETGEIVWDKGRDFATVRKVLSMPQVNIVKKTEVQTGGFSKESILPKRNSDKLIARKKDWDPKKYGGFDSPTVAYSVLVVAKVEKGKSKKLKSVKELLGITIMERSSFEKNPIDFLEAKGYKEVKKDLIIKLPKYSLFELENGRKRMLASAGELQKGNELALPSKYVNFLYLASHYEKLKGSPEDNEQKQLFVEQHKHYLDEIIEQISEFSKRVILADANLDKVLSAYNKHRDKPIREQAENIIHLFTLTNLGAPAAFKYFDTTIDRKRYTSTKEVLDATLIHQSITGLYETRIDLSQLGGDGGPAPGSSGGTLNLEDEYRLYETSAEPEVSPGSTWLSDFPQAWAETGGMGLAVRQAPLIIPLKATSTPVSIKQYPMSQEAKLGIKPHIQRLLDQGILVPCQSPWNTPLLPVKKPGTNDYRPVQDLREVNKRVEDIHPTVPNPYNLLSGLPPSHRWYTVLDLKDAFFCLRLHPTSQPLFAFEWRDPGMGISGQLTWTRLPQGFKNSPTLFNEALHRDLADFRIQHPDLILLQYVDDILLAATSELDCQQGTRALLLTLGNLGYRASAKKAQLCQKQVKYLGYLLKEGQRWLTEARKETVMGQPTPKTPRQLREFLGKAGFCRLFIPGFAEMAAPLYPLTKPGTLFNWGPDQQKAYQEIKQALLTAPALGLPDLTKPFELFVDEKQGYAKGVLTQKLGPWRRPVAYLSKKLDPVAAGWPPCLRMVAAIAVLRKDAGKLTMGQPLVILAPHAVEALVKQPPDRWLSNARMTHYQAMLLDTDRVQFGPVVALNPATLLPLPEEGAPHDCLEILAETHGTRPDLTDQPIPDADHTWYTDGSSFLQEGQRKAGAAVTTETEVIWARALPAGTSAQRAELIALTQALKMAEGKRLNVYTDSRYAFATAHIHGEIYRRRGWLTSEGREIKNKSEILALLKALFLPKRLSIIHCLGHQKGDSAEARGNRLADQAAREAAIKTPPDTSTLLAGKRTADGSEFEKRTADGSEFESPKKKAKVE

SEQ ID NO: 1901 - protein, 2096 aa, synthetic construct
MPAAKRVKLDGGDKKYSIGLDIGTNSVGWAVITDEYKVPSKKFKVLGNTDRHSIKKNLIGALLFDSGETAEATRLKRTARRRYTRRKNRICYLQEIFSNEMAKVDDSFFHRLEESFLVEEDKKHERHPIFGNIVDEVAYHEKYPTIYHLRKKLVDSTDKADLRLIYLALAHMIKFRGHFLIEGDLNPDNSDVDKLFIQLVQTYNQLFEENPINASGVDAKAILSARLSKSRRLENLIAQLPGEKKNGLFGNLIALSLGLTPNFKSNFDLAEDAKLQLSKDTYDDDLDNLLAQIGDQYADLFLAAKNLSDAILLSDILRVNTEITKAPLSASMIKRYDEHHQDLTLLKALVRQQLPEKYKEIFFDQSKNGYAGYIDGGASQEEFYKFIKPILEKMDGTEELLVKLNREDLLRKQRTFDNGSIPHQIHLGELHAILRRQEDFYPFLKDNREKIEKILTFRIPYYVGPLARGNSRFAWMTRKSEETITPWNFEEVVDKGASAQSFIERMTNFDKNLPNEKVLPKHSLLYEYFTVYNELTKVKYVTEGMRKPAFLSGEQKKAIVDLLFKTNRKVTVKQLKEDYFKKIECFDSVEISGVEDRFNASLGTYHDLLKIIKDKDFLDNEENEDILEDIVLTLTLFEDREMIEERLKTYAHLFDDKVMKQLKRRRYTGWGRLSRKLINGIRDKQSGKTILDFLKSDGFANRNFMQLIHDDSLTFKEDIQKAQVSGQGDSLHEHIANLAGSPAIKKGILQTVKVVDELVKVMGRHKPENIVIEMARENQTTQKGQKNSRERMKRIEEGIKELGSQILKEHPVENTQLQNEKLYLYYLQNGRDMYVDQELDINRLSDYDVDHIVPQSFLKDDSIDNKVLTRSDKARGKSDNVPSEEVVKKMKNYWRQLLNAKLITQRKFDNLTKAERGGLSELDKAGFIKRQLVETRQITKHVAQILDSRMNTKYDENDKLIREVKVITLKSKLVSDFRKDFQFYKVREINNYHHAHDAYLNAVVGTALIKKYPKLESEFVYGDYKVYDVRKMIAKSEQEIGKATAKYFFYSNIMNFFKTEITLANGEIRKRPLIETNGETGEIVWDKGRDFATVRKVLSMPQVNIVKKTEVQTGGFSKESILPKRNSDKLIARKKDWDPKKYGGFDSPTVAYSVLVVAKVEKGKSKKLKSVKELLGITIMERSSFEKNPIDFLEAKGYKEVKKDLIIKLPKYSLFELENGRKRMLASAGELQKGNELALPSKYVNFLYLASHYEKLKGSPEDNEQKQLFVEQHKHYLDEIIEQISEFSKRVILADANLDKVLSAYNKHRDKPIREQAENIIHLFTLTNLGAPAAFKYFDTTIDRKRYTSTKEVLDATLIHQSITGLYETRIDLSQLGGDGGGSSGGSEAAAKGGTLNLEDEYRLYETSAEPEVSPGSTWLSDFPQAWAETGGMGLAVRQAPLIIPLKATSTPVSIKQYPMSQEAKLGIKPHIQRLLDQGILVPCQSPWNTPLLPVKKPGTNDYRPVQDLREVNKRVEDIHPTVPNPYNLLSGLPPSHRWYTVLDLKDAFFCLRLHPTSQPLFAFEWRDPGMGISGQLTWTRLPQGFKNSPTLFNEALHRDLADFRIQHPDLILLQYVDDILLAATSELDCQQGTRALLLTLGNLGYRASAKKAQLCQKQVKYLGYLLKEGQRWLTEARKETVMGQPTPKTPRQLREFLGKAGFCRLFIPGFAEMAAPLYPLTKPGTLFNWGPDQQKAYQEIKQALLTAPALGLPDLTKPFELFVDEKQGYAKGVLTQKLGPWRRPVAYLSKKLDPVAAGWPPCLRMVAAIAVLRKDAGKLTMGQPLVILAPHAVEALVKQPPDRWLSNARMTHYQAMLLDTDRVQFGPVVALNPATLLPLPEEGAPHDCLEILAETHGTRPDLTDQPIPDADHTWYTDGSSFLQEGQRKAGAAVTTETEVIWARALPAGTSAQRAELIALTQALKMAEGKRLNVYTDSRYAFATAHIHGEIYRRRGWLTSEGREIKNKSEILALLKALFLPKRLSIIHCLGHQKGDSAEARGNRLADQAAREAAIKTPPDTSTLLAGKRTADGSEFEKRTADGSEFESPKKKAKVE

SEQ ID NO: 1902 - protein, 2094 aa, synthetic construct
MPAAKRVKLDGGDKKYSIGLDIGTNSVGWAVITDEYKVPSKKFKVLGNTDRHSIKKNLIGALLFDSGETAEATRLKRTARRRYTRRKNRICYLQEIFSNEMAKVDDSFFHRLEESFLVEEDKKHERHPIFGNIVDEVAYHEKYPTIYHLRKKLVDSTDKADLRLIYLALAHMIKFRGHFLIEGDLNPDNSDVDKLFIQLVQTYNQLFEENPINASGVDAKAILSARLSKSRRLENLIAQLPGEKKNGLFGNLIALSLGLTPNFKSNFDLAEDAKLQLSKDTYDDDLDNLLAQIGDQYADLFLAAKNLSDAILLSDILRVNTEITKAPLSASMIKRYDEHHQDLTLLKALVRQQLPEKYKEIFFDQSKNGYAGYIDGGASQEEFYKFIKPILEKMDGTEELLVKLNREDLLRKQRTFDNGSIPHQIHLGELHAILRRQEDFYPFLKDNREKIEKILTFRIPYYVGPLARGNSRFAWMTRKSEETITPWNFEEVVDKGASAQSFIERMTNFDKNLPNEKVLPKHSLLYEYFTVYNELTKVKYVTEGMRKPAFLSGEQKKAIVDLLFKTNRKVTVKQLKEDYFKKIECFDSVEISGVEDRFNASLGTYHDLLKIIKDKDFLDNEENEDILEDIVLTLTLFEDREMIEERLKTYAHLFDDKVMKQLKRRRYTGWGRLSRKLINGIRDKQSGKTILDFLKSDGFANRNFMQLIHDDSLTFKEDIQKAQVSGQGDSLHEHIANLAGSPAIKKGILQTVKVVDELVKVMGRHKPENIVIEMARENQTTQKGQKNSRERMKRIEEGIKELGSQILKEHPVENTQLQNEKLYLYYLQNGRDMYVDQELDINRLSDYDVDHIVPQSFLKDDSIDNKVLTRSDKARGKSDNVPSEEVVKKMKNYWRQLLNAKLITQRKFDNLTKAERGGLSELDKAGFIKRQLVETRQITKHVAQILDSRMNTKYDENDKLIREVKVITLKSKLVSDFRKDFQFYKVREINNYHHAHDAYLNAVVGTALIKKYPKLESEFVYGDYKVYDVRKMIAKSEQEIGKATAKYFFYSNIMNFFKTEITLANGEIRKRPLIETNGETGEIVWDKGRDFATVRKVLSMPQVNIVKKTEVQTGGFSKESILPKRNSDKLIARKKDWDPKKYGGFDSPTVAYSVLVVAKVEKGKSKKLKSVKELLGITIMERSSFEKNPIDFLEAKGYKEVKKDLIIKLPKYSLFELENGRKRMLASAGELQKGNELALPSKYVNFLYLASHYEKLKGSPEDNEQKQLFVEQHKHYLDEIIEQISEFSKRVILADANLDKVLSAYNKHRDKPIREQAENIIHLFTLTNLGAPAAFKYFDTTIDRKRYTSTKEVLDATLIHQSITGLYETRIDLSQLGGDGGPAPGGSGSSGGTLNLEDEYRLYETSAEPEVSPGSTWLSDFPQAWAETGGMGLAVRQAPLIIPLKATSTPVSIKQYPMSQEAKLGIKPHIQRLLDQGILVPCQSPWNTPLLPVKKPGTNDYRPVQDLREVNKRVEDIHPTVPNPYNLLSGLPPSHRWYTVLDLKDAFFCLRLHPTSQPLFAFEWRDPGMGISGQLTWTRLPQGFKNSPTLFNEALHRDLADFRIQHPDLILLQYVDDILLAATSELDCQQGTRALLLTLGNLGYRASAKKAQLCQKQVKYLGYLLKEGQRWLTEARKETVMGQPTPKTPRQLREFLGKAGFCRLFIPGFAEMAAPLYPLTKPGTLFNWGPDQQKAYQEIKQALLTAPALGLPDLTKPFELFVDEKQGYAKGVLTQKLGPWRRPVAYLSKKLDPVAAGWPPCLRMVAAIAVLRKDAGKLTMGQPLVILAPHAVEALVKQPPDRWLSNARMTHYQAMLLDTDRVQFGPVVALNPATLLPLPEEGAPHDCLEILAETHGTRPDLTDQPIPDADHTWYTDGSSFLQEGQRKAGAAVTTETEVIWARALPAGTSAQRAELIALTQALKMAEGKRLNVYTDSRYAFATAHIHGEIYRRRGWLTSEGREIKNKSEILALLKALFLPKRLSIIHCLGHQKGDSAEARGNRLADQAAREAAIKTPPDTSTLLAGKRTADGSEFEKRTADGSEFESPKKKAKVE

SEQ ID NO: 1903 - protein, 2094 aa, synthetic construct
MPAAKRVKLDGGDKKYSIGLDIGTNSVGWAVITDEYKVPSKKFKVLGNTDRHSIKKNLIGALLFDSGETAEATRLKRTARRRYTRRKNRICYLQEIFSNEMAKVDDSFFHRLEESFLVEEDKKHERHPIFGNIVDEVAYHEKYPTIYHLRKKLVDSTDKADLRLIYLALAHMIKFRGHFLIEGDLNPDNSDVDKLFIQLVQTYNQLFEENPINASGVDAKAILSARLSKSRRLENLIAQLPGEKKNGLFGNLIALSLGLTPNFKSNFDLAEDAKLQLSKDTYDDDLDNLLAQIGDQYADLFLAAKNLSDAILLSDILRVNTEITKAPLSASMIKRYDEHHQDLTLLKALVRQQLPEKYKEIFFDQSKNGYAGYIDGGASQEEFYKFIKPILEKMDGTEELLVKLNREDLLRKQRTFDNGSIPHQIHLGELHAILRRQEDFYPFLKDNREKIEKILTFRIPYYVGPLARGNSRFAWMTRKSEETITPWNFEEVVDKGASAQSFIERMTNFDKNLPNEKVLPKHSLLYEYFTVYNELTKVKYVTEGMRKPAFLSGEQKKAIVDLLFKTNRKVTVKQLKEDYFKKIECFDSVEISGVEDRFNASLGTYHDLLKIIKDKDFLDNEENEDILEDIVLTLTLFEDREMIEERLKTYAHLFDDKVMKQLKRRRYTGWGRLSRKLINGIRDKQSGKTILDFLKSDGFANRNFMQLIHDDSLTFKEDIQKAQVSGQGDSLHEHIANLAGSPAIKKGILQTVKVVDELVKVMGRHKPENIVIEMARENQTTQKGQKNSRERMKRIEEGIKELGSQILKEHPVENTQLQNEKLYLYYLQNGRDMYVDQELDINRLSDYDVDHIVPQSFLKDDSIDNKVLTRSDKARGKSDNVPSEEVVKKMKNYWRQLLNAKLITQRKFDNLTKAERGGLSELDKAGFIKRQLVETRQITKHVAQILDSRMNTKYDENDKLIREVKVITLKSKLVSDFRKDFQFYKVREINNYHHAHDAYLNAVVGTALIKKYPKLESEFVYGDYKVYDVRKMIAKSEQEIGKATAKYFFYSNIMNFFKTEITLANGEIRKRPLIETNGETGEIVWDKGRDFATVRKVLSMPQVNIVKKTEVQTGGFSKESILPKRNSDKLIARKKDWDPKKYGGFDSPTVAYSVLVVAKVEKGKSKKLKSVKELLGITIMERSSFEKNPIDFLEAKGYKEVKKDLIIKLPKYSLFELENGRKRMLASAGELQKGNELALPSKYVNFLYLASHYEKLKGSPEDNEQKQLFVEQHKHYLDEIIEQISEFSKRVILADANLDKVLSAYNKHRDKPIREQAENIIHLFTLTNLGAPAAFKYFDTTIDRKRYTSTKEVLDATLIHQSITGLYETRIDLSQLGGDGGGGSPAPGSSGGTLNLEDEYRLYETSAEPEVSPGSTWLSDFPQAWAETGGMGLAVRQAPLIIPLKATSTPVSIKQYPMSQEAKLGIKPHIQRLLDQGILVPCQSPWNTPLLPVKKPGTNDYRPVQDLREVNKRVEDIHPTVPNPYNLLSGLPPSHRWYTVLDLKDAFFCLRLHPTSQPLFAFEWRDPGMGISGQLTWTRLPQGFKNSPTLFNEALHRDLADFRIQHPDLILLQYVDDILLAATSELDCQQGTRALLLTLGNLGYRASAKKAQLCQKQVKYLGYLLKEGQRWLTEARKETVMGQPTPKTPRQLREFLGKAGFCRLFIPGFAEMAAPLYPLTKPGTLFNWGPDQQKAYQEIKQALLTAPALGLPDLTKPFELFVDEKQGYAKGVLTQKLGPWRRPVAYLSKKLDPVAAGWPPCLRMVAAIAVLRKDAGKLTMGQPLVILAPHAVEALVKQPPDRWLSNARMTHYQAMLLDTDRVQFGPVVALNPATLLPLPEEGAPHDCLEILAETHGTRPDLTDQPIPDADHTWYTDGSSFLQEGQRKAGAAVTTETEVIWARALPAGTSAQRAELIALTQALKMAEGKRLNVYTDSRYAFATAHIHGEIYRRRGWLTSEGREIKNKSEILALLKALFLPKRLSIIHCLGHQKGDSAEARGNRLADQAAREAAIKTPPDTSTLLAGKRTADGSEFEKRTADGSEFESPKKKAKVE

SEQ ID NO: 1904 - protein, 2091 aa, synthetic construct
MPAAKRVKLDGGDKKYSIGLDIGTNSVGWAVITDEYKVPSKKFKVLGNTDRHSIKKNLIGALLFDSGETAEATRLKRTARRRYTRRKNRICYLQEIFSNEMAKVDDSFFHRLEESFLVEEDKKHERHPIFGNIVDEVAYHEKYPTIYHLRKKLVDSTDKADLRLIYLALAHMIKFRGHFLIEGDLNPDNSDVDKLFIQLVQTYNQLFEENPINASGVDAKAILSARLSKSRRLENLIAQLPGEKKNGLFGNLIALSLGLTPNFKSNFDLAEDAKLQLSKDTYDDDLDNLLAQIGDQYADLFLAAKNLSDAILLSDILRVNTEITKAPLSASMIKRYDEHHQDLTLLKALVRQQLPEKYKEIFFDQSKNGYAGYIDGGASQEEFYKFIKPILEKMDGTEELLVKLNREDLLRKQRTFDNGSIPHQIHLGELHAILRRQEDFYPFLKDNREKIEKILTFRIPYYVGPLARGNSRFAWMTRKSEETITPWNFEEVVDKGASAQSFIERMTNFDKNLPNEKVLPKHSLLYEYFTVYNELTKVKYVTEGMRKPAFLSGEQKKAIVDLLFKTNRKVTVKQLKEDYFKKIECFDSVEISGVEDRFNASLGTYHDLLKIIKDKDFLDNEENEDILEDIVLTLTLFEDREMIEERLKTYAHLFDDKVMKQLKRRRYTGWGRLSRKLINGIRDKQSGKTILDFLKSDGFANRNFMQLIHDDSLTFKEDIQKAQVSGQGDSLHEHIANLAGSPAIKKGILQTVKVVDELVKVMGRHKPENIVIEMARENQTTQKGQKNSRERMKRIEEGIKELGSQILKEHPVENTQLQNEKLYLYYLQNGRDMYVDQELDINRLSDYDVDHIVPQSFLKDDSIDNKVLTRSDKARGKSDNVPSEEVVKKMKNYWRQLLNAKLITQRKFDNLTKAERGGLSELDKAGFIKRQLVETRQITKHVAQILDSRMNTKYDENDKLIREVKVITLKSKLVSDFRKDFQFYKVREINNYHHAHDAYLNAVVGTALIKKYPKLESEFVYGDYKVYDVRKMIAKSEQEIGKATAKYFFYSNIMNFFKTEITLANGEIRKRPLIETNGETGEIVWDKGRDFATVRKVLSMPQVNIVKKTEVQTGGFSKESILPKRNSDKLIARKKDWDPKKYGGFDSPTVAYSVLVVAKVEKGKSKKLKSVKELLGITIMERSSFEKNPIDFLEAKGYKEVKKDLIIKLPKYSLFELENGRKRMLASAGELQKGNELALPSKYVNFLYLASHYEKLKGSPEDNEQKQLFVEQHKHYLDEIIEQISEFSKRVILADANLDKVLSAYNKHRDKPIREQAENIIHLFTLTNLGAPAAFKYFDTTIDRKRYTSTKEVLDATLIHQSITGLYETRIDLSQLGGDGGGSSGGGGGTLNLEDEYRLYETSAEPEVSPGSTWLSDFPQAWAETGGMGLAVRQAPLIIPLKATSTPVSIKQYPMSQEAKLGIKPHIQRLLDQGILVPCQSPWNTPLLPVKKPGTNDYRPVQDLREVNKRVEDIHPTVPNPYNLLSGLPPSHRWYTVLDLKDAFFCLRLHPTSQPLFAFEWRDPGMGISGQLTWTRLPQGFKNSPTLFNEALHRDLADFRIQHPDLILLQYVDDILLAATSELDCQQGTRALLLTLGNLGYRASAKKAQLCQKQVKYLGYLLKEGQRWLTEARKETVMGQPTPKTPRQLREFLGKAGFCRLFIPGFAEMAAPLYPLTKPGTLFNWGPDQQKAYQEIKQALLTAPALGLPDLTKPFELFVDEKQGYAKGVLTQKLGPWRRPVAYLSKKLDPVAAGWPPCLRMVAAIAVLRKDAGKLTMGQPLVILAPHAVEALVKQPPDRWLSNARMTHYQAMLLDTDRVQFGPVVALNPATLLPLPEEGAPHDCLEILAETHGTRPDLTDQPIPDADHTWYTDGSSFLQEGQRKAGAAVTTETEVIWARALPAGTSAQRAELIALTQALKMAEGKRLNVYTDSRYAFATAHIHGEIYRRRGWLTSEGREIKNKSEILALLKALFLPKRLSIIHCLGHQKGDSAEARGNRLADQAAREAAIKTPPDTSTLLAGKRTADGSEFEKRTADGSEFESPKKKAKVE

SEQ ID NO: 1905 - protein, 2094 aa, synthetic construct
MPAAKRVKLDGGDKKYSIGLDIGTNSVGWAVITDEYKVPSKKFKVLGNTDRHSIKKNLIGALLFDSGETAEATRLKRTARRRYTRRKNRICYLQEIFSNEMAKVDDSFFHRLEESFLVEEDKKHERHPIFGNIVDEVAYHEKYPTIYHLRKKLVDSTDKADLRLIYLALAHMIKFRGHFLIEGDLNPDNSDVDKLFIQLVQTYNQLFEENPINASGVDAKAILSARLSKSRRLENLIAQLPGEKKNGLFGNLIALSLGLTPNFKSNFDLAEDAKLQLSKDTYDDDLDNLLAQIGDQYADLFLAAKNLSDAILLSDILRVNTEITKAPLSASMIKRYDEHHQDLTLLKALVRQQLPEKYKEIFFDQSKNGYAGYIDGGASQEEFYKFIKPILEKMDGTEELLVKLNREDLLRKQRTFDNGSIPHQIHLGELHAILRRQEDFYPFLKDNREKIEKILTFRIPYYVGPLARGNSRFAWMTRKSEETITPWNFEEVVDKGASAQSFIERMTNFDKNLPNEKVLPKHSLLYEYFTVYNELTKVKYVTEGMRKPAFLSGEQKKAIVDLLFKTNRKVTVKQLKEDYFKKIECFDSVEISGVEDRFNASLGTYHDLLKIIKDKDFLDNEENEDILEDIVLTLTLFEDREMIEERLKTYAHLFDDKVMKQLKRRRYTGWGRLSRKLINGIRDKQSGKTILDFLKSDGFANRNFMQLIHDDSLTFKEDIQKAQVSGQGDSLHEHIANLAGSPAIKKGILQTVKVVDELVKVMGRHKPENIVIEMARENQTTQKGQKNSRERMKRIEEGIKELGSQILKEHPVENTQLQNEKLYLYYLQNGRDMYVDQELDINRLSDYDVDHIVPQSFLKDDSIDNKVLTRSDKARGKSDNVPSEEVVKKMKNYWRQLLNAKLITQRKFDNLTKAERGGLSELDKAGFIKRQLVETRQITKHVAQILDSRMNTKYDENDKLIREVKVITLKSKLVSDFRKDFQFYKVREINNYHHAHDAYLNAVVGTALIKKYPKLESEFVYGDYKVYDVRKMIAKSEQEIGKATAKYFFYSNIMNFFKTEITLANGEIRKRPLIETNGETGEIVWDKGRDFATVRKVLSMPQVNIVKKTEVQTGGFSKESILPKRNSDKLIARKKDWDPKKYGGFDSPTVAYSVLVVAKVEKGKSKKLKSVKELLGITIMERSSFEKNPIDFLEAKGYKEVKKDLIIKLPKYSLFELENGRKRMLASAGELQKGNELALPSKYVNFLYLASHYEKLKGSPEDNEQKQLFVEQHKHYLDEIIEQISEFSKRVILADANLDKVLSAYNKHRDKPIREQAENIIHLFTLTNLGAPAAFKYFDTTIDRKRYTSTKEVLDATLIHQSITGLYETRIDLSQLGGDGGGGGGSSPAPGGTLNLEDEYRLYETSAEPEVSPGSTWLSDFPQAWAETGGMGLAVRQAPLIIPLKATSTPVSIKQYPMSQEAKLGIKPHIQRLLDQGILVPCQSPWNTPLLPVKKPGTNDYRPVQDLREVNKRVEDIHPTVPNPYNLLSGLPPSHRWYTVLDLKDAFFCLRLHPTSQPLFAFEWRDPGMGISGQLTWTRLPQGFKNSPTLFNEALHRDLADFRIQHPDLILLQYVDDILLAATSELDCQQGTRALLLTLGNLGYRASAKKAQLCQKQVKYLGYLLKEGQRWLTEARKETVMGQPTPKTPRQLREFLGKAGFCRLFIPGFAEMAAPLYPLTKPGTLFNWGPDQQKAYQEIKQALLTAPALGLPDLTKPFELFVDEKQGYAKGVLTQKLGPWRRPVAYLSKKLDPVAAGWPPCLRMVAAIAVLRKDAGKLTMGQPLVILAPHAVEALVKQPPDRWLSNARMTHYQAMLLDTDRVQFGPVVALNPATLLPLPEEGAPHDCLEILAETHGTRPDLTDQPIPDADHTWYTDGSSFLQEGQRKAGAAVTTETEVIWARALPAGTSAQRAELIALTQALKMAEGKRLNVYTDSRYAFATAHIHGEIYRRRGWLTSEGREIKNKSEILALLKALFLPKRLSIIHCLGHQKGDSAEARGNRLADQAAREAAIKTPPDTSTLLAGKRTADGSEFEKRTADGSEFESPKKKAKVE

SEQ ID NO: 1906 - protein, 2096 aa, synthetic construct
MPAAKRVKLDGGDKKYSIGLDIGTNSVGWAVITDEYKVPSKKFKVLGNTDRHSIKKNLIGALLFDSGETAEATRLKRTARRRYTRRKNRICYLQEIFSNEMAKVDDSFFHRLEESFLVEEDKKHERHPIFGNIVDEVAYHEKYPTIYHLRKKLVDSTDKADLRLIYLALAHMIKFRGHFLIEGDLNPDNSDVDKLFIQLVQTYNQLFEENPINASGVDAKAILSARLSKSRRLENLIAQLPGEKKNGLFGNLIALSLGLTPNFKSNFDLAEDAKLQLSKDTYDDDLDNLLAQIGDQYADLFLAAKNLSDAILLSDILRVNTEITKAPLSASMIKRYDEHHQDLTLLKALVRQQLPEKYKEIFFDQSKNGYAGYIDGGASQEEFYKFIKPILEKMDGTEELLVKLNREDLLRKQRTFDNGSIPHQIHLGELHAILRRQEDFYPFLKDNREKIEKILTFRIPYYVGPLARGNSRFAWMTRKSEETITPWNFEEVVDKGASAQSFIERMTNFDKNLPNEKVLPKHSLLYEYFTVYNELTKVKYVTEGMRKPAFLSGEQKKAIVDLLFKTNRKVTVKQLKEDYFKKIECFDSVEISGVEDRFNASLGTYHDLLKIIKDKDFLDNEENEDILEDIVLTLTLFEDREMIEERLKTYAHLFDDKVMKQLKRRRYTGWGRLSRKLINGIRDKQSGKTILDFLKSDGFANRNFMQLIHDDSLTFKEDIQKAQVSGQGDSLHEHIANLAGSPAIKKGILQTVKVVDELVKVMGRHKPENIVIEMARENQTTQKGQKNSRERMKRIEEGIKELGSQILKEHPVENTQLQNEKLYLYYLQNGRDMYVDQELDINRLSDYDVDHIVPQSFLKDDSIDNKVLTRSDKARGKSDNVPSEEVVKKMKNYWRQLLNAKLITQRKFDNLTKAERGGLSELDKAGFIKRQLVETRQITKHVAQILDSRMNTKYDENDKLIREVKVITLKSKLVSDFRKDFQFYKVREINNYHHAHDAYLNAVVGTALIKKYPKLESEFVYGDYKVYDVRKMIAKSEQEIGKATAKYFFYSNIMNFFKTEITLANGEIRKRPLIETNGETGEIVWDKGRDFATVRKVLSMPQVNIVKKTEVQTGGFSKESILPKRNSDKLIARKKDWDPKKYGGFDSPTVAYSVLVVAKVEKGKSKKLKSVKELLGITIMERSSFEKNPIDFLEAKGYKEVKKDLIIKLPKYSLFELENGRKRMLASAGELQKGNELALPSKYVNFLYLASHYEKLKGSPEDNEQKQLFVEQHKHYLDEIIEQISEFSKRVILADANLDKVLSAYNKHRDKPIREQAENIIHLFTLTNLGAPAAFKYFDTTIDRKRYTSTKEVLDATLIHQSITGLYETRIDLSQLGGDGGGGGGGSEAAAKGGTLNLEDEYRLYETSAEPEVSPGSTWLSDFPQAWAETGGMGLAVRQAPLIIPLKATSTPVSIKQYPMSQEAKLGIKPHIQRLLDQGILVPCQSPWNTPLLPVKKPGTNDYRPVQDLREVNKRVEDIHPTVPNPYNLLSGLPPSHRWYTVLDLKDAFFCLRLHPTSQPLFAFEWRDPGMGISGQLTWTRLPQGFKNSPTLFNEALHRDLADFRIQHPDLILLQYVDDILLAATSELDCQQGTRALLLTLGNLGYRASAKKAQLCQKQVKYLGYLLKEGQRWLTEARKETVMGQPTPKTPRQLREFLGKAGFCRLFIPGFAEMAAPLYPLTKPGTLFNWGPDQQKAYQEIKQALLTAPALGLPDLTKPFELFVDEKQGYAKGVLTQKLGPWRRPVAYLSKKLDPVAAGWPPCLRMVAAIAVLRKDAGKLTMGQPLVILAPHAVEALVKQPPDRWLSNARMTHYQAMLLDTDRVQFGPVVALNPATLLPLPEEGAPHDCLEILAETHGTRPDLTDQPIPDADHTWYTDGSSFLQEGQRKAGAAVTTETEVIWARALPAGTSAQRAELIALTQALKMAEGKRLNVYTDSRYAFATAHIHGEIYRRRGWLTSEGREIKNKSEILALLKALFLPKRLSIIHCLGHQKGDSAEARGNRLADQAAREAAIKTPPDTSTLLAGKRTADGSEFEKRTADGSEFESPKKKAKVE

SEQ ID NO: 1907 - protein, 2096 aa, synthetic construct
MPAAKRVKLDGGDKKYSIGLDIGTNSVGWAVITDEYKVPSKKFKVLGNTDRHSIKKNLIGALLFDSGETAEATRLKRTARRRYTRRKNRICYLQEIFSNEMAKVDDSFFHRLEESFLVEEDKKHERHPIFGNIVDEVAYHEKYPTIYHLRKKLVDSTDKADLRLIYLALAHMIKFRGHFLIEGDLNPDNSDVDKLFIQLVQTYNQLFEENPINASGVDAKAILSARLSKSRRLENLIAQLPGEKKNGLFGNLIALSLGLTPNFKSNFDLAEDAKLQLSKDTYDDDLDNLLAQIGDQYADLFLAAKNLSDAILLSDILRVNTEITKAPLSASMIKRYDEHHQDLTLLKALVRQQLPEKYKEIFFDQSKNGYAGYIDGGASQEEFYKFIKPILEKMDGTEELLVKLNREDLLRKQRTFDNGSIPHQIHLGELHAILRRQEDFYPFLKDNREKIEKILTFRIPYYVGPLARGNSRFAWMTRKSEETITPWNFEEVVDKGASAQSFIERMTNFDKNLPNEKVLPKHSLLYEYFTVYNELTKVKYVTEGMRKPAFLSGEQKKAIVDLLFKTNRKVTVKQLKEDYFKKIECFDSVEISGVEDRFNASLGTYHDLLKIIKDKDFLDNEENEDILEDIVLTLTLFEDREMIEERLKTYAHLFDDKVMKQLKRRRYTGWGRLSRKLINGIRDKQSGKTILDFLKSDGFANRNFMQLIHDDSLTFKEDIQKAQVSGQGDSLHEHIANLAGSPAIKKGILQTVKVVDELVKVMGRHKPENIVIEMARENQTTQKGQKNSRERMKRIEEGIKELGSQILKEHPVENTQLQNEKLYLYYLQNGRDMYVDQELDINRLSDYDVDHIVPQSFLKDDSIDNKVLTRSDKARGKSDNVPSEEVVKKMKNYWRQLLNAKLITQRKFDNLTKAERGGLSELDKAGFIKRQLVETRQITKHVAQILDSRMNTKYDENDKLIREVKVITLKSKLVSDFRKDFQFYKVREINNYHHAHDAYLNAVVGTALIKKYPKLESEFVYGDYKVYDVRKMIAKSEQEIGKATAKYFFYSNIMNFFKTEITLANGEIRKRPLIETNGETGEIVWDKGRDFATVRKVLSMPQVNIVKKTEVQTGGFSKESILPKRNSDKLIARKKDWDPKKYGGFDSPTVAYSVLVVAKVEKGKSKKLKSVKELLGITIMERSSFEKNPIDFLEAKGYKEVKKDLIIKLPKYSLFELENGRKRMLASAGELQKGNELALPSKYVNFLYLASHYEKLKGSPEDNEQKQLFVEQHKHYLDEIIEQISEFSKRVILADANLDKVLSAYNKHRDKPIREQAENIIHLFTLTNLGAPAAFKYFDTTIDRKRYTSTKEVLDATLIHQSITGLYETRIDLSQLGGDGGEAAAKGGSGGGGGTLNLEDEYRLYETSAEPEVSPGSTWLSDFPQAWAETGGMGLAVRQAPLIIPLKATSTPVSIKQYPMSQEAKLGIKPHIQRLLDQGILVPCQSPWNTPLLPVKKPGTNDYRPVQDLREVNKRVEDIHPTVPNPYNLLSGLPPSHRWYTVLDLKDAFFCLRLHPTSQPLFAFEWRDPGMGISGQLTWTRLPQGFKNSPTLFNEALHRDLADFRIQHPDLILLQYVDDILLAATSELDCQQGTRALLLTLGNLGYRASAKKAQLCQKQVKYLGYLLKEGQRWLTEARKETVMGQPTPKTPRQLREFLGKAGFCRLFIPGFAEMAAPLYPLTKPGTLFNWGPDQQKAYQEIKQALLTAPALGLPDLTKPFELFVDEKQGYAKGVLTQKLGPWRRPVAYLSKKLDPVAAGWPPCLRMVAAIAVLRKDAGKLTMGQPLVILAPHAVEALVKQPPDRWLSNARMTHYQAMLLDTDRVQFGPVVALNPATLLPLPEEGAPHDCLEILAETHGTRPDLTDQPIPDADHTWYTDGSSFLQEGQRKAGAAVTTETEVIWARALPAGTSAQRAELIALTQALKMAEGKRLNVYTDSRYAFATAHIHGEIYRRRGWLTSEGREIKNKSEILALLKALFLPKRLSIIHCLGHQKGDSAEARGNRLADQAAREAAIKTPPDTSTLLAGKRTADGSEFEKRTADGSEFESPKKKAKVE

SEQ ID NO: 1908 - protein, 2096 aa, synthetic construct
MPAAKRVKLDGGDKKYSIGLDIGTNSVGWAVITDEYKVPSKKFKVLGNTDRHSIKKNLIGALLFDSGETAEATRLKRTARRRYTRRKNRICYLQEIFSNEMAKVDDSFFHRLEESFLVEEDKKHERHPIFGNIVDEVAYHEKYPTIYHLRKKLVDSTDKADLRLIYLALAHMIKFRGHFLIEGDLNPDNSDVDKLFIQLVQTYNQLFEENPINASGVDAKAILSARLSKSRRLENLIAQLPGEKKNGLFGNLIALSLGLTPNFKSNFDLAEDAKLQLSKDTYDDDLDNLLAQIGDQYADLFLAAKNLSDAILLSDILRVNTEITKAPLSASMIKRYDEHHQDLTLLKALVRQQLPEKYKEIFFDQSKNGYAGYIDGGASQEEFYKFIKPILEKMDGTEELLVKLNREDLLRKQRTFDNGSIPHQIHLGELHAILRRQEDFYPFLKDNREKIEKILTFRIPYYVGPLARGNSRFAWMTRKSEETITPWNFEEVVDKGASAQSFIERMTNFDKNLPNEKVLPKHSLLYEYFTVYNELTKVKYVTEGMRKPAFLSGEQKKAIVDLLFKTNRKVTVKQLKEDYFKKIECFDSVEISGVEDRFNASLGTYHDLLKIIKDKDFLDNEENEDILEDIVLTLTLFEDREMIEERLKTYAHLFDDKVMKQLKRRRYTGWGRLSRKLINGIRDKQSGKTILDFLKSDGFANRNFMQLIHDDSLTFKEDIQKAQVSGQGDSLHEHIANLAGSPAIKKGILQTVKVVDELVKVMGRHKPENIVIEMARENQTTQKGQKNSRERMKRIEEGIKELGSQILKEHPVENTQLQNEKLYLYYLQNGRDMYVDQELDINRLSDYDVDHIVPQSFLKDDSIDNKVLTRSDKARGKSDNVPSEEVVKKMKNYWRQLLNAKLITQRKFDNLTKAERGGLSELDKAGFIKRQLVETRQITKHVAQILDSRMNTKYDENDKLIREVKVITLKSKLVSDFRKDFQFYKVREINNYHHAHDAYLNAVVGTALIKKYPKLESEFVYGDYKVYDVRKMIAKSEQEIGKATAKYFFYSNIMNFFKTEITLANGEIRKRPLIETNGETGEIVWDKGRDFATVRKVLSMPQVNIVKKTEVQTGGFSKESILPKRNSDKLIARKKDWDPKKYGGFDSPTVAYSVLVVAKVEKGKSKKLKSVKELLGITIMERSSFEKNPIDFLEAKGYKEVKKDLIIKLPKYSLFELENGRKRMLASAGELQKGNELALPSKYVNFLYLASHYEKLKGSPEDNEQKQLFVEQHKHYLDEIIEQISEFSKRVILADANLDKVLSAYNKHRDKPIREQAENIIHLFTLTNLGAPAAFKYFDTTIDRKRYTSTKEVLDATLIHQSITGLYETRIDLSQLGGDGGGGSPAPEAAAKGGTLNLEDEYRLYETSAEPEVSPGSTWLSDFPQAWAETGGMGLAVRQAPLIIPLKATSTPVSIKQYPMSQEAKLGIKPHIQRLLDQGILVPCQSPWNTPLLPVKKPGTNDYRPVQDLREVNKRVEDIHPTVPNPYNLLSGLPPSHRWYTVLDLKDAFFCLRLHPTSQPLFAFEWRDPGMGISGQLTWTRLPQGFKNSPTLFNEALHRDLADFRIQHPDLILLQYVDDILLAATSELDCQQGTRALLLTLGNLGYRASAKKAQLCQKQVKYLGYLLKEGQRWLTEARKETVMGQPTPKTPRQLREFLGKAGFCRLFIPGFAEMAAPLYPLTKPGTLFNWGPDQQKAYQEIKQALLTAPALGLPDLTKPFELFVDEKQGYAKGVLTQKLGPWRRPVAYLSKKLDPVAAGWPPCLRMVAAIAVLRKDAGKLTMGQPLVILAPHAVEALVKQPPDRWLSNARMTHYQAMLLDTDRVQFGPVVALNPATLLPLPEEGAPHDCLEILAETHGTRPDLTDQPIPDADHTWYTDGSSFLQEGQRKAGAAVTTETEVIWARALPAGTSAQRAELIALTQALKMAEGKRLNVYTDSRYAFATAHIHGEIYRRRGWLTSEGREIKNKSEILALLKALFLPKRLSIIHCLGHQKGDSAEARGNRLADQAAREAAIKTPPDTSTLLAGKRTADGSEFEKRTADGSEFESPKKKAKVE

SEQ ID NO: 1909 - protein, 2094 aa, synthetic construct
MPAAKRVKLDGGDKKYSIGLDIGTNSVGWAVITDEYKVPSKKFKVLGNTDRHSIKKNLIGALLFDSGETAEATRLKRTARRRYTRRKNRICYLQEIFSNEMAKVDDSFFHRLEESFLVEEDKKHERHPIFGNIVDEVAYHEKYPTIYHLRKKLVDSTDKADLRLIYLALAHMIKFRGHFLIEGDLNPDNSDVDKLFIQLVQTYNQLFEENPINASGVDAKAILSARLSKSRRLENLIAQLPGEKKNGLFGNLIALSLGLTPNFKSNFDLAEDAKLQLSKDTYDDDLDNLLAQIGDQYADLFLAAKNLSDAILLSDILRVNTEITKAPLSASMIKRYDEHHQDLTLLKALVRQQLPEKYKEIFFDQSKNGYAGYIDGGASQEEFYKFIKPILEKMDGTEELLVKLNREDLLRKQRTFDNGSIPHQIHLGELHAILRRQEDFYPFLKDNREKIEKILTFRIPYYVGPLARGNSRFAWMTRKSEETITPWNFEEVVDKGASAQSFIERMTNFDKNLPNEKVLPKHSLLYEYFTVYNELTKVKYVTEGMRKPAFLSGEQKKAIVDLLFKTNRKVTVKQLKEDYFKKIECFDSVEISGVEDRFNASLGTYHDLLKIIKDKDFLDNEENEDILEDIVLTLTLFEDREMIEERLKTYAHLFDDKVMKQLKRRRYTGWGRLSRKLINGIRDKQSGKTILDFLKSDGFANRNFMQLIHDDSLTFKEDIQKAQVSGQGDSLHEHIANLAGSPAIKKGILQTVKVVDELVKVMGRHKPENIVIEMARENQTTQKGQKNSRERMKRIEEGIKELGSQILKEHPVENTQLQNEKLYLYYLQNGRDMYVDQELDINRLSDYDVDHIVPQSFLKDDSIDNKVLTRSDKARGKSDNVPSEEVVKKMKNYWRQLLNAKLITQRKFDNLTKAERGGLSELDKAGFIKRQLVETRQITKHVAQILDSRMNTKYDENDKLIREVKVITLKSKLVSDFRKDFQFYKVREINNYHHAHDAYLNAVVGTALIKKYPKLESEFVYGDYKVYDVRKMIAKSEQEIGKATAKYFFYSNIMNFFKTEITLANGEIRKRPLIETNGETGEIVWDKGRDFATVRKVLSMPQVNIVKKTEVQTGGFSKESILPKRNSDKLIARKKDWDPKKYGGFDSPTVAYSVLVVAKVEKGKSKKLKSVKELLGITIMERSSFEKNPIDFLEAKGYKEVKKDLIIKLPKYSLFELENGRKRMLASAGELQKGNELALPSKYVNFLYLASHYEKLKGSPEDNEQKQLFVEQHKHYLDEIIEQISEFSKRVILADANLDKVLSAYNKHRDKPIREQAENIIHLFTLTNLGAPAAFKYFDTTIDRKRYTSTKEVLDATLIHQSITGLYETRIDLSQLGGDGGGSSGGGGGSGGTLNLEDEYRLYETSAEPEVSPGSTWLSDFPQAWAETGGMGLAVRQAPLIIPLKATSTPVSIKQYPMSQEAKLGIKPHIQRLLDQGILVPCQSPWNTPLLPVKKPGTNDYRPVQDLREVNKRVEDIHPTVPNPYNLLSGLPPSHRWYTVLDLKDAFFCLRLHPTSQPLFAFEWRDPGMGISGQLTWTRLPQGFKNSPTLFNEALHRDLADFRIQHPDLILLQYVDDILLAATSELDCQQGTRALLLTLGNLGYRASAKKAQLCQKQVKYLGYLLKEGQRWLTEARKETVMGQPTPKTPRQLREFLGKAGFCRLFIPGFAEMAAPLYPLTKPGTLFNWGPDQQKAYQEIKQALLTAPALGLPDLTKPFELFVDEKQGYAKGVLTQKLGPWRRPVAYLSKKLDPVAAGWPPCLRMVAAIAVLRKDAGKLTMGQPLVILAPHAVEALVKQPPDRWLSNARMTHYQAMLLDTDRVQFGPVVALNPATLLPLPEEGAPHDCLEILAETHGTRPDLTDQPIPDADHTWYTDGSSFLQEGQRKAGAAVTTETEVIWARALPAGTSAQRAELIALTQALKMAEGKRLNVYTDSRYAFATAHIHGEIYRRRGWLTSEGREIKNKSEILALLKALFLPKRLSIIHCLGHQKGDSAEARGNRLADQAAREAAIKTPPDTSTLLAGKRTADGSEFEKRTADGSEFESPKKKAKVE

SEQ ID NO: 1910 - protein, 2096 aa, synthetic construct
MPAAKRVKLDGGDKKYSIGLDIGTNSVGWAVITDEYKVPSKKFKVLGNTDRHSIKKNLIGALLFDSGETAEATRLKRTARRRYTRRKNRICYLQEIFSNEMAKVDDSFFHRLEESFLVEEDKKHERHPIFGNIVDEVAYHEKYPTIYHLRKKLVDSTDKADLRLIYLALAHMIKFRGHFLIEGDLNPDNSDVDKLFIQLVQTYNQLFEENPINASGVDAKAILSARLSKSRRLENLIAQLPGEKKNGLFGNLIALSLGLTPNFKSNFDLAEDAKLQLSKDTYDDDLDNLLAQIGDQYADLFLAAKNLSDAILLSDILRVNTEITKAPLSASMIKRYDEHHQDLTLLKALVRQQLPEKYKEIFFDQSKNGYAGYIDGGASQEEFYKFIKPILEKMDGTEELLVKLNREDLLRKQRTFDNGSIPHQIHLGELHAILRRQEDFYPFLKDNREKIEKILTFRIPYYVGPLARGNSRFAWMTRKSEETITPWNFEEVVDKGASAQSFIERMTNFDKNLPNEKVLPKHSLLYEYFTVYNELTKVKYVTEGMRKPAFLSGEQKKAIVDLLFKTNRKVTVKQLKEDYFKKIECFDSVEISGVEDRFNASLGTYHDLLKIIKDKDFLDNEENEDILEDIVLTLTLFEDREMIEERLKTYAHLFDDKVMKQLKRRRYTGWGRLSRKLINGIRDKQSGKTILDFLKSDGFANRNFMQLIHDDSLTFKEDIQKAQVSGQGDSLHEHIANLAGSPAIKKGILQTVKVVDELVKVMGRHKPENIVIEMARENQTTQKGQKNSRERMKRIEEGIKELGSQILKEHPVENTQLQNEKLYLYYLQNGRDMYVDQELDINRLSDYDVDHIVPQSFLKDDSIDNKVLTRSDKARGKSDNVPSEEVVKKMKNYWRQLLNAKLITQRKFDNLTKAERGGLSELDKAGFIKRQLVETRQITKHVAQILDSRMNTKYDENDKLIREVKVITLKSKLVSDFRKDFQFYKVREINNYHHAHDAYLNAVVGTALIKKYPKLESEFVYGDYKVYDVRKMIAKSEQEIGKATAKYFFYSNIMNFFKTEITLANGEIRKRPLIETNGETGEIVWDKGRDFATVRKVLSMPQVNIVKKTEVQTGGFSKESILPKRNSDKLIARKKDWDPKKYGGFDSPTVAYSVLVVAKVEKGKSKKLKSVKELLGITIMERSSFEKNPIDFLEAKGYKEVKKDLIIKLPKYSLFELENGRKRMLASAGELQKGNELALPSKYVNFLYLASHYEKLKGSPEDNEQKQLFVEQHKHYLDEIIEQISEFSKRVILADANLDKVLSAYNKHRDKPIREQAENIIHLFTLTNLGAPAAFKYFDTTIDRKRYTSTKEVLDATLIHQSITGLYETRIDLSQLGGDGGGSSEAAAKGGSGGTLNLEDEYRLYETSAEPEVSPGSTWLSDFPQAWAETGGMGLAVRQAPLIIPLKATSTPVSIKQYPMSQEAKLGIKPHIQRLLDQGILVPCQSPWNTPLLPVKKPGTNDYRPVQDLREVNKRVEDIHPTVPNPYNLLSGLPPSHRWYTVLDLKDAFFCLRLHPTSQPLFAFEWRDPGMGISGQLTWTRLPQGFKNSPTLFNEALHRDLADFRIQHPDLILLQYVDDILLAATSELDCQQGTRALLLTLGNLGYRASAKKAQLCQKQVKYLGYLLKEGQRWLTEARKETVMGQPTPKTPRQLREFLGKAGFCRLFIPGFAEMAAPLYPLTKPGTLFNWGPDQQKAYQEIKQALLTAPALGLPDLTKPFELFVDEKQGYAKGVLTQKLGPWRRPVAYLSKKLDPVAAGWPPCLRMVAAIAVLRKDAGKLTMGQPLVILAPHAVEALVKQPPDRWLSNARMTHYQAMLLDTDRVQFGPVVALNPATLLPLPEEGAPHDCLEILAETHGTRPDLTDQPIPDADHTWYTDGSSFLQEGQRKAGAAVTTETEVIWARALPAGTSAQRAELIALTQALKMAEGKRLNVYTDSRYAFATAHIHGEIYRRRGWLTSEGREIKNKSEILALLKALFLPKRLSIIHCLGHQKGDSAEARGNRLADQAAREAAIKTPPDTSTLLAGKRTADGSEFEKRTADGSEFESPKKKAKVE

SEQ ID NO: 1911 - protein, 2091 aa, synthetic construct
MPAAKRVKLDGGDKKYSIGLDIGTNSVGWAVITDEYKVPSKKFKVLGNTDRHSIKKNLIGALLFDSGETAEATRLKRTARRRYTRRKNRICYLQEIFSNEMAKVDDSFFHRLEESFLVEEDKKHERHPIFGNIVDEVAYHEKYPTIYHLRKKLVDSTDKADLRLIYLALAHMIKFRGHFLIEGDLNPDNSDVDKLFIQLVQTYNQLFEENPINASGVDAKAILSARLSKSRRLENLIAQLPGEKKNGLFGNLIALSLGLTPNFKSNFDLAEDAKLQLSKDTYDDDLDNLLAQIGDQYADLFLAAKNLSDAILLSDILRVNTEITKAPLSASMIKRYDEHHQDLTLLKALVRQQLPEKYKEIFFDQSKNGYAGYIDGGASQEEFYKFIKPILEKMDGTEELLVKLNREDLLRKQRTFDNGSIPHQIHLGELHAILRRQEDFYPFLKDNREKIEKILTFRIPYYVGPLARGNSRFAWMTRKSEETITPWNFEEVVDKGASAQSFIERMTNFDKNLPNEKVLPKHSLLYEYFTVYNELTKVKYVTEGMRKPAFLSGEQKKAIVDLLFKTNRKVTVKQLKEDYFKKIECFDSVEISGVEDRFNASLGTYHDLLKIIKDKDFLDNEENEDILEDIVLTLTLFEDREMIEERLKTYAHLFDDKVMKQLKRRRYTGWGRLSRKLINGIRDKQSGKTILDFLKSDGFANRNFMQLIHDDSLTFKEDIQKAQVSGQGDSLHEHIANLAGSPAIKKGILQTVKVVDELVKVMGRHKPENIVIEMARENQTTQKGQKNSRERMKRIEEGIKELGSQILKEHPVENTQLQNEKLYLYYLQNGRDMYVDQELDINRLSDYDVDHIVPQSFLKDDSIDNKVLTRSDKARGKSDNVPSEEVVKKMKNYWRQLLNAKLITQRKFDNLTKAERGGLSELDKAGFIKRQLVETRQITKHVAQILDSRMNTKYDENDKLIREVKVITLKSKLVSDFRKDFQFYKVREINNYHHAHDAYLNAVVGTALIKKYPKLESEFVYGDYKVYDVRKMIAKSEQEIGKATAKYFFYSNIMNFFKTEITLANGEIRKRPLIETNGETGEIVWDKGRDFATVRKVLSMPQVNIVKKTEVQTGGFSKESILPKRNSDKLIARKKDWDPKKYGGFDSPTVAYSVLVVAKVEKGKSKKLKSVKELLGITIMERSSFEKNPIDFLEAKGYKEVKKDLIIKLPKYSLFELENGRKRMLASAGELQKGNELALPSKYVNFLYLASHYEKLKGSPEDNEQKQLFVEQHKHYLDEIIEQISEFSKRVILADANLDKVLSAYNKHRDKPIREQAENIIHLFTLTNLGAPAAFKYFDTTIDRKRYTSTKEVLDATLIHQSITGLYETRIDLSQLGGDGGGGSGSSGGTLNLEDEYRLYETSAEPEVSPGSTWLSDFPQAWAETGGMGLAVRQAPLIIPLKATSTPVSIKQYPMSQEAKLGIKPHIQRLLDQGILVPCQSPWNTPLLPVKKPGTNDYRPVQDLREVNKRVEDIHPTVPNPYNLLSGLPPSHRWYTVLDLKDAFFCLRLHPTSQPLFAFEWRDPGMGISGQLTWTRLPQGFKNSPTLFNEALHRDLADFRIQHPDLILLQYVDDILLAATSELDCQQGTRALLLTLGNLGYRASAKKAQLCQKQVKYLGYLLKEGQRWLTEARKETVMGQPTPKTPRQLREFLGKAGFCRLFIPGFAEMAAPLYPLTKPGTLFNWGPDQQKAYQEIKQALLTAPALGLPDLTKPFELFVDEKQGYAKGVLTQKLGPWRRPVAYLSKKLDPVAAGWPPCLRMVAAIAVLRKDAGKLTMGQPLVILAPHAVEALVKQPPDRWLSNARMTHYQAMLLDTDRVQFGPVVALNPATLLPLPEEGAPHDCLEILAETHGTRPDLTDQPIPDADHTWYTDGSSFLQEGQRKAGAAVTTETEVIWARALPAGTSAQRAELIALTQALKMAEGKRLNVYTDSRYAFATAHIHGEIYRRRGWLTSEGREIKNKSEILALLKALFLPKRLSIIHCLGHQKGDSAEARGNRLADQAAREAAIKTPPDTSTLLAGKRTADGSEFEKRTADGSEFESPKKKAKVE

SEQ ID NO: 1912 - protein, 2096 aa, synthetic construct
MPAAKRVKLDGGDKKYSIGLDIGTNSVGWAVITDEYKVPSKKFKVLGNTDRHSIKKNLIGALLFDSGETAEATRLKRTARRRYTRRKNRICYLQEIFSNEMAKVDDSFFHRLEESFLVEEDKKHERHPIFGNIVDEVAYHEKYPTIYHLRKKLVDSTDKADLRLIYLALAHMIKFRGHFLIEGDLNPDNSDVDKLFIQLVQTYNQLFEENPINASGVDAKAILSARLSKSRRLENLIAQLPGEKKNGLFGNLIALSLGLTPNFKSNFDLAEDAKLQLSKDTYDDDLDNLLAQIGDQYADLFLAAKNLSDAILLSDILRVNTEITKAPLSASMIKRYDEHHQDLTLLKALVRQQLPEKYKEIFFDQSKNGYAGYIDGGASQEEFYKFIKPILEKMDGTEELLVKLNREDLLRKQRTFDNGSIPHQIHLGELHAILRRQEDFYPFLKDNREKIEKILTFRIPYYVGPLARGNSRFAWMTRKSEETITPWNFEEVVDKGASAQSFIERMTNFDKNLPNEKVLPKHSLLYEYFTVYNELTKVKYVTEGMRKPAFLSGEQKKAIVDLLFKTNRKVTVKQLKEDYFKKIECFDSVEISGVEDRFNASLGTYHDLLKIIKDKDFLDNEENEDILEDIVLTLTLFEDREMIEERLKTYAHLFDDKVMKQLKRRRYTGWGRLSRKLINGIRDKQSGKTILDFLKSDGFANRNFMQLIHDDSLTFKEDIQKAQVSGQGDSLHEHIANLAGSPAIKKGILQTVKVVDELVKVMGRHKPENIVIEMARENQTTQKGQKNSRERMKRIEEGIKELGSQILKEHPVENTQLQNEKLYLYYLQNGRDMYVDQELDINRLSDYDVDHIVPQSFLKDDSIDNKVLTRSDKARGKSDNVPSEEVVKKMKNYWRQLLNAKLITQRKFDNLTKAERGGLSELDKAGFIKRQLVETRQITKHVAQILDSRMNTKYDENDKLIREVKVITLKSKLVSDFRKDFQFYKVREINNYHHAHDAYLNAVVGTALIKKYPKLESEFVYGDYKVYDVRKMIAKSEQEIGKATAKYFFYSNIMNFFKTEITLANGEIRKRPLIETNGETGEIVWDKGRDFATVRKVLSMPQVNIVKKTEVQTGGFSKESILPKRNSDKLIARKKDWDPKKYGGFDSPTVAYSVLVVAKVEKGKSKKLKSVKELLGITIMERSSFEKNPIDFLEAKGYKEVKKDLIIKLPKYSLFELENGRKRMLASAGELQKGNELALPSKYVNFLYLASHYEKLKGSPEDNEQKQLFVEQHKHYLDEIIEQISEFSKRVILADANLDKVLSAYNKHRDKPIREQAENIIHLFTLTNLGAPAAFKYFDTTIDRKRYTSTKEVLDATLIHQSITGLYETRIDLSQLGGDGGPAPGSSEAAAKGGTLNLEDEYRLYETSAEPEVSPGSTWLSDFPQAWAETGGMGLAVRQAPLIIPLKATSTPVSIKQYPMSQEAKLGIKPHIQRLLDQGILVPCQSPWNTPLLPVKKPGTNDYRPVQDLREVNKRVEDIHPTVPNPYNLLSGLPPSHRWYTVLDLKDAFFCLRLHPTSQPLFAFEWRDPGMGISGQLTWTRLPQGFKNSPTLFNEALHRDLADFRIQHPDLILLQYVDDILLAATSELDCQQGTRALLLTLGNLGYRASAKKAQLCQKQVKYLGYLLKEGQRWLTEARKETVMGQPTPKTPRQLREFLGKAGFCRLFIPGFAEMAAPLYPLTKPGTLFNWGPDQQKAYQEIKQALLTAPALGLPDLTKPFELFVDEKQGYAKGVLTQKLGPWRRPVAYLSKKLDPVAAGWPPCLRMVAAIAVLRKDAGKLTMGQPLVILAPHAVEALVKQPPDRWLSNARMTHYQAMLLDTDRVQFGPVVALNPATLLPLPEEGAPHDCLEILAETHGTRPDLTDQPIPDADHTWYTDGSSFLQEGQRKAGAAVTTETEVIWARALPAGTSAQRAELIALTQALKMAEGKRLNVYTDSRYAFATAHIHGEIYRRRGWLTSEGREIKNKSEILALLKALFLPKRLSIIHCLGHQKGDSAEARGNRLADQAAREAAIKTPPDTSTLLAGKRTADGSEFEKRTADGSEFESPKKKAKVE

SEQ ID NO: 1913 - protein, 2096 aa, synthetic construct
MPAAKRVKLDGGDKKYSIGLDIGTNSVGWAVITDEYKVPSKKFKVLGNTDRHSIKKNLIGALLFDSGETAEATRLKRTARRRYTRRKNRICYLQEIFSNEMAKVDDSFFHRLEESFLVEEDKKHERHPIFGNIVDEVAYHEKYPTIYHLRKKLVDSTDKADLRLIYLALAHMIKFRGHFLIEGDLNPDNSDVDKLFIQLVQTYNQLFEENPINASGVDAKAILSARLSKSRRLENLIAQLPGEKKNGLFGNLIALSLGLTPNFKSNFDLAEDAKLQLSKDTYDDDLDNLLAQIGDQYADLFLAAKNLSDAILLSDILRVNTEITKAPLSASMIKRYDEHHQDLTLLKALVRQQLPEKYKEIFFDQSKNGYAGYIDGGASQEEFYKFIKPILEKMDGTEELLVKLNREDLLRKQRTFDNGSIPHQIHLGELHAILRRQEDFYPFLKDNREKIEKILTFRIPYYVGPLARGNSRFAWMTRKSEETITPWNFEEVVDKGASAQSFIERMTNFDKNLPNEKVLPKHSLLYEYFTVYNELTKVKYVTEGMRKPAFLSGEQKKAIVDLLFKTNRKVTVKQLKEDYFKKIECFDSVEISGVEDRFNASLGTYHDLLKIIKDKDFLDNEENEDILEDIVLTLTLFEDREMIEERLKTYAHLFDDKVMKQLKRRRYTGWGRLSRKLINGIRDKQSGKTILDFLKSDGFANRNFMQLIHDDSLTFKEDIQKAQVSGQGDSLHEHIANLAGSPAIKKGILQTVKVVDELVKVMGRHKPENIVIEMARENQTTQKGQKNSRERMKRIEEGIKELGSQILKEHPVENTQLQNEKLYLYYLQNGRDMYVDQELDINRLSDYDVDHIVPQSFLKDDSIDNKVLTRSDKARGKSDNVPSEEVVKKMKNYWRQLLNAKLITQRKFDNLTKAERGGLSELDKAGFIKRQLVETRQITKHVAQILDSRMNTKYDENDKLIREVKVITLKSKLVSDFRKDFQFYKVREINNYHHAHDAYLNAVVGTALIKKYPKLESEFVYGDYKVYDVRKMIAKSEQEIGKATAKYFFYSNIMNFFKTEITLANGEIRKRPLIETNGETGEIVWDKGRDFATVRKVLSMPQVNIVKKTEVQTGGFSKESILPKRNSDKLIARKKDWDPKKYGGFDSPTVAYSVLVVAKVEKGKSKKLKSVKELLGITIMERSSFEKNPIDFLEAKGYKEVKKDLIIKLPKYSLFELENGRKRMLASAGELQKGNELALPSKYVNFLYLASHYEKLKGSPEDNEQKQLFVEQHKHYLDEIIEQISEFSKRVILADANLDKVLSAYNKHRDKPIREQAENIIHLFTLTNLGAPAAFKYFDTTIDRKRYTSTKEVLDATLIHQSITGLYETRIDLSQLGGDGGEAAAKGSSGGSGGTLNLEDEYRLYETSAEPEVSPGSTWLSDFPQAWAETGGMGLAVRQAPLIIPLKATSTPVSIKQYPMSQEAKLGIKPHIQRLLDQGILVPCQSPWNTPLLPVKKPGTNDYRPVQDLREVNKRVEDIHPTVPNPYNLLSGLPPSHRWYTVLDLKDAFFCLRLHPTSQPLFAFEWRDPGMGISGQLTWTRLPQGFKNSPTLFNEALHRDLADFRIQHPDLILLQYVDDILLAATSELDCQQGTRALLLTLGNLGYRASAKKAQLCQKQVKYLGYLLKEGQRWLTEARKETVMGQPTPKTPRQLREFLGKAGFCRLFIPGFAEMAAPLYPLTKPGTLFNWGPDQQKAYQEIKQALLTAPALGLPDLTKPFELFVDEKQGYAKGVLTQKLGPWRRPVAYLSKKLDPVAAGWPPCLRMVAAIAVLRKDAGKLTMGQPLVILAPHAVEALVKQPPDRWLSNARMTHYQAMLLDTDRVQFGPVVALNPATLLPLPEEGAPHDCLEILAETHGTRPDLTDQPIPDADHTWYTDGSSFLQEGQRKAGAAVTTETEVIWARALPAGTSAQRAELIALTQALKMAEGKRLNVYTDSRYAFATAHIHGEIYRRRGWLTSEGREIKNKSEILALLKALFLPKRLSIIHCLGHQKGDSAEARGNRLADQAAREAAIKTPPDTSTLLAGKRTADGSEFEKRTADGSEFESPKKKAKVE

SEQ ID NO: 1914 - protein, 2091 aa, synthetic construct
MPAAKRVKLDGGDKKYSIGLDIGTNSVGWAVITDEYKVPSKKFKVLGNTDRHSIKKNLIGALLFDSGETAEATRLKRTARRRYTRRKNRICYLQEIFSNEMAKVDDSFFHRLEESFLVEEDKKHERHPIFGNIVDEVAYHEKYPTIYHLRKKLVDSTDKADLRLIYLALAHMIKFRGHFLIEGDLNPDNSDVDKLFIQLVQTYNQLFEENPINASGVDAKAILSARLSKSRRLENLIAQLPGEKKNGLFGNLIALSLGLTPNFKSNFDLAEDAKLQLSKDTYDDDLDNLLAQIGDQYADLFLAAKNLSDAILLSDILRVNTEITKAPLSASMIKRYDEHHQDLTLLKALVRQQLPEKYKEIFFDQSKNGYAGYIDGGASQEEFYKFIKPILEKMDGTEELLVKLNREDLLRKQRTFDNGSIPHQIHLGELHAILRRQEDFYPFLKDNREKIEKILTFRIPYYVGPLARGNSRFAWMTRKSEETITPWNFEEVVDKGASAQSFIERMTNFDKNLPNEKVLPKHSLLYEYFTVYNELTKVKYVTEGMRKPAFLSGEQKKAIVDLLFKTNRKVTVKQLKEDYFKKIECFDSVEISGVEDRFNASLGTYHDLLKIIKDKDFLDNEENEDILEDIVLTLTLFEDREMIEERLKTYAHLFDDKVMKQLKRRRYTGWGRLSRKLINGIRDKQSGKTILDFLKSDGFANRNFMQLIHDDSLTFKEDIQKAQVSGQGDSLHEHIANLAGSPAIKKGILQTVKVVDELVKVMGRHKPENIVIEMARENQTTQKGQKNSRERMKRIEEGIKELGSQILKEHPVENTQLQNEKLYLYYLQNGRDMYVDQELDINRLSDYDVDHIVPQSFLKDDSIDNKVLTRSDKARGKSDNVPSEEVVKKMKNYWRQLLNAKLITQRKFDNLTKAERGGLSELDKAGFIKRQLVETRQITKHVAQILDSRMNTKYDENDKLIREVKVITLKSKLVSDFRKDFQFYKVREINNYHHAHDAYLNAVVGTALIKKYPKLESEFVYGDYKVYDVRKMIAKSEQEIGKATAKYFFYSNIMNFFKTEITLANGEIRKRPLIETNGETGEIVWDKGRDFATVRKVLSMPQVNIVKKTEVQTGGFSKESILPKRNSDKLIARKKDWDPKKYGGFDSPTVAYSVLVVAKVEKGKSKKLKSVKELLGITIMERSSFEKNPIDFLEAKGYKEVKKDLIIKLPKYSLFELENGRKRMLASAGELQKGNELALPSKYVNFLYLASHYEKLKGSPEDNEQKQLFVEQHKHYLDEIIEQISEFSKRVILADANLDKVLSAYNKHRDKPIREQAENIIHLFTLTNLGAPAAFKYFDTTIDRKRYTSTKEVLDATLIHQSITGLYETRIDLSQLGGDGGGGSPAPGGTLNLEDEYRLYETSAEPEVSPGSTWLSDFPQAWAETGGMGLAVRQAPLIIPLKATSTPVSIKQYPMSQEAKLGIKPHIQRLLDQGILVPCQSPWNTPLLPVKKPGTNDYRPVQDLREVNKRVEDIHPTVPNPYNLLSGLPPSHRWYTVLDLKDAFFCLRLHPTSQPLFAFEWRDPGMGISGQLTWTRLPQGFKNSPTLFNEALHRDLADFRIQHPDLILLQYVDDILLAATSELDCQQGTRALLLTLGNLGYRASAKKAQLCQKQVKYLGYLLKEGQRWLTEARKETVMGQPTPKTPRQLREFLGKAGFCRLFIPGFAEMAAPLYPLTKPGTLFNWGPDQQKAYQEIKQALLTAPALGLPDLTKPFELFVDEKQGYAKGVLTQKLGPWRRPVAYLSKKLDPVAAGWPPCLRMVAAIAVLRKDAGKLTMGQPLVILAPHAVEALVKQPPDRWLSNARMTHYQAMLLDTDRVQFGPVVALNPATLLPLPEEGAPHDCLEILAETHGTRPDLTDQPIPDADHTWYTDGSSFLQEGQRKAGAAVTTETEVIWARALPAGTSAQRAELIALTQALKMAEGKRLNVYTDSRYAFATAHIHGEIYRRRGWLTSEGREIKNKSEILALLKALFLPKRLSIIHCLGHQKGDSAEARGNRLADQAAREAAIKTPPDTSTLLAGKRTADGSEFEKRTADGSEFESPKKKAKVE

SEQ ID NO: 1915 - protein, 2096 aa, synthetic construct
MPAAKRVKLDGGDKKYSIGLDIGTNSVGWAVITDEYKVPSKKFKVLGNTDRHSIKKNLIGALLFDSGETAEATRLKRTARRRYTRRKNRICYLQEIFSNEMAKVDDSFFHRLEESFLVEEDKKHERHPIFGNIVDEVAYHEKYPTIYHLRKKLVDSTDKADLRLIYLALAHMIKFRGHFLIEGDLNPDNSDVDKLFIQLVQTYNQLFEENPINASGVDAKAILSARLSKSRRLENLIAQLPGEKKNGLFGNLIALSLGLTPNFKSNFDLAEDAKLQLSKDTYDDDLDNLLAQIGDQYADLFLAAKNLSDAILLSDILRVNTEITKAPLSASMIKRYDEHHQDLTLLKALVRQQLPEKYKEIFFDQSKNGYAGYIDGGASQEEFYKFIKPILEKMDGTEELLVKLNREDLLRKQRTFDNGSIPHQIHLGELHAILRRQEDFYPFLKDNREKIEKILTFRIPYYVGPLARGNSRFAWMTRKSEETITPWNFEEVVDKGASAQSFIERMTNFDKNLPNEKVLPKHSLLYEYFTVYNELTKVKYVTEGMRKPAFLSGEQKKAIVDLLFKTNRKVTVKQLKEDYFKKIECFDSVEISGVEDRFNASLGTYHDLLKIIKDKDFLDNEENEDILEDIVLTLTLFEDREMIEERLKTYAHLFDDKVMKQLKRRRYTGWGRLSRKLINGIRDKQSGKTILDFLKSDGFANRNFMQLIHDDSLTFKEDIQKAQVSGQGDSLHEHIANLAGSPAIKKGILQTVKVVDELVKVMGRHKPENIVIEMARENQTTQKGQKNSRERMKRIEEGIKELGSQILKEHPVENTQLQNEKLYLYYLQNGRDMYVDQELDINRLSDYDVDHIVPQSFLKDDSIDNKVLTRSDKARGKSDNVPSEEVVKKMKNYWRQLLNAKLITQRKFDNLTKAERGGLSELDKAGFIKRQLVETRQITKHVAQILDSRMNTKYDENDKLIREVKVITLKSKLVSDFRKDFQFYKVREINNYHHAHDAYLNAVVGTALIKKYPKLESEFVYGDYKVYDVRKMIAKSEQEIGKATAKYFFYSNIMNFFKTEITLANGEIRKRPLIETNGETGEIVWDKGRDFATVRKVLSMPQVNIVKKTEVQTGGFSKESILPKRNSDKLIARKKDWDPKKYGGFDSPTVAYSVLVVAKVEKGKSKKLKSVKELLGITIMERSSFEKNPIDFLEAKGYKEVKKDLIIKLPKYSLFELENGRKRMLASAGELQKGNELALPSKYVNFLYLASHYEKLKGSPEDNEQKQLFVEQHKHYLDEIIEQISEFSKRVILADANLDKVLSAYNKHRDKPIREQAENIIHLFTLTNLGAPAAFKYFDTTIDRKRYTSTKEVLDATLIHQSITGLYETRIDLSQLGGDGGGGSEAAAKGGGGGTLNLEDEYRLYETSAEPEVSPGSTWLSDFPQAWAETGGMGLAVRQAPLIIPLKATSTPVSIKQYPMSQEAKLGIKPHIQRLLDQGILVPCQSPWNTPLLPVKKPGTNDYRPVQDLREVNKRVEDIHPTVPNPYNLLSGLPPSHRWYTVLDLKDAFFCLRLHPTSQPLFAFEWRDPGMGISGQLTWTRLPQGFKNSPTLFNEALHRDLADFRIQHPDLILLQYVDDILLAATSELDCQQGTRALLLTLGNLGYRASAKKAQLCQKQVKYLGYLLKEGQRWLTEARKETVMGQPTPKTPRQLREFLGKAGFCRLFIPGFAEMAAPLYPLTKPGTLFNWGPDQQKAYQEIKQALLTAPALGLPDLTKPFELFVDEKQGYAKGVLTQKLGPWRRPVAYLSKKLDPVAAGWPPCLRMVAAIAVLRKDAGKLTMGQPLVILAPHAVEALVKQPPDRWLSNARMTHYQAMLLDTDRVQFGPVVALNPATLLPLPEEGAPHDCLEILAETHGTRPDLTDQPIPDADHTWYTDGSSFLQEGQRKAGAAVTTETEVIWARALPAGTSAQRAELIALTQALKMAEGKRLNVYTDSRYAFATAHIHGEIYRRRGWLTSEGREIKNKSEILALLKALFLPKRLSIIHCLGHQKGDSAEARGNRLADQAAREAAIKTPPDTSTLLAGKRTADGSEFEKRTADGSEFESPKKKAKVE

SEQ ID NO: 1916 - protein, 2097 aa, synthetic construct
MPAAKRVKLDGGDKKYSIGLDIGTNSVGWAVITDEYKVPSKKFKVLGNTDRHSIKKNLIGALLFDSGETAEATRLKRTARRRYTRRKNRICYLQEIFSNEMAKVDDSFFHRLEESFLVEEDKKHERHPIFGNIVDEVAYHEKYPTIYHLRKKLVDSTDKADLRLIYLALAHMIKFRGHFLIEGDLNPDNSDVDKLFIQLVQTYNQLFEENPINASGVDAKAILSARLSKSRRLENLIAQLPGEKKNGLFGNLIALSLGLTPNFKSNFDLAEDAKLQLSKDTYDDDLDNLLAQIGDQYADLFLAAKNLSDAILLSDILRVNTEITKAPLSASMIKRYDEHHQDLTLLKALVRQQLPEKYKEIFFDQSKNGYAGYIDGGASQEEFYKFIKPILEKMDGTEELLVKLNREDLLRKQRTFDNGSIPHQIHLGELHAILRRQEDFYPFLKDNREKIEKILTFRIPYYVGPLARGNSRFAWMTRKSEETITPWNFEEVVDKGASAQSFIERMTNFDKNLPNEKVLPKHSLLYEYFTVYNELTKVKYVTEGMRKPAFLSGEQKKAIVDLLFKTNRKVTVKQLKEDYFKKIECFDSVEISGVEDRFNASLGTYHDLLKIIKDKDFLDNEENEDILEDIVLTLTLFEDREMIEERLKTYAHLFDDKVMKQLKRRRYTGWGRLSRKLINGIRDKQSGKTILDFLKSDGFANRNFMQLIHDDSLTFKEDIQKAQVSGQGDSLHEHIANLAGSPAIKKGILQTVKVVDELVKVMGRHKPENIVIEMARENQTTQKGQKNSRERMKRIEEGIKELGSQILKEHPVENTQLQNEKLYLYYLQNGRDMYVDQELDINRLSDYDVDHIVPQSFLKDDSIDNKVLTRSDKARGKSDNVPSEEVVKKMKNYWRQLLNAKLITQRKFDNLTKAERGGLSELDKAGFIKRQLVETRQITKHVAQILDSRMNTKYDENDKLIREVKVITLKSKLVSDFRKDFQFYKVREINNYHHAHDAYLNAVVGTALIKKYPKLESEFVYGDYKVYDVRKMIAKSEQEIGKATAKYFFYSNIMNFFKTEITLANGEIRKRPLIETNGETGEIVWDKGRDFATVRKVLSMPQVNIVKKTEVQTGGFSKESILPKRNSDKLIARKKDWDPKKYGGFDSPTVAYSVLVVAKVEKGKSKKLKSVKELLGITIMERSSFEKNPIDFLEAKGYKEVKKDLIIKLPKYSLFELENGRKRMLASAGELQKGNELALPSKYVNFLYLASHYEKLKGSPEDNEQKQLFVEQHKHYLDEIIEQISEFSKRVILADANLDKVLSAYNKHRDKPIREQAENIIHLFTLTNLGAPAAFKYFDTTIDRKRYTSTKEVLDATLIHQSITGLYETRIDLSQLGGDGGGGSGGSGGSGGSGGTLNLEDEYRLYETSAEPEVSPGSTWLSDFPQAWAETGGMGLAVRQAPLIIPLKATSTPVSIKQYPMSQEAKLGIKPHIQRLLDQGILVPCQSPWNTPLLPVKKPGTNDYRPVQDLREVNKRVEDIHPTVPNPYNLLSGLPPSHRWYTVLDLKDAFFCLRLHPTSQPLFAFEWRDPGMGISGQLTWTRLPQGFKNSPTLFNEALHRDLADFRIQHPDLILLQYVDDILLAATSELDCQQGTRALLLTLGNLGYRASAKKAQLCQKQVKYLGYLLKEGQRWLTEARKETVMGQPTPKTPRQLREFLGKAGFCRLFIPGFAEMAAPLYPLTKPGTLFNWGPDQQKAYQEIKQALLTAPALGLPDLTKPFELFVDEKQGYAKGVLTQKLGPWRRPVAYLSKKLDPVAAGWPPCLRMVAAIAVLRKDAGKLTMGQPLVILAPHAVEALVKQPPDRWLSNARMTHYQAMLLDTDRVQFGPVVALNPATLLPLPEEGAPHDCLEILAETHGTRPDLTDQPIPDADHTWYTDGSSFLQEGQRKAGAAVTTETEVIWARALPAGTSAQRAELIALTQALKMAEGKRLNVYTDSRYAFATAHIHGEIYRRRGWLTSEGREIKNKSEILALLKALFLPKRLSIIHCLGHQKGDSAEARGNRLADQAAREAAIKTPPDTSTLLAGKRTADGSEFEKRTADGSEFESPKKKAKVE

SEQ ID NO: 1917 - protein, 2090 aa, synthetic construct
MPAAKRVKLDGGDKKYSIGLDIGTNSVGWAVITDEYKVPSKKFKVLGNTDRHSIKKNLIGALLFDSGETAEATRLKRTARRRYTRRKNRICYLQEIFSNEMAKVDDSFFHRLEESFLVEEDKKHERHPIFGNIVDEVAYHEKYPTIYHLRKKLVDSTDKADLRLIYLALAHMIKFRGHFLIEGDLNPDNSDVDKLFIQLVQTYNQLFEENPINASGVDAKAILSARLSKSRRLENLIAQLPGEKKNGLFGNLIALSLGLTPNFKSNFDLAEDAKLQLSKDTYDDDLDNLLAQIGDQYADLFLAAKNLSDAILLSDILRVNTEITKAPLSASMIKRYDEHHQDLTLLKALVRQQLPEKYKEIFFDQSKNGYAGYIDGGASQEEFYKFIKPILEKMDGTEELLVKLNREDLLRKQRTFDNGSIPHQIHLGELHAILRRQEDFYPFLKDNREKIEKILTFRIPYYVGPLARGNSRFAWMTRKSEETITPWNFEEVVDKGASAQSFIERMTNFDKNLPNEKVLPKHSLLYEYFTVYNELTKVKYVTEGMRKPAFLSGEQKKAIVDLLFKTNRKVTVKQLKEDYFKKIECFDSVEISGVEDRFNASLGTYHDLLKIIKDKDFLDNEENEDILEDIVLTLTLFEDREMIEERLKTYAHLFDDKVMKQLKRRRYTGWGRLSRKLINGIRDKQSGKTILDFLKSDGFANRNFMQLIHDDSLTFKEDIQKAQVSGQGDSLHEHIANLAGSPAIKKGILQTVKVVDELVKVMGRHKPENIVIEMARENQTTQKGQKNSRERMKRIEEGIKELGSQILKEHPVENTQLQNEKLYLYYLQNGRDMYVDQELDINRLSDYDVDHIVPQSFLKDDSIDNKVLTRSDKARGKSDNVPSEEVVKKMKNYWRQLLNAKLITQRKFDNLTKAERGGLSELDKAGFIKRQLVETRQITKHVAQILDSRMNTKYDENDKLIREVKVITLKSKLVSDFRKDFQFYKVREINNYHHAHDAYLNAVVGTALIKKYPKLESEFVYGDYKVYDVRKMIAKSEQEIGKATAKYFFYSNIMNFFKTEITLANGEIRKRPLIETNGETGEIVWDKGRDFATVRKVLSMPQVNIVKKTEVQTGGFSKESILPKRNSDKLIARKKDWDPKKYGGFDSPTVAYSVLVVAKVEKGKSKKLKSVKELLGITIMERSSFEKNPIDFLEAKGYKEVKKDLIIKLPKYSLFELENGRKRMLASAGELQKGNELALPSKYVNFLYLASHYEKLKGSPEDNEQKQLFVEQHKHYLDEIIEQISEFSKRVILADANLDKVLSAYNKHRDKPIREQAENIIHLFTLTNLGAPAAFKYFDTTIDRKRYTSTKEVLDATLIHQSITGLYETRIDLSQLGGDGGGGGGGGGTLNLEDEYRLYETSAEPEVSPGSTWLSDFPQAWAETGGMGLAVRQAPLIIPLKATSTPVSIKQYPMSQEAKLGIKPHIQRLLDQGILVPCQSPWNTPLLPVKKPGTNDYRPVQDLREVNKRVEDIHPTVPNPYNLLSGLPPSHRWYTVLDLKDAFFCLRLHPTSQPLFAFEWRDPGMGISGQLTWTRLPQGFKNSPTLFNEALHRDLADFRIQHPDLILLQYVDDILLAATSELDCQQGTRALLLTLGNLGYRASAKKAQLCQKQVKYLGYLLKEGQRWLTEARKETVMGQPTPKTPRQLREFLGKAGFCRLFIPGFAEMAAPLYPLTKPGTLFNWGPDQQKAYQEIKQALLTAPALGLPDLTKPFELFVDEKQGYAKGVLTQKLGPWRRPVAYLSKKLDPVAAGWPPCLRMVAAIAVLRKDAGKLTMGQPLVILAPHAVEALVKQPPDRWLSNARMTHYQAMLLDTDRVQFGPVVALNPATLLPLPEEGAPHDCLEILAETHGTRPDLTDQPIPDADHTWYTDGSSFLQEGQRKAGAAVTTETEVIWARALPAGTSAQRAELIALTQALKMAEGKRLNVYTDSRYAFATAHIHGEIYRRRGWLTSEGREIKNKSEILALLKALFLPKRLSIIHCLGHQKGDSAEARGNRLADQAAREAAIKTPPDTSTLLAGKRTADGSEFEKRTADGSEFESPKKKAKVE

SEQ ID NO: 1918 - protein, 2131 aa, synthetic construct
MPAAKRVKLDGGDKKYSIGLDIGTNSVGWAVITDEYKVPSKKFKVLGNTDRHSIKKNLIGALLFDSGETAEATRLKRTARRRYTRRKNRICYLQEIFSNEMAKVDDSFFHRLEESFLVEEDKKHERHPIFGNIVDEVAYHEKYPTIYHLRKKLVDSTDKADLRLIYLALAHMIKFRGHFLIEGDLNPDNSDVDKLFIQLVQTYNQLFEENPINASGVDAKAILSARLSKSRRLENLIAQLPGEKKNGLFGNLIALSLGLTPNFKSNFDLAEDAKLQLSKDTYDDDLDNLLAQIGDQYADLFLAAKNLSDAILLSDILRVNTEITKAPLSASMIKRYDEHHQDLTLLKALVRQQLPEKYKEIFFDQSKNGYAGYIDGGASQEEFYKFIKPILEKMDGTEELLVKLNREDLLRKQRTFDNGSIPHQIHLGELHAILRRQEDFYPFLKDNREKIEKILTFRIPYYVGPLARGNSRFAWMTRKSEETITPWNFEEVVDKGASAQSFIERMTNFDKNLPNEKVLPKHSLLYEYFTVYNELTKVKYVTEGMRKPAFLSGEQKKAIVDLLFKTNRKVTVKQLKEDYFKKIECFDSVEISGVEDRFNASLGTYHDLLKIIKDKDFLDNEENEDILEDIVLTLTLFEDREMIEERLKTYAHLFDDKVMKQLKRRRYTGWGRLSRKLINGIRDKQSGKTILDFLKSDGFANRNFMQLIHDDSLTFKEDIQKAQVSGQGDSLHEHIANLAGSPAIKKGILQTVKVVDELVKVMGRHKPENIVIEMARENQTTQKGQKNSRERMKRIEEGIKELGSQILKEHPVENTQLQNEKLYLYYLQNGRDMYVDQELDINRLSDYDVDHIVPQSFLKDDSIDNKVLTRSDKARGKSDNVPSEEVVKKMKNYWRQLLNAKLITQRKFDNLTKAERGGLSELDKAGFIKRQLVETRQITKHVAQILDSRMNTKYDENDKLIREVKVITLKSKLVSDFRKDFQFYKVREINNYHHAHDAYLNAVVGTALIKKYPKLESEFVYGDYKVYDVRKMIAKSEQEIGKATAKYFFYSNIMNFFKTEITLANGEIRKRPLIETNGETGEIVWDKGRDFATVRKVLSMPQVNIVKKTEVQTGGFSKESILPKRNSDKLIARKKDWDPKKYGGFDSPTVAYSVLVVAKVEKGKSKKLKSVKELLGITIMERSSFEKNPIDFLEAKGYKEVKKDLIIKLPKYSLFELENGRKRMLASAGELQKGNELALPSKYVNFLYLASHYEKLKGSPEDNEQKQLFVEQHKHYLDEIIEQISEFSKRVILADANLDKVLSAYNKHRDKPIREQAENIIHLFTLTNLGAPAAFKYFDTTIDRKRYTSTKEVLDATLIHQSITGLYETRIDLSQLGGDGGAEAAAKEAAAKEAAAKEAAAKALEAEAAAKEAAAKEAAAKEAAAKAGGTLNLEDEYRLYETSAEPEVSPGSTWLSDFPQAWAETGGMGLAVRQAPLIIPLKATSTPVSIKQYPMSQEAKLGIKPHIQRLLDQGILVPCQSPWNTPLLPVKKPGTNDYRPVQDLREVNKRVEDIHPTVPNPYNLLSGLPPSHRWYTVLDLKDAFFCLRLHPTSQPLFAFEWRDPGMGISGQLTWTRLPQGFKNSPTLFNEALHRDLADFRIQHPDLILLQYVDDILLAATSELDCQQGTRALLLTLGNLGYRASAKKAQLCQKQVKYLGYLLKEGQRWLTEARKETVMGQPTPKTPRQLREFLGKAGFCRLFIPGFAEMAAPLYPLTKPGTLFNWGPDQQKAYQEIKQALLTAPALGLPDLTKPFELFVDEKQGYAKGVLTQKLGPWRRPVAYLSKKLDPVAAGWPPCLRMVAAIAVLRKDAGKLTMGQPLVILAPHAVEALVKQPPDRWLSNARMTHYQAMLLDTDRVQFGPVVALNPATLLPLPEEGAPHDCLEILAETHGTRPDLTDQPIPDADHTWYTDGSSFLQEGQRKAGAAVTTETEVIWARALPAGTSAQRAELIALTQALKMAEGKRLNVYTDSRYAFATAHIHGEIYRRRGWLTSEGREIKNKSEILALLKALFLPKRLSIIHCLGHQKGDSAEARGNRLADQAAREAAIKTPPDTSTLLAGKRTADGSEFEKRTADGSEFESPKKKAKVE

SEQ ID NO: 1919 - protein, 2096 aa, synthetic construct
MPAAKRVKLDGGDKKYSIGLDIGTNSVGWAVITDEYKVPSKKFKVLGNTDRHSIKKNLIGALLFDSGETAEATRLKRTARRRYTRRKNRICYLQEIFSNEMAKVDDSFFHRLEESFLVEEDKKHERHPIFGNIVDEVAYHEKYPTIYHLRKKLVDSTDKADLRLIYLALAHMIKFRGHFLIEGDLNPDNSDVDKLFIQLVQTYNQLFEENPINASGVDAKAILSARLSKSRRLENLIAQLPGEKKNGLFGNLIALSLGLTPNFKSNFDLAEDAKLQLSKDTYDDDLDNLLAQIGDQYADLFLAAKNLSDAILLSDILRVNTEITKAPLSASMIKRYDEHHQDLTLLKALVRQQLPEKYKEIFFDQSKNGYAGYIDGGASQEEFYKFIKPILEKMDGTEELLVKLNREDLLRKQRTFDNGSIPHQIHLGELHAILRRQEDFYPFLKDNREKIEKILTFRIPYYVGPLARGNSRFAWMTRKSEETITPWNFEEVVDKGASAQSFIERMTNFDKNLPNEKVLPKHSLLYEYFTVYNELTKVKYVTEGMRKPAFLSGEQKKAIVDLLFKTNRKVTVKQLKEDYFKKIECFDSVEISGVEDRFNASLGTYHDLLKIIKDKDFLDNEENEDILEDIVLTLTLFEDREMIEERLKTYAHLFDDKVMKQLKRRRYTGWGRLSRKLINGIRDKQSGKTILDFLKSDGFANRNFMQLIHDDSLTFKEDIQKAQVSGQGDSLHEHIANLAGSPAIKKGILQTVKVVDELVKVMGRHKPENIVIEMARENQTTQKGQKNSRERMKRIEEGIKELGSQILKEHPVENTQLQNEKLYLYYLQNGRDMYVDQELDINRLSDYDVDHIVPQSFLKDDSIDNKVLTRSDKARGKSDNVPSEEVVKKMKNYWRQLLNAKLITQRKFDNLTKAERGGLSELDKAGFIKRQLVETRQITKHVAQILDSRMNTKYDENDKLIREVKVITLKSKLVSDFRKDFQFYKVREINNYHHAHDAYLNAVVGTALIKKYPKLESEFVYGDYKVYDVRKMIAKSEQEIGKATAKYFFYSNIMNFFKTEITLANGEIRKRPLIETNGETGEIVWDKGRDFATVRKVLSMPQVNIVKKTEVQTGGFSKESILPKRNSDKLIARKKDWDPKKYGGFDSPTVAYSVLVVAKVEKGKSKKLKSVKELLGITIMERSSFEKNPIDFLEAKGYKEVKKDLIIKLPKYSLFELENGRKRMLASAGELQKGNELALPSKYVNFLYLASHYEKLKGSPEDNEQKQLFVEQHKHYLDEIIEQISEFSKRVILADANLDKVLSAYNKHRDKPIREQAENIIHLFTLTNLGAPAAFKYFDTTIDRKRYTSTKEVLDATLIHQSITGLYETRIDLSQLGGDGGPAPEAAAKGSSGGTLNLEDEYRLYETSAEPEVSPGSTWLSDFPQAWAETGGMGLAVRQAPLIIPLKATSTPVSIKQYPMSQEAKLGIKPHIQRLLDQGILVPCQSPWNTPLLPVKKPGTNDYRPVQDLREVNKRVEDIHPTVPNPYNLLSGLPPSHRWYTVLDLKDAFFCLRLHPTSQPLFAFEWRDPGMGISGQLTWTRLPQGFKNSPTLFNEALHRDLADFRIQHPDLILLQYVDDILLAATSELDCQQGTRALLLTLGNLGYRASAKKAQLCQKQVKYLGYLLKEGQRWLTEARKETVMGQPTPKTPRQLREFLGKAGFCRLFIPGFAEMAAPLYPLTKPGTLFNWGPDQQKAYQEIKQALLTAPALGLPDLTKPFELFVDEKQGYAKGVLTQKLGPWRRPVAYLSKKLDPVAAGWPPCLRMVAAIAVLRKDAGKLTMGQPLVILAPHAVEALVKQPPDRWLSNARMTHYQAMLLDTDRVQFGPVVALNPATLLPLPEEGAPHDCLEILAETHGTRPDLTDQPIPDADHTWYTDGSSFLQEGQRKAGAAVTTETEVIWARALPAGTSAQRAELIALTQALKMAEGKRLNVYTDSRYAFATAHIHGEIYRRRGWLTSEGREIKNKSEILALLKALFLPKRLSIIHCLGHQKGDSAEARGNRLADQAAREAAIKTPPDTSTLLAGKRTADGSEFEKRTADGSEFESPKKKAKVE

SEQ ID NO: 1920 - protein, 2096 aa, synthetic construct
MPAAKRVKLDGGDKKYSIGLDIGTNSVGWAVITDEYKVPSKKFKVLGNTDRHSIKKNLIGALLFDSGETAEATRLKRTARRRYTRRKNRICYLQEIFSNEMAKVDDSFFHRLEESFLVEEDKKHERHPIFGNIVDEVAYHEKYPTIYHLRKKLVDSTDKADLRLIYLALAHMIKFRGHFLIEGDLNPDNSDVDKLFIQLVQTYNQLFEENPINASGVDAKAILSARLSKSRRLENLIAQLPGEKKNGLFGNLIALSLGLTPNFKSNFDLAEDAKLQLSKDTYDDDLDNLLAQIGDQYADLFLAAKNLSDAILLSDILRVNTEITKAPLSASMIKRYDEHHQDLTLLKALVRQQLPEKYKEIFFDQSKNGYAGYIDGGASQEEFYKFIKPILEKMDGTEELLVKLNREDLLRKQRTFDNGSIPHQIHLGELHAILRRQEDFYPFLKDNREKIEKILTFRIPYYVGPLARGNSRFAWMTRKSEETITPWNFEEVVDKGASAQSFIERMTNFDKNLPNEKVLPKHSLLYEYFTVYNELTKVKYVTEGMRKPAFLSGEQKKAIVDLLFKTNRKVTVKQLKEDYFKKIECFDSVEISGVEDRFNASLGTYHDLLKIIKDKDFLDNEENEDILEDIVLTLTLFEDREMIEERLKTYAHLFDDKVMKQLKRRRYTGWGRLSRKLINGIRDKQSGKTILDFLKSDGFANRNFMQLIHDDSLTFKEDIQKAQVSGQGDSLHEHIANLAGSPAIKKGILQTVKVVDELVKVMGRHKPENIVIEMARENQTTQKGQKNSRERMKRIEEGIKELGSQILKEHPVENTQLQNEKLYLYYLQNGRDMYVDQELDINRLSDYDVDHIVPQSFLKDDSIDNKVLTRSDKARGKSDNVPSEEVVKKMKNYWRQLLNAKLITQRKFDNLTKAERGGLSELDKAGFIKRQLVETRQITKHVAQILDSRMNTKYDENDKLIREVKVITLKSKLVSDFRKDFQFYKVREINNYHHAHDAYLNAVVGTALIKKYPKLESEFVYGDYKVYDVRKMIAKSEQEIGKATAKYFFYSNIMNFFKTEITLANGEIRKRPLIETNGETGEIVWDKGRDFATVRKVLSMPQVNIVKKTEVQTGGFSKESILPKRNSDKLIARKKDWDPKKYGGFDSPTVAYSVLVVAKVEKGKSKKLKSVKELLGITIMERSSFEKNPIDFLEAKGYKEVKKDLIIKLPKYSLFELENGRKRMLASAGELQKGNELALPSKYVNFLYLASHYEKLKGSPEDNEQKQLFVEQHKHYLDEIIEQISEFSKRVILADANLDKVLSAYNKHRDKPIREQAENIIHLFTLTNLGAPAAFKYFDTTIDRKRYTSTKEVLDATLIHQSITGLYETRIDLSQLGGDGGGGGEAAAKGGSGGTLNLEDEYRLYETSAEPEVSPGSTWLSDFPQAWAETGGMGLAVRQAPLIIPLKATSTPVSIKQYPMSQEAKLGIKPHIQRLLDQGILVPCQSPWNTPLLPVKKPGTNDYRPVQDLREVNKRVEDIHPTVPNPYNLLSGLPPSHRWYTVLDLKDAFFCLRLHPTSQPLFAFEWRDPGMGISGQLTWTRLPQGFKNSPTLFNEALHRDLADFRIQHPDLILLQYVDDILLAATSELDCQQGTRALLLTLGNLGYRASAKKAQLCQKQVKYLGYLLKEGQRWLTEARKETVMGQPTPKTPRQLREFLGKAGFCRLFIPGFAEMAAPLYPLTKPGTLFNWGPDQQKAYQEIKQALLTAPALGLPDLTKPFELFVDEKQGYAKGVLTQKLGPWRRPVAYLSKKLDPVAAGWPPCLRMVAAIAVLRKDAGKLTMGQPLVILAPHAVEALVKQPPDRWLSNARMTHYQAMLLDTDRVQFGPVVALNPATLLPLPEEGAPHDCLEILAETHGTRPDLTDQPIPDADHTWYTDGSSFLQEGQRKAGAAVTTETEVIWARALPAGTSAQRAELIALTQALKMAEGKRLNVYTDSRYAFATAHIHGEIYRRRGWLTSEGREIKNKSEILALLKALFLPKRLSIIHCLGHQKGDSAEARGNRLADQAAREAAIKTPPDTSTLLAGKRTADGSEFEKRTADGSEFESPKKKAKVE

SEQ ID NO: 1921 - protein, 2096 aa, synthetic construct
MPAAKRVKLDGGDKKYSIGLDIGTNSVGWAVITDEYKVPSKKFKVLGNTDRHSIKKNLIGALLFDSGETAEATRLKRTARRRYTRRKNRICYLQEIFSNEMAKVDDSFFHRLEESFLVEEDKKHERHPIFGNIVDEVAYHEKYPTIYHLRKKLVDSTDKADLRLIYLALAHMIKFRGHFLIEGDLNPDNSDVDKLFIQLVQTYNQLFEENPINASGVDAKAILSARLSKSRRLENLIAQLPGEKKNGLFGNLIALSLGLTPNFKSNFDLAEDAKLQLSKDTYDDDLDNLLAQIGDQYADLFLAAKNLSDAILLSDILRVNTEITKAPLSASMIKRYDEHHQDLTLLKALVRQQLPEKYKEIFFDQSKNGYAGYIDGGASQEEFYKFIKPILEKMDGTEELLVKLNREDLLRKQRTFDNGSIPHQIHLGELHAILRRQEDFYPFLKDNREKIEKILTFRIPYYVGPLARGNSRFAWMTRKSEETITPWNFEEVVDKGASAQSFIERMTNFDKNLPNEKVLPKHSLLYEYFTVYNELTKVKYVTEGMRKPAFLSGEQKKAIVDLLFKTNRKVTVKQLKEDYFKKIECFDSVEISGVEDRFNASLGTYHDLLKIIKDKDFLDNEENEDILEDIVLTLTLFEDREMIEERLKTYAHLFDDKVMKQLKRRRYTGWGRLSRKLINGIRDKQSGKTILDFLKSDGFANRNFMQLIHDDSLTFKEDIQKAQVSGQGDSLHEHIANLAGSPAIKKGILQTVKVVDELVKVMGRHKPENIVIEMARENQTTQKGQKNSRERMKRIEEGIKELGSQILKEHPVENTQLQNEKLYLYYLQNGRDMYVDQELDINRLSDYDVDHIVPQSFLKDDSIDNKVLTRSDKARGKSDNVPSEEVVKKMKNYWRQLLNAKLITQRKFDNLTKAERGGLSELDKAGFIKRQLVETRQITKHVAQILDSRMNTKYDENDKLIREVKVITLKSKLVSDFRKDFQFYKVREINNYHHAHDAYLNAVVGTALIKKYPKLESEFVYGDYKVYDVRKMIAKSEQEIGKATAKYFFYSNIMNFFKTEITLANGEIRKRPLIETNGETGEIVWDKGRDFATVRKVLSMPQVNIVKKTEVQTGGFSKESILPKRNSDKLIARKKDWDPKKYGGFDSPTVAYSVLVVAKVEKGKSKKLKSVKELLGITIMERSSFEKNPIDFLEAKGYKEVKKDLIIKLPKYSLFELENGRKRMLASAGELQKGNELALPSKYVNFLYLASHYEKLKGSPEDNEQKQLFVEQHKHYLDEIIEQISEFSKRVILADANLDKVLSAYNKHRDKPIREQAENIIHLFTLTNLGAPAAFKYFDTTIDRKRYTSTKEVLDATLIHQSITGLYETRIDLSQLGGDGGEAAAKGSSGGGGGTLNLEDEYRLYETSAEPEVSPGSTWLSDFPQAWAETGGMGLAVRQAPLIIPLKATSTPVSIKQYPMSQEAKLGIKPHIQRLLDQGILVPCQSPWNTPLLPVKKPGTNDYRPVQDLREVNKRVEDIHPTVPNPYNLLSGLPPSHRWYTVLDLKDAFFCLRLHPTSQPLFAFEWRDPGMGISGQLTWTRLPQGFKNSPTLFNEALHRDLADFRIQHPDLILLQYVDDILLAATSELDCQQGTRALLLTLGNLGYRASAKKAQLCQKQVKYLGYLLKEGQRWLTEARKETVMGQPTPKTPRQLREFLGKAGFCRLFIPGFAEMAAPLYPLTKPGTLFNWGPDQQKAYQEIKQALLTAPALGLPDLTKPFELFVDEKQGYAKGVLTQKLGPWRRPVAYLSKKLDPVAAGWPPCLRMVAAIAVLRKDAGKLTMGQPLVILAPHAVEALVKQPPDRWLSNARMTHYQAMLLDTDRVQFGPVVALNPATLLPLPEEGAPHDCLEILAETHGTRPDLTDQPIPDADHTWYTDGSSFLQEGQRKAGAAVTTETEVIWARALPAGTSAQRAELIALTQALKMAEGKRLNVYTDSRYAFATAHIHGEIYRRRGWLTSEGREIKNKSEILALLKALFLPKRLSIIHCLGHQKGDSAEARGNRLADQAAREAAIKTPPDTSTLLAGKRTADGSEFEKRTADGSEFESPKKKAKVE

SEQ ID NO: 1922 - protein, 2093 aa, synthetic construct
MPAAKRVKLDGGDKKYSIGLDIGTNSVGWAVITDEYKVPSKKFKVLGNTDRHSIKKNLIGALLFDSGETAEATRLKRTARRRYTRRKNRICYLQEIFSNEMAKVDDSFFHRLEESFLVEEDKKHERHPIFGNIVDEVAYHEKYPTIYHLRKKLVDSTDKADLRLIYLALAHMIKFRGHFLIEGDLNPDNSDVDKLFIQLVQTYNQLFEENPINASGVDAKAILSARLSKSRRLENLIAQLPGEKKNGLFGNLIALSLGLTPNFKSNFDLAEDAKLQLSKDTYDDDLDNLLAQIGDQYADLFLAAKNLSDAILLSDILRVNTEITKAPLSASMIKRYDEHHQDLTLLKALVRQQLPEKYKEIFFDQSKNGYAGYIDGGASQEEFYKFIKPILEKMDGTEELLVKLNREDLLRKQRTFDNGSIPHQIHLGELHAILRRQEDFYPFLKDNREKIEKILTFRIPYYVGPLARGNSRFAWMTRKSEETITPWNFEEVVDKGASAQSFIERMTNFDKNLPNEKVLPKHSLLYEYFTVYNELTKVKYVTEGMRKPAFLSGEQKKAIVDLLFKTNRKVTVKQLKEDYFKKIECFDSVEISGVEDRFNASLGTYHDLLKIIKDKDFLDNEENEDILEDIVLTLTLFEDREMIEERLKTYAHLFDDKVMKQLKRRRYTGWGRLSRKLINGIRDKQSGKTILDFLKSDGFANRNFMQLIHDDSLTFKEDIQKAQVSGQGDSLHEHIANLAGSPAIKKGILQTVKVVDELVKVMGRHKPENIVIEMARENQTTQKGQKNSRERMKRIEEGIKELGSQILKEHPVENTQLQNEKLYLYYLQNGRDMYVDQELDINRLSDYDVDHIVPQSFLKDDSIDNKVLTRSDKARGKSDNVPSEEVVKKMKNYWRQLLNAKLITQRKFDNLTKAERGGLSELDKAGFIKRQLVETRQITKHVAQILDSRMNTKYDENDKLIREVKVITLKSKLVSDFRKDFQFYKVREINNYHHAHDAYLNAVVGTALIKKYPKLESEFVYGDYKVYDVRKMIAKSEQEIGKATAKYFFYSNIMNFFKTEITLANGEIRKRPLIETNGETGEIVWDKGRDFATVRKVLSMPQVNIVKKTEVQTGGFSKESILPKRNSDKLIARKKDWDPKKYGGFDSPTVAYSVLVVAKVEKGKSKKLKSVKELLGITIMERSSFEKNPIDFLEAKGYKEVKKDLIIKLPKYSLFELENGRKRMLASAGELQKGNELALPSKYVNFLYLASHYEKLKGSPEDNEQKQLFVEQHKHYLDEIIEQISEFSKRVILADANLDKVLSAYNKHRDKPIREQAENIIHLFTLTNLGAPAAFKYFDTTIDRKRYTSTKEVLDATLIHQSITGLYETRIDLSQLGGDGGGGSEAAAKGGTLNLEDEYRLYETSAEPEVSPGSTWLSDFPQAWAETGGMGLAVRQAPLIIPLKATSTPVSIKQYPMSQEAKLGIKPHIQRLLDQGILVPCQSPWNTPLLPVKKPGTNDYRPVQDLREVNKRVEDIHPTVPNPYNLLSGLPPSHRWYTVLDLKDAFFCLRLHPTSQPLFAFEWRDPGMGISGQLTWTRLPQGFKNSPTLFNEALHRDLADFRIQHPDLILLQYVDDILLAATSELDCQQGTRALLLTLGNLGYRASAKKAQLCQKQVKYLGYLLKEGQRWLTEARKETVMGQPTPKTPRQLREFLGKAGFCRLFIPGFAEMAAPLYPLTKPGTLFNWGPDQQKAYQEIKQALLTAPALGLPDLTKPFELFVDEKQGYAKGVLTQKLGPWRRPVAYLSKKLDPVAAGWPPCLRMVAAIAVLRKDAGKLTMGQPLVILAPHAVEALVKQPPDRWLSNARMTHYQAMLLDTDRVQFGPVVALNPATLLPLPEEGAPHDCLEILAETHGTRPDLTDQPIPDADHTWYTDGSSFLQEGQRKAGAAVTTETEVIWARALPAGTSAQRAELIALTQALKMAEGKRLNVYTDSRYAFATAHIHGEIYRRRGWLTSEGREIKNKSEILALLKALFLPKRLSIIHCLGHQKGDSAEARGNRLADQAAREAAIKTPPDTSTLLAGKRTADGSEFEKRTADGSEFESPKKKAKVE

SEQ ID NO: 1923 - protein, 2100 aa, synthetic construct
MPAAKRVKLDGGDKKYSIGLDIGTNSVGWAVITDEYKVPSKKFKVLGNTDRHSIKKNLIGALLFDSGETAEATRLKRTARRRYTRRKNRICYLQEIFSNEMAKVDDSFFHRLEESFLVEEDKKHERHPIFGNIVDEVAYHEKYPTIYHLRKKLVDSTDKADLRLIYLALAHMIKFRGHFLIEGDLNPDNSDVDKLFIQLVQTYNQLFEENPINASGVDAKAILSARLSKSRRLENLIAQLPGEKKNGLFGNLIALSLGLTPNFKSNFDLAEDAKLQLSKDTYDDDLDNLLAQIGDQYADLFLAAKNLSDAILLSDILRVNTEITKAPLSASMIKRYDEHHQDLTLLKALVRQQLPEKYKEIFFDQSKNGYAGYIDGGASQEEFYKFIKPILEKMDGTEELLVKLNREDLLRKQRTFDNGSIPHQIHLGELHAILRRQEDFYPFLKDNREKIEKILTFRIPYYVGPLARGNSRFAWMTRKSEETITPWNFEEVVDKGASAQSFIERMTNFDKNLPNEKVLPKHSLLYEYFTVYNELTKVKYVTEGMRKPAFLSGEQKKAIVDLLFKTNRKVTVKQLKEDYFKKIECFDSVEISGVEDRFNASLGTYHDLLKIIKDKDFLDNEENEDILEDIVLTLTLFEDREMIEERLKTYAHLFDDKVMKQLKRRRYTGWGRLSRKLINGIRDKQSGKTILDFLKSDGFANRNFMQLIHDDSLTFKEDIQKAQVSGQGDSLHEHIANLAGSPAIKKGILQTVKVVDELVKVMGRHKPENIVIEMARENQTTQKGQKNSRERMKRIEEGIKELGSQILKEHPVENTQLQNEKLYLYYLQNGRDMYVDQELDINRLSDYDVDHIVPQSFLKDDSIDNKVLTRSDKARGKSDNVPSEEVVKKMKNYWRQLLNAKLITQRKFDNLTKAERGGLSELDKAGFIKRQLVETRQITKHVAQILDSRMNTKYDENDKLIREVKVITLKSKLVSDFRKDFQFYKVREINNYHHAHDAYLNAVVGTALIKKYPKLESEFVYGDYKVYDVRKMIAKSEQEIGKATAKYFFYSNIMNFFKTEITLANGEIRKRPLIETNGETGEIVWDKGRDFATVRKVLSMPQVNIVKKTEVQTGGFSKESILPKRNSDKLIARKKDWDPKKYGGFDSPTVAYSVLVVAKVEKGKSKKLKSVKELLGITIMERSSFEKNPIDFLEAKGYKEVKKDLIIKLPKYSLFELENGRKRMLASAGELQKGNELALPSKYVNFLYLASHYEKLKGSPEDNEQKQLFVEQHKHYLDEIIEQISEFSKRVILADANLDKVLSAYNKHRDKPIREQAENIIHLFTLTNLGAPAAFKYFDTTIDRKRYTSTKEVLDATLIHQSITGLYETRIDLSQLGGDGGGSSGSSGSSGSSGSSGGTLNLEDEYRLYETSAEPEVSPGSTWLSDFPQAWAETGGMGLAVRQAPLIIPLKATSTPVSIKQYPMSQEAKLGIKPHIQRLLDQGILVPCQSPWNTPLLPVKKPGTNDYRPVQDLREVNKRVEDIHPTVPNPYNLLSGLPPSHRWYTVLDLKDAFFCLRLHPTSQPLFAFEWRDPGMGISGQLTWTRLPQGFKNSPTLFNEALHRDLADFRIQHPDLILLQYVDDILLAATSELDCQQGTRALLLTLGNLGYRASAKKAQLCQKQVKYLGYLLKEGQRWLTEARKETVMGQPTPKTPRQLREFLGKAGFCRLFIPGFAEMAAPLYPLTKPGTLFNWGPDQQKAYQEIKQALLTAPALGLPDLTKPFELFVDEKQGYAKGVLTQKLGPWRRPVAYLSKKLDPVAAGWPPCLRMVAAIAVLRKDAGKLTMGQPLVILAPHAVEALVKQPPDRWLSNARMTHYQAMLLDTDRVQFGPVVALNPATLLPLPEEGAPHDCLEILAETHGTRPDLTDQPIPDADHTWYTDGSSFLQEGQRKAGAAVTTETEVIWARALPAGTSAQRAELIALTQALKMAEGKRLNVYTDSRYAFATAHIHGEIYRRRGWLTSEGREIKNKSEILALLKALFLPKRLSIIHCLGHQKGDSAEARGNRLADQAAREAAIKTPPDTSTLLAGKRTADGSEFEKRTADGSEFESPKKKAKVE

SEQ ID NO: 1924 - protein, 2096 aa, synthetic construct
MPAAKRVKLDGGDKKYSIGLDIGTNSVGWAVITDEYKVPSKKFKVLGNTDRHSIKKNLIGALLFDSGETAEATRLKRTARRRYTRRKNRICYLQEIFSNEMAKVDDSFFHRLEESFLVEEDKKHERHPIFGNIVDEVAYHEKYPTIYHLRKKLVDSTDKADLRLIYLALAHMIKFRGHFLIEGDLNPDNSDVDKLFIQLVQTYNQLFEENPINASGVDAKAILSARLSKSRRLENLIAQLPGEKKNGLFGNLIALSLGLTPNFKSNFDLAEDAKLQLSKDTYDDDLDNLLAQIGDQYADLFLAAKNLSDAILLSDILRVNTEITKAPLSASMIKRYDEHHQDLTLLKALVRQQLPEKYKEIFFDQSKNGYAGYIDGGASQEEFYKFIKPILEKMDGTEELLVKLNREDLLRKQRTFDNGSIPHQIHLGELHAILRRQEDFYPFLKDNREKIEKILTFRIPYYVGPLARGNSRFAWMTRKSEETITPWNFEEVVDKGASAQSFIERMTNFDKNLPNEKVLPKHSLLYEYFTVYNELTKVKYVTEGMRKPAFLSGEQKKAIVDLLFKTNRKVTVKQLKEDYFKKIECFDSVEISGVEDRFNASLGTYHDLLKIIKDKDFLDNEENEDILEDIVLTLTLFEDREMIEERLKTYAHLFDDKVMKQLKRRRYTGWGRLSRKLINGIRDKQSGKTILDFLKSDGFANRNFMQLIHDDSLTFKEDIQKAQVSGQGDSLHEHIANLAGSPAIKKGILQTVKVVDELVKVMGRHKPENIVIEMARENQTTQKGQKNSRERMKRIEEGIKELGSQILKEHPVENTQLQNEKLYLYYLQNGRDMYVDQELDINRLSDYDVDHIVPQSFLKDDSIDNKVLTRSDKARGKSDNVPSEEVVKKMKNYWRQLLNAKLITQRKFDNLTKAERGGLSELDKAGFIKRQLVETRQITKHVAQILDSRMNTKYDENDKLIREVKVITLKSKLVSDFRKDFQFYKVREINNYHHAHDAYLNAVVGTALIKKYPKLESEFVYGDYKVYDVRKMIAKSEQEIGKATAKYFFYSNIMNFFKTEITLANGEIRKRPLIETNGETGEIVWDKGRDFATVRKVLSMPQVNIVKKTEVQTGGFSKESILPKRNSDKLIARKKDWDPKKYGGFDSPTVAYSVLVVAKVEKGKSKKLKSVKELLGITIMERSSFEKNPIDFLEAKGYKEVKKDLIIKLPKYSLFELENGRKRMLASAGELQKGNELALPSKYVNFLYLASHYEKLKGSPEDNEQKQLFVEQHKHYLDEIIEQISEFSKRVILADANLDKVLSAYNKHRDKPIREQAENIIHLFTLTNLGAPAAFKYFDTTIDRKRYTSTKEVLDATLIHQSITGLYETRIDLSQLGGDGGPAPAPAPAPAPGGTLNLEDEYRLYETSAEPEVSPGSTWLSDFPQAWAETGGMGLAVRQAPLIIPLKATSTPVSIKQYPMSQEAKLGIKPHIQRLLDQGILVPCQSPWNTPLLPVKKPGTNDYRPVQDLREVNKRVEDIHPTVPNPYNLLSGLPPSHRWYTVLDLKDAFFCLRLHPTSQPLFAFEWRDPGMGISGQLTWTRLPQGFKNSPTLFNEALHRDLADFRIQHPDLILLQYVDDILLAATSELDCQQGTRALLLTLGNLGYRASAKKAQLCQKQVKYLGYLLKEGQRWLTEARKETVMGQPTPKTPRQLREFLGKAGFCRLFIPGFAEMAAPLYPLTKPGTLFNWGPDQQKAYQEIKQALLTAPALGLPDLTKPFELFVDEKQGYAKGVLTQKLGPWRRPVAYLSKKLDPVAAGWPPCLRMVAAIAVLRKDAGKLTMGQPLVILAPHAVEALVKQPPDRWLSNARMTHYQAMLLDTDRVQFGPVVALNPATLLPLPEEGAPHDCLEILAETHGTRPDLTDQPIPDADHTWYTDGSSFLQEGQRKAGAAVTTETEVIWARALPAGTSAQRAELIALTQALKMAEGKRLNVYTDSRYAFATAHIHGEIYRRRGWLTSEGREIKNKSEILALLKALFLPKRLSIIHCLGHQKGDSAEARGNRLADQAAREAAIKTPPDTSTLLAGKRTADGSEFEKRTADGSEFESPKKKAKVE

SEQ ID NO: 1925 - protein, 2094 aa, synthetic construct
MPAAKRVKLDGGDKKYSIGLDIGTNSVGWAVITDEYKVPSKKFKVLGNTDRHSIKKNLIGALLFDSGETAEATRLKRTARRRYTRRKNRICYLQEIFSNEMAKVDDSFFHRLEESFLVEEDKKHERHPIFGNIVDEVAYHEKYPTIYHLRKKLVDSTDKADLRLIYLALAHMIKFRGHFLIEGDLNPDNSDVDKLFIQLVQTYNQLFEENPINASGVDAKAILSARLSKSRRLENLIAQLPGEKKNGLFGNLIALSLGLTPNFKSNFDLAEDAKLQLSKDTYDDDLDNLLAQIGDQYADLFLAAKNLSDAILLSDILRVNTEITKAPLSASMIKRYDEHHQDLTLLKALVRQQLPEKYKEIFFDQSKNGYAGYIDGGASQEEFYKFIKPILEKMDGTEELLVKLNREDLLRKQRTFDNGSIPHQIHLGELHAILRRQEDFYPFLKDNREKIEKILTFRIPYYVGPLARGNSRFAWMTRKSEETITPWNFEEVVDKGASAQSFIERMTNFDKNLPNEKVLPKHSLLYEYFTVYNELTKVKYVTEGMRKPAFLSGEQKKAIVDLLFKTNRKVTVKQLKEDYFKKIECFDSVEISGVEDRFNASLGTYHDLLKIIKDKDFLDNEENEDILEDIVLTLTLFEDREMIEERLKTYAHLFDDKVMKQLKRRRYTGWGRLSRKLINGIRDKQSGKTILDFLKSDGFANRNFMQLIHDDSLTFKEDIQKAQVSGQGDSLHEHIANLAGSPAIKKGILQTVKVVDELVKVMGRHKPENIVIEMARENQTTQKGQKNSRERMKRIEEGIKELGSQILKEHPVENTQLQNEKLYLYYLQNGRDMYVDQELDINRLSDYDVDHIVPQSFLKDDSIDNKVLTRSDKARGKSDNVPSEEVVKKMKNYWRQLLNAKLITQRKFDNLTKAERGGLSELDKAGFIKRQLVETRQITKHVAQILDSRMNTKYDENDKLIREVKVITLKSKLVSDFRKDFQFYKVREINNYHHAHDAYLNAVVGTALIKKYPKLESEFVYGDYKVYDVRKMIAKSEQEIGKATAKYFFYSNIMNFFKTEITLANGEIRKRPLIETNGETGEIVWDKGRDFATVRKVLSMPQVNIVKKTEVQTGGFSKESILPKRNSDKLIARKKDWDPKKYGGFDSPTVAYSVLVVAKVEKGKSKKLKSVKELLGITIMERSSFEKNPIDFLEAKGYKEVKKDLIIKLPKYSLFELENGRKRMLASAGELQKGNELALPSKYVNFLYLASHYEKLKGSPEDNEQKQLFVEQHKHYLDEIIEQISEFSKRVILADANLDKVLSAYNKHRDKPIREQAENIIHLFTLTNLGAPAAFKYFDTTIDRKRYTSTKEVLDATLIHQSITGLYETRIDLSQLGGDGGGSSGSSGSSGGTLNLEDEYRLYETSAEPEVSPGSTWLSDFPQAWAETGGMGLAVRQAPLIIPLKATSTPVSIKQYPMSQEAKLGIKPHIQRLLDQGILVPCQSPWNTPLLPVKKPGTNDYRPVQDLREVNKRVEDIHPTVPNPYNLLSGLPPSHRWYTVLDLKDAFFCLRLHPTSQPLFAFEWRDPGMGISGQLTWTRLPQGFKNSPTLFNEALHRDLADFRIQHPDLILLQYVDDILLAATSELDCQQGTRALLLTLGNLGYRASAKKAQLCQKQVKYLGYLLKEGQRWLTEARKETVMGQPTPKTPRQLREFLGKAGFCRLFIPGFAEMAAPLYPLTKPGTLFNWGPDQQKAYQEIKQALLTAPALGLPDLTKPFELFVDEKQGYAKGVLTQKLGPWRRPVAYLSKKLDPVAAGWPPCLRMVAAIAVLRKDAGKLTMGQPLVILAPHAVEALVKQPPDRWLSNARMTHYQAMLLDTDRVQFGPVVALNPATLLPLPEEGAPHDCLEILAETHGTRPDLTDQPIPDADHTWYTDGSSFLQEGQRKAGAAVTTETEVIWARALPAGTSAQRAELIALTQALKMAEGKRLNVYTDSRYAFATAHIHGEIYRRRGWLTSEGREIKNKSEILALLKALFLPKRLSIIHCLGHQKGDSAEARGNRLADQAAREAAIKTPPDTSTLLAGKRTADGSEFEKRTADGSEFESPKKKAKVE

SEQ ID NO: 1926 - protein, 2094 aa, synthetic construct
MPAAKRVKLDGGDKKYSIGLDIGTNSVGWAVITDEYKVPSKKFKVLGNTDRHSIKKNLIGALLFDSGETAEATRLKRTARRRYTRRKNRICYLQEIFSNEMAKVDDSFFHRLEESFLVEEDKKHERHPIFGNIVDEVAYHEKYPTIYHLRKKLVDSTDKADLRLIYLALAHMIKFRGHFLIEGDLNPDNSDVDKLFIQLVQTYNQLFEENPINASGVDAKAILSARLSKSRRLENLIAQLPGEKKNGLFGNLIALSLGLTPNFKSNFDLAEDAKLQLSKDTYDDDLDNLLAQIGDQYADLFLAAKNLSDAILLSDILRVNTEITKAPLSASMIKRYDEHHQDLTLLKALVRQQLPEKYKEIFFDQSKNGYAGYIDGGASQEEFYKFIKPILEKMDGTEELLVKLNREDLLRKQRTFDNGSIPHQIHLGELHAILRRQEDFYPFLKDNREKIEKILTFRIPYYVGPLARGNSRFAWMTRKSEETITPWNFEEVVDKGASAQSFIERMTNFDKNLPNEKVLPKHSLLYEYFTVYNELTKVKYVTEGMRKPAFLSGEQKKAIVDLLFKTNRKVTVKQLKEDYFKKIECFDSVEISGVEDRFNASLGTYHDLLKIIKDKDFLDNEENEDILEDIVLTLTLFEDREMIEERLKTYAHLFDDKVMKQLKRRRYTGWGRLSRKLINGIRDKQSGKTILDFLKSDGFANRNFMQLIHDDSLTFKEDIQKAQVSGQGDSLHEHIANLAGSPAIKKGILQTVKVVDELVKVMGRHKPENIVIEMARENQTTQKGQKNSRERMKRIEEGIKELGSQILKEHPVENTQLQNEKLYLYYLQNGRDMYVDQELDINRLSDYDVDHIVPQSFLKDDSIDNKVLTRSDKARGKSDNVPSEEVVKKMKNYWRQLLNAKLITQRKFDNLTKAERGGLSELDKAGFIKRQLVETRQITKHVAQILDSRMNTKYDENDKLIREVKVITLKSKLVSDFRKDFQFYKVREINNYHHAHDAYLNAVVGTALIKKYPKLESEFVYGDYKVYDVRKMIAKSEQEIGKATAKYFFYSNIMNFFKTEITLANGEIRKRPLIETNGETGEIVWDKGRDFATVRKVLSMPQVNIVKKTEVQTGGFSKESILPKRNSDKLIARKKDWDPKKYGGFDSPTVAYSVLVVAKVEKGKSKKLKSVKELLGITIMERSSFEKNPIDFLEAKGYKEVKKDLIIKLPKYSLFELENGRKRMLASAGELQKGNELALPSKYVNFLYLASHYEKLKGSPEDNEQKQLFVEQHKHYLDEIIEQISEFSKRVILADANLDKVLSAYNKHRDKPIREQAENIIHLFTLTNLGAPAAFKYFDTTIDRKRYTSTKEVLDATLIHQSITGLYETRIDLSQLGGDGGGSSGGSPAPGGTLNLEDEYRLYETSAEPEVSPGSTWLSDFPQAWAETGGMGLAVRQAPLIIPLKATSTPVSIKQYPMSQEAKLGIKPHIQRLLDQGILVPCQSPWNTPLLPVKKPGTNDYRPVQDLREVNKRVEDIHPTVPNPYNLLSGLPPSHRWYTVLDLKDAFFCLRLHPTSQPLFAFEWRDPGMGISGQLTWTRLPQGFKNSPTLFNEALHRDLADFRIQHPDLILLQYVDDILLAATSELDCQQGTRALLLTLGNLGYRASAKKAQLCQKQVKYLGYLLKEGQRWLTEARKETVMGQPTPKTPRQLREFLGKAGFCRLFIPGFAEMAAPLYPLTKPGTLFNWGPDQQKAYQEIKQALLTAPALGLPDLTKPFELFVDEKQGYAKGVLTQKLGPWRRPVAYLSKKLDPVAAGWPPCLRMVAAIAVLRKDAGKLTMGQPLVILAPHAVEALVKQPPDRWLSNARMTHYQAMLLDTDRVQFGPVVALNPATLLPLPEEGAPHDCLEILAETHGTRPDLTDQPIPDADHTWYTDGSSFLQEGQRKAGAAVTTETEVIWARALPAGTSAQRAELIALTQALKMAEGKRLNVYTDSRYAFATAHIHGEIYRRRGWLTSEGREIKNKSEILALLKALFLPKRLSIIHCLGHQKGDSAEARGNRLADQAAREAAIKTPPDTSTLLAGKRTADGSEFEKRTADGSEFESPKKKAKVE

SEQ ID NO: 1927 - protein, 2091 aa, synthetic construct
MPAAKRVKLDGGDKKYSIGLDIGTNSVGWAVITDEYKVPSKKFKVLGNTDRHSIKKNLIGALLFDSGETAEATRLKRTARRRYTRRKNRICYLQEIFSNEMAKVDDSFFHRLEESFLVEEDKKHERHPIFGNIVDEVAYHEKYPTIYHLRKKLVDSTDKADLRLIYLALAHMIKFRGHFLIEGDLNPDNSDVDKLFIQLVQTYNQLFEENPINASGVDAKAILSARLSKSRRLENLIAQLPGEKKNGLFGNLIALSLGLTPNFKSNFDLAEDAKLQLSKDTYDDDLDNLLAQIGDQYADLFLAAKNLSDAILLSDILRVNTEITKAPLSASMIKRYDEHHQDLTLLKALVRQQLPEKYKEIFFDQSKNGYAGYIDGGASQEEFYKFIKPILEKMDGTEELLVKLNREDLLRKQRTFDNGSIPHQIHLGELHAILRRQEDFYPFLKDNREKIEKILTFRIPYYVGPLARGNSRFAWMTRKSEETITPWNFEEVVDKGASAQSFIERMTNFDKNLPNEKVLPKHSLLYEYFTVYNELTKVKYVTEGMRKPAFLSGEQKKAIVDLLFKTNRKVTVKQLKEDYFKKIECFDSVEISGVEDRFNASLGTYHDLLKIIKDKDFLDNEENEDILEDIVLTLTLFEDREMIEERLKTYAHLFDDKVMKQLKRRRYTGWGRLSRKLINGIRDKQSGKTILDFLKSDGFANRNFMQLIHDDSLTFKEDIQKAQVSGQGDSLHEHIANLAGSPAIKKGILQTVKVVDELVKVMGRHKPENIVIEMARENQTTQKGQKNSRERMKRIEEGIKELGSQILKEHPVENTQLQNEKLYLYYLQNGRDMYVDQELDINRLSDYDVDHIVPQSFLKDDSIDNKVLTRSDKARGKSDNVPSEEVVKKMKNYWRQLLNAKLITQRKFDNLTKAERGGLSELDKAGFIKRQLVETRQITKHVAQILDSRMNTKYDENDKLIREVKVITLKSKLVSDFRKDFQFYKVREINNYHHAHDAYLNAVVGTALIKKYPKLESEFVYGDYKVYDVRKMIAKSEQEIGKATAKYFFYSNIMNFFKTEITLANGEIRKRPLIETNGETGEIVWDKGRDFATVRKVLSMPQVNIVKKTEVQTGGFSKESILPKRNSDKLIARKKDWDPKKYGGFDSPTVAYSVLVVAKVEKGKSKKLKSVKELLGITIMERSSFEKNPIDFLEAKGYKEVKKDLIIKLPKYSLFELENGRKRMLASAGELQKGNELALPSKYVNFLYLASHYEKLKGSPEDNEQKQLFVEQHKHYLDEIIEQISEFSKRVILADANLDKVLSAYNKHRDKPIREQAENIIHLFTLTNLGAPAAFKYFDTTIDRKRYTSTKEVLDATLIHQSITGLYETRIDLSQLGGDGGGSSGSSGGTLNLEDEYRLYETSAEPEVSPGSTWLSDFPQAWAETGGMGLAVRQAPLIIPLKATSTPVSIKQYPMSQEAKLGIKPHIQRLLDQGILVPCQSPWNTPLLPVKKPGTNDYRPVQDLREVNKRVEDIHPTVPNPYNLLSGLPPSHRWYTVLDLKDAFFCLRLHPTSQPLFAFEWRDPGMGISGQLTWTRLPQGFKNSPTLFNEALHRDLADFRIQHPDLILLQYVDDILLAATSELDCQQGTRALLLTLGNLGYRASAKKAQLCQKQVKYLGYLLKEGQRWLTEARKETVMGQPTPKTPRQLREFLGKAGFCRLFIPGFAEMAAPLYPLTKPGTLFNWGPDQQKAYQEIKQALLTAPALGLPDLTKPFELFVDEKQGYAKGVLTQKLGPWRRPVAYLSKKLDPVAAGWPPCLRMVAAIAVLRKDAGKLTMGQPLVILAPHAVEALVKQPPDRWLSNARMTHYQAMLLDTDRVQFGPVVALNPATLLPLPEEGAPHDCLEILAETHGTRPDLTDQPIPDADHTWYTDGSSFLQEGQRKAGAAVTTETEVIWARALPAGTSAQRAELIALTQALKMAEGKRLNVYTDSRYAFATAHIHGEIYRRRGWLTSEGREIKNKSEILALLKALFLPKRLSIIHCLGHQKGDSAEARGNRLADQAAREAAIKTPPDTSTLLAGKRTADGSEFEKRTADGSEFESPKKKAKVE

SEQ ID NO: 1928 - protein, 2091 aa, synthetic construct
MPAAKRVKLDGGDKKYSIGLDIGTNSVGWAVITDEYKVPSKKFKVLGNTDRHSIKKNLIGALLFDSGETAEATRLKRTARRRYTRRKNRICYLQEIFSNEMAKVDDSFFHRLEESFLVEEDKKHERHPIFGNIVDEVAYHEKYPTIYHLRKKLVDSTDKADLRLIYLALAHMIKFRGHFLIEGDLNPDNSDVDKLFIQLVQTYNQLFEENPINASGVDAKAILSARLSKSRRLENLIAQLPGEKKNGLFGNLIALSLGLTPNFKSNFDLAEDAKLQLSKDTYDDDLDNLLAQIGDQYADLFLAAKNLSDAILLSDILRVNTEITKAPLSASMIKRYDEHHQDLTLLKALVRQQLPEKYKEIFFDQSKNGYAGYIDGGASQEEFYKFIKPILEKMDGTEELLVKLNREDLLRKQRTFDNGSIPHQIHLGELHAILRRQEDFYPFLKDNREKIEKILTFRIPYYVGPLARGNSRFAWMTRKSEETITPWNFEEVVDKGASAQSFIERMTNFDKNLPNEKVLPKHSLLYEYFTVYNELTKVKYVTEGMRKPAFLSGEQKKAIVDLLFKTNRKVTVKQLKEDYFKKIECFDSVEISGVEDRFNASLGTYHDLLKIIKDKDFLDNEENEDILEDIVLTLTLFEDREMIEERLKTYAHLFDDKVMKQLKRRRYTGWGRLSRKLINGIRDKQSGKTILDFLKSDGFANRNFMQLIHDDSLTFKEDIQKAQVSGQGDSLHEHIANLAGSPAIKKGILQTVKVVDELVKVMGRHKPENIVIEMARENQTTQKGQKNSRERMKRIEEGIKELGSQILKEHPVENTQLQNEKLYLYYLQNGRDMYVDQELDINRLSDYDVDHIVPQSFLKDDSIDNKVLTRSDKARGKSDNVPSEEVVKKMKNYWRQLLNAKLITQRKFDNLTKAERGGLSELDKAGFIKRQLVETRQITKHVAQILDSRMNTKYDENDKLIREVKVITLKSKLVSDFRKDFQFYKVREINNYHHAHDAYLNAVVGTALIKKYPKLESEFVYGDYKVYDVRKMIAKSEQEIGKATAKYFFYSNIMNFFKTEITLANGEIRKRPLIETNGETGEIVWDKGRDFATVRKVLSMPQVNIVKKTEVQTGGFSKESILPKRNSDKLIARKKDWDPKKYGGFDSPTVAYSVLVVAKVEKGKSKKLKSVKELLGITIMERSSFEKNPIDFLEAKGYKEVKKDLIIKLPKYSLFELENGRKRMLASAGELQKGNELALPSKYVNFLYLASHYEKLKGSPEDNEQKQLFVEQHKHYLDEIIEQISEFSKRVILADANLDKVLSAYNKHRDKPIREQAENIIHLFTLTNLGAPAAFKYFDTTIDRKRYTSTKEVLDATLIHQSITGLYETRIDLSQLGGDGGGGGGGSGGTLNLEDEYRLYETSAEPEVSPGSTWLSDFPQAWAETGGMGLAVRQAPLIIPLKATSTPVSIKQYPMSQEAKLGIKPHIQRLLDQGILVPCQSPWNTPLLPVKKPGTNDYRPVQDLREVNKRVEDIHPTVPNPYNLLSGLPPSHRWYTVLDLKDAFFCLRLHPTSQPLFAFEWRDPGMGISGQLTWTRLPQGFKNSPTLFNEALHRDLADFRIQHPDLILLQYVDDILLAATSELDCQQGTRALLLTLGNLGYRASAKKAQLCQKQVKYLGYLLKEGQRWLTEARKETVMGQPTPKTPRQLREFLGKAGFCRLFIPGFAEMAAPLYPLTKPGTLFNWGPDQQKAYQEIKQALLTAPALGLPDLTKPFELFVDEKQGYAKGVLTQKLGPWRRPVAYLSKKLDPVAAGWPPCLRMVAAIAVLRKDAGKLTMGQPLVILAPHAVEALVKQPPDRWLSNARMTHYQAMLLDTDRVQFGPVVALNPATLLPLPEEGAPHDCLEILAETHGTRPDLTDQPIPDADHTWYTDGSSFLQEGQRKAGAAVTTETEVIWARALPAGTSAQRAELIALTQALKMAEGKRLNVYTDSRYAFATAHIHGEIYRRRGWLTSEGREIKNKSEILALLKALFLPKRLSIIHCLGHQKGDSAEARGNRLADQAAREAAIKTPPDTSTLLAGKRTADGSEFEKRTADGSEFESPKKKAKVE

SEQ ID NO: 1929 - protein, 2096 aa, synthetic construct
MPAAKRVKLDGGDKKYSIGLDIGTNSVGWAVITDEYKVPSKKFKVLGNTDRHSIKKNLIGALLFDSGETAEATRLKRTARRRYTRRKNRICYLQEIFSNEMAKVDDSFFHRLEESFLVEEDKKHERHPIFGNIVDEVAYHEKYPTIYHLRKKLVDSTDKADLRLIYLALAHMIKFRGHFLIEGDLNPDNSDVDKLFIQLVQTYNQLFEENPINASGVDAKAILSARLSKSRRLENLIAQLPGEKKNGLFGNLIALSLGLTPNFKSNFDLAEDAKLQLSKDTYDDDLDNLLAQIGDQYADLFLAAKNLSDAILLSDILRVNTEITKAPLSASMIKRYDEHHQDLTLLKALVRQQLPEKYKEIFFDQSKNGYAGYIDGGASQEEFYKFIKPILEKMDGTEELLVKLNREDLLRKQRTFDNGSIPHQIHLGELHAILRRQEDFYPFLKDNREKIEKILTFRIPYYVGPLARGNSRFAWMTRKSEETITPWNFEEVVDKGASAQSFIERMTNFDKNLPNEKVLPKHSLLYEYFTVYNELTKVKYVTEGMRKPAFLSGEQKKAIVDLLFKTNRKVTVKQLKEDYFKKIECFDSVEISGVEDRFNASLGTYHDLLKIIKDKDFLDNEENEDILEDIVLTLTLFEDREMIEERLKTYAHLFDDKVMKQLKRRRYTGWGRLSRKLINGIRDKQSGKTILDFLKSDGFANRNFMQLIHDDSLTFKEDIQKAQVSGQGDSLHEHIANLAGSPAIKKGILQTVKVVDELVKVMGRHKPENIVIEMARENQTTQKGQKNSRERMKRIEEGIKELGSQILKEHPVENTQLQNEKLYLYYLQNGRDMYVDQELDINRLSDYDVDHIVPQSFLKDDSIDNKVLTRSDKARGKSDNVPSEEVVKKMKNYWRQLLNAKLITQRKFDNLTKAERGGLSELDKAGFIKRQLVETRQITKHVAQILDSRMNTKYDENDKLIREVKVITLKSKLVSDFRKDFQFYKVREINNYHHAHDAYLNAVVGTALIKKYPKLESEFVYGDYKVYDVRKMIAKSEQEIGKATAKYFFYSNIMNFFKTEITLANGEIRKRPLIETNGETGEIVWDKGRDFATVRKVLSMPQVNIVKKTEVQTGGFSKESILPKRNSDKLIARKKDWDPKKYGGFDSPTVAYSVLVVAKVEKGKSKKLKSVKELLGITIMERSSFEKNPIDFLEAKGYKEVKKDLIIKLPKYSLFELENGRKRMLASAGELQKGNELALPSKYVNFLYLASHYEKLKGSPEDNEQKQLFVEQHKHYLDEIIEQISEFSKRVILADANLDKVLSAYNKHRDKPIREQAENIIHLFTLTNLGAPAAFKYFDTTIDRKRYTSTKEVLDATLIHQSITGLYETRIDLSQLGGDGGGGGPAPEAAAKGGTLNLEDEYRLYETSAEPEVSPGSTWLSDFPQAWAETGGMGLAVRQAPLIIPLKATSTPVSIKQYPMSQEAKLGIKPHIQRLLDQGILVPCQSPWNTPLLPVKKPGTNDYRPVQDLREVNKRVEDIHPTVPNPYNLLSGLPPSHRWYTVLDLKDAFFCLRLHPTSQPLFAFEWRDPGMGISGQLTWTRLPQGFKNSPTLFNEALHRDLADFRIQHPDLILLQYVDDILLAATSELDCQQGTRALLLTLGNLGYRASAKKAQLCQKQVKYLGYLLKEGQRWLTEARKETVMGQPTPKTPRQLREFLGKAGFCRLFIPGFAEMAAPLYPLTKPGTLFNWGPDQQKAYQEIKQALLTAPALGLPDLTKPFELFVDEKQGYAKGVLTQKLGPWRRPVAYLSKKLDPVAAGWPPCLRMVAAIAVLRKDAGKLTMGQPLVILAPHAVEALVKQPPDRWLSNARMTHYQAMLLDTDRVQFGPVVALNPATLLPLPEEGAPHDCLEILAETHGTRPDLTDQPIPDADHTWYTDGSSFLQEGQRKAGAAVTTETEVIWARALPAGTSAQRAELIALTQALKMAEGKRLNVYTDSRYAFATAHIHGEIYRRRGWLTSEGREIKNKSEILALLKALFLPKRLSIIHCLGHQKGDSAEARGNRLADQAAREAAIKTPPDTSTLLAGKRTADGSEFEKRTADGSEFESPKKKAKVE

SEQ ID NO: 1930 - protein, 2091 aa, synthetic construct
MPAAKRVKLDGGDKKYSIGLDIGTNSVGWAVITDEYKVPSKKFKVLGNTDRHSIKKNLIGALLFDSGETAEATRLKRTARRRYTRRKNRICYLQEIFSNEMAKVDDSFFHRLEESFLVEEDKKHERHPIFGNIVDEVAYHEKYPTIYHLRKKLVDSTDKADLRLIYLALAHMIKFRGHFLIEGDLNPDNSDVDKLFIQLVQTYNQLFEENPINASGVDAKAILSARLSKSRRLENLIAQLPGEKKNGLFGNLIALSLGLTPNFKSNFDLAEDAKLQLSKDTYDDDLDNLLAQIGDQYADLFLAAKNLSDAILLSDILRVNTEITKAPLSASMIKRYDEHHQDLTLLKALVRQQLPEKYKEIFFDQSKNGYAGYIDGGASQEEFYKFIKPILEKMDGTEELLVKLNREDLLRKQRTFDNGSIPHQIHLGELHAILRRQEDFYPFLKDNREKIEKILTFRIPYYVGPLARGNSRFAWMTRKSEETITPWNFEEVVDKGASAQSFIERMTNFDKNLPNEKVLPKHSLLYEYFTVYNELTKVKYVTEGMRKPAFLSGEQKKAIVDLLFKTNRKVTVKQLKEDYFKKIECFDSVEISGVEDRFNASLGTYHDLLKIIKDKDFLDNEENEDILEDIVLTLTLFEDREMIEERLKTYAHLFDDKVMKQLKRRRYTGWGRLSRKLINGIRDKQSGKTILDFLKSDGFANRNFMQLIHDDSLTFKEDIQKAQVSGQGDSLHEHIANLAGSPAIKKGILQTVKVVDELVKVMGRHKPENIVIEMARENQTTQKGQKNSRERMKRIEEGIKELGSQILKEHPVENTQLQNEKLYLYYLQNGRDMYVDQELDINRLSDYDVDHIVPQSFLKDDSIDNKVLTRSDKARGKSDNVPSEEVVKKMKNYWRQLLNAKLITQRKFDNLTKAERGGLSELDKAGFIKRQLVETRQITKHVAQILDSRMNTKYDENDKLIREVKVITLKSKLVSDFRKDFQFYKVREINNYHHAHDAYLNAVVGTALIKKYPKLESEFVYGDYKVYDVRKMIAKSEQEIGKATAKYFFYSNIMNFFKTEITLANGEIRKRPLIETNGETGEIVWDKGRDFATVRKVLSMPQVNIVKKTEVQTGGFSKESILPKRNSDKLIARKKDWDPKKYGGFDSPTVAYSVLVVAKVEKGKSKKLKSVKELLGITIMERSSFEKNPIDFLEAKGYKEVKKDLIIKLPKYSLFELENGRKRMLASAGELQKGNELALPSKYVNFLYLASHYEKLKGSPEDNEQKQLFVEQHKHYLDEIIEQISEFSKRVILADANLDKVLSAYNKHRDKPIREQAENIIHLFTLTNLGAPAAFKYFDTTIDRKRYTSTKEVLDATLIHQSITGLYETRIDLSQLGGDGGGGGGSSGGTLNLEDEYRLYETSAEPEVSPGSTWLSDFPQAWAETGGMGLAVRQAPLIIPLKATSTPVSIKQYPMSQEAKLGIKPHIQRLLDQGILVPCQSPWNTPLLPVKKPGTNDYRPVQDLREVNKRVEDIHPTVPNPYNLLSGLPPSHRWYTVLDLKDAFFCLRLHPTSQPLFAFEWRDPGMGISGQLTWTRLPQGFKNSPTLFNEALHRDLADFRIQHPDLILLQYVDDILLAATSELDCQQGTRALLLTLGNLGYRASAKKAQLCQKQVKYLGYLLKEGQRWLTEARKETVMGQPTPKTPRQLREFLGKAGFCRLFIPGFAEMAAPLYPLTKPGTLFNWGPDQQKAYQEIKQALLTAPALGLPDLTKPFELFVDEKQGYAKGVLTQKLGPWRRPVAYLSKKLDPVAAGWPPCLRMVAAIAVLRKDAGKLTMGQPLVILAPHAVEALVKQPPDRWLSNARMTHYQAMLLDTDRVQFGPVVALNPATLLPLPEEGAPHDCLEILAETHGTRPDLTDQPIPDADHTWYTDGSSFLQEGQRKAGAAVTTETEVIWARALPAGTSAQRAELIALTQALKMAEGKRLNVYTDSRYAFATAHIHGEIYRRRGWLTSEGREIKNKSEILALLKALFLPKRLSIIHCLGHQKGDSAEARGNRLADQAAREAAIKTPPDTSTLLAGKRTADGSEFEKRTADGSEFESPKKKAKVE

SEQ ID NO: 1931 - protein, 2091 aa, synthetic construct
MPAAKRVKLDGGDKKYSIGLDIGTNSVGWAVITDEYKVPSKKFKVLGNTDRHSIKKNLIGALLFDSGETAEATRLKRTARRRYTRRKNRICYLQEIFSNEMAKVDDSFFHRLEESFLVEEDKKHERHPIFGNIVDEVAYHEKYPTIYHLRKKLVDSTDKADLRLIYLALAHMIKFRGHFLIEGDLNPDNSDVDKLFIQLVQTYNQLFEENPINASGVDAKAILSARLSKSRRLENLIAQLPGEKKNGLFGNLIALSLGLTPNFKSNFDLAEDAKLQLSKDTYDDDLDNLLAQIGDQYADLFLAAKNLSDAILLSDILRVNTEITKAPLSASMIKRYDEHHQDLTLLKALVRQQLPEKYKEIFFDQSKNGYAGYIDGGASQEEFYKFIKPILEKMDGTEELLVKLNREDLLRKQRTFDNGSIPHQIHLGELHAILRRQEDFYPFLKDNREKIEKILTFRIPYYVGPLARGNSRFAWMTRKSEETITPWNFEEVVDKGASAQSFIERMTNFDKNLPNEKVLPKHSLLYEYFTVYNELTKVKYVTEGMRKPAFLSGEQKKAIVDLLFKTNRKVTVKQLKEDYFKKIECFDSVEISGVEDRFNASLGTYHDLLKIIKDKDFLDNEENEDILEDIVLTLTLFEDREMIEERLKTYAHLFDDKVMKQLKRRRYTGWGRLSRKLINGIRDKQSGKTILDFLKSDGFANRNFMQLIHDDSLTFKEDIQKAQVSGQGDSLHEHIANLAGSPAIKKGILQTVKVVDELVKVMGRHKPENIVIEMARENQTTQKGQKNSRERMKRIEEGIKELGSQILKEHPVENTQLQNEKLYLYYLQNGRDMYVDQELDINRLSDYDVDHIVPQSFLKDDSIDNKVLTRSDKARGKSDNVPSEEVVKKMKNYWRQLLNAKLITQRKFDNLTKAERGGLSELDKAGFIKRQLVETRQITKHVAQILDSRMNTKYDENDKLIREVKVITLKSKLVSDFRKDFQFYKVREINNYHHAHDAYLNAVVGTALIKKYPKLESEFVYGDYKVYDVRKMIAKSEQEIGKATAKYFFYSNIMNFFKTEITLANGEIRKRPLIETNGETGEIVWDKGRDFATVRKVLSMPQVNIVKKTEVQTGGFSKESILPKRNSDKLIARKKDWDPKKYGGFDSPTVAYSVLVVAKVEKGKSKKLKSVKELLGITIMERSSFEKNPIDFLEAKGYKEVKKDLIIKLPKYSLFELENGRKRMLASAGELQKGNELALPSKYVNFLYLASHYEKLKGSPEDNEQKQLFVEQHKHYLDEIIEQISEFSKRVILADANLDKVLSAYNKHRDKPIREQAENIIHLFTLTNLGAPAAFKYFDTTIDRKRYTSTKEVLDATLIHQSITGLYETRIDLSQLGGDGGGSSGGSGGTLNLEDEYRLYETSAEPEVSPGSTWLSDFPQAWAETGGMGLAVRQAPLIIPLKATSTPVSIKQYPMSQEAKLGIKPHIQRLLDQGILVPCQSPWNTPLLPVKKPGTNDYRPVQDLREVNKRVEDIHPTVPNPYNLLSGLPPSHRWYTVLDLKDAFFCLRLHPTSQPLFAFEWRDPGMGISGQLTWTRLPQGFKNSPTLFNEALHRDLADFRIQHPDLILLQYVDDILLAATSELDCQQGTRALLLTLGNLGYRASAKKAQLCQKQVKYLGYLLKEGQRWLTEARKETVMGQPTPKTPRQLREFLGKAGFCRLFIPGFAEMAAPLYPLTKPGTLFNWGPDQQKAYQEIKQALLTAPALGLPDLTKPFELFVDEKQGYAKGVLTQKLGPWRRPVAYLSKKLDPVAAGWPPCLRMVAAIAVLRKDAGKLTMGQPLVILAPHAVEALVKQPPDRWLSNARMTHYQAMLLDTDRVQFGPVVALNPATLLPLPEEGAPHDCLEILAETHGTRPDLTDQPIPDADHTWYTDGSSFLQEGQRKAGAAVTTETEVIWARALPAGTSAQRAELIALTQALKMAEGKRLNVYTDSRYAFATAHIHGEIYRRRGWLTSEGREIKNKSEILALLKALFLPKRLSIIHCLGHQKGDSAEARGNRLADQAAREAAIKTPPDTSTLLAGKRTADGSEFEKRTADGSEFESPKKKAKVE

SEQ ID NO: 1932 - protein, 2094 aa, synthetic construct
MPAAKRVKLDGGDKKYSIGLDIGTNSVGWAVITDEYKVPSKKFKVLGNTDRHSIKKNLIGALLFDSGETAEATRLKRTARRRYTRRKNRICYLQEIFSNEMAKVDDSFFHRLEESFLVEEDKKHERHPIFGNIVDEVAYHEKYPTIYHLRKKLVDSTDKADLRLIYLALAHMIKFRGHFLIEGDLNPDNSDVDKLFIQLVQTYNQLFEENPINASGVDAKAILSARLSKSRRLENLIAQLPGEKKNGLFGNLIALSLGLTPNFKSNFDLAEDAKLQLSKDTYDDDLDNLLAQIGDQYADLFLAAKNLSDAILLSDILRVNTEITKAPLSASMIKRYDEHHQDLTLLKALVRQQLPEKYKEIFFDQSKNGYAGYIDGGASQEEFYKFIKPILEKMDGTEELLVKLNREDLLRKQRTFDNGSIPHQIHLGELHAILRRQEDFYPFLKDNREKIEKILTFRIPYYVGPLARGNSRFAWMTRKSEETITPWNFEEVVDKGASAQSFIERMTNFDKNLPNEKVLPKHSLLYEYFTVYNELTKVKYVTEGMRKPAFLSGEQKKAIVDLLFKTNRKVTVKQLKEDYFKKIECFDSVEISGVEDRFNASLGTYHDLLKIIKDKDFLDNEENEDILEDIVLTLTLFEDREMIEERLKTYAHLFDDKVMKQLKRRRYTGWGRLSRKLINGIRDKQSGKTILDFLKSDGFANRNFMQLIHDDSLTFKEDIQKAQVSGQGDSLHEHIANLAGSPAIKKGILQTVKVVDELVKVMGRHKPENIVIEMARENQTTQKGQKNSRERMKRIEEGIKELGSQILKEHPVENTQLQNEKLYLYYLQNGRDMYVDQELDINRLSDYDVDHIVPQSFLKDDSIDNKVLTRSDKARGKSDNVPSEEVVKKMKNYWRQLLNAKLITQRKFDNLTKAERGGLSELDKAGFIKRQLVETRQITKHVAQILDSRMNTKYDENDKLIREVKVITLKSKLVSDFRKDFQFYKVREINNYHHAHDAYLNAVVGTALIKKYPKLESEFVYGDYKVYDVRKMIAKSEQEIGKATAKYFFYSNIMNFFKTEITLANGEIRKRPLIETNGETGEIVWDKGRDFATVRKVLSMPQVNIVKKTEVQTGGFSKESILPKRNSDKLIARKKDWDPKKYGGFDSPTVAYSVLVVAKVEKGKSKKLKSVKELLGITIMERSSFEKNPIDFLEAKGYKEVKKDLIIKLPKYSLFELENGRKRMLASAGELQKGNELALPSKYVNFLYLASHYEKLKGSPEDNEQKQLFVEQHKHYLDEIIEQISEFSKRVILADANLDKVLSAYNKHRDKPIREQAENIIHLFTLTNLGAPAAFKYFDTTIDRKRYTSTKEVLDATLIHQSITGLYETRIDLSQLGGDGGGSSGGSGGGGGTLNLEDEYRLYETSAEPEVSPGSTWLSDFPQAWAETGGMGLAVRQAPLIIPLKATSTPVSIKQYPMSQEAKLGIKPHIQRLLDQGILVPCQSPWNTPLLPVKKPGTNDYRPVQDLREVNKRVEDIHPTVPNPYNLLSGLPPSHRWYTVLDLKDAFFCLRLHPTSQPLFAFEWRDPGMGISGQLTWTRLPQGFKNSPTLFNEALHRDLADFRIQHPDLILLQYVDDILLAATSELDCQQGTRALLLTLGNLGYRASAKKAQLCQKQVKYLGYLLKEGQRWLTEARKETVMGQPTPKTPRQLREFLGKAGFCRLFIPGFAEMAAPLYPLTKPGTLFNWGPDQQKAYQEIKQALLTAPALGLPDLTKPFELFVDEKQGYAKGVLTQKLGPWRRPVAYLSKKLDPVAAGWPPCLRMVAAIAVLRKDAGKLTMGQPLVILAPHAVEALVKQPPDRWLSNARMTHYQAMLLDTDRVQFGPVVALNPATLLPLPEEGAPHDCLEILAETHGTRPDLTDQPIPDADHTWYTDGSSFLQEGQRKAGAAVTTETEVIWARALPAGTSAQRAELIALTQALKMAEGKRLNVYTDSRYAFATAHIHGEIYRRRGWLTSEGREIKNKSEILALLKALFLPKRLSIIHCLGHQKGDSAEARGNRLADQAAREAAIKTPPDTSTLLAGKRTADGSEFEKRTADGSEFESPKKKAKVE

SEQ ID NO: 1933 - protein, 2092 aa, synthetic construct
MPAAKRVKLDGGDKKYSIGLDIGTNSVGWAVITDEYKVPSKKFKVLGNTDRHSIKKNLIGALLFDSGETAEATRLKRTARRRYTRRKNRICYLQEIFSNEMAKVDDSFFHRLEESFLVEEDKKHERHPIFGNIVDEVAYHEKYPTIYHLRKKLVDSTDKADLRLIYLALAHMIKFRGHFLIEGDLNPDNSDVDKLFIQLVQTYNQLFEENPINASGVDAKAILSARLSKSRRLENLIAQLPGEKKNGLFGNLIALSLGLTPNFKSNFDLAEDAKLQLSKDTYDDDLDNLLAQIGDQYADLFLAAKNLSDAILLSDILRVNTEITKAPLSASMIKRYDEHHQDLTLLKALVRQQLPEKYKEIFFDQSKNGYAGYIDGGASQEEFYKFIKPILEKMDGTEELLVKLNREDLLRKQRTFDNGSIPHQIHLGELHAILRRQEDFYPFLKDNREKIEKILTFRIPYYVGPLARGNSRFAWMTRKSEETITPWNFEEVVDKGASAQSFIERMTNFDKNLPNEKVLPKHSLLYEYFTVYNELTKVKYVTEGMRKPAFLSGEQKKAIVDLLFKTNRKVTVKQLKEDYFKKIECFDSVEISGVEDRFNASLGTYHDLLKIIKDKDFLDNEENEDILEDIVLTLTLFEDREMIEERLKTYAHLFDDKVMKQLKRRRYTGWGRLSRKLINGIRDKQSGKTILDFLKSDGFANRNFMQLIHDDSLTFKEDIQKAQVSGQGDSLHEHIANLAGSPAIKKGILQTVKVVDELVKVMGRHKPENIVIEMARENQTTQKGQKNSRERMKRIEEGIKELGSQILKEHPVENTQLQNEKLYLYYLQNGRDMYVDQELDINRLSDYDVDHIVPQSFLKDDSIDNKVLTRSDKARGKSDNVPSEEVVKKMKNYWRQLLNAKLITQRKFDNLTKAERGGLSELDKAGFIKRQLVETRQITKHVAQILDSRMNTKYDENDKLIREVKVITLKSKLVSDFRKDFQFYKVREINNYHHAHDAYLNAVVGTALIKKYPKLESEFVYGDYKVYDVRKMIAKSEQEIGKATAKYFFYSNIMNFFKTEITLANGEIRKRPLIETNGETGEIVWDKGRDFATVRKVLSMPQVNIVKKTEVQTGGFSKESILPKRNSDKLIARKKDWDPKKYGGFDSPTVAYSVLVVAKVEKGKSKKLKSVKELLGITIMERSSFEKNPIDFLEAKGYKEVKKDLIIKLPKYSLFELENGRKRMLASAGELQKGNELALPSKYVNFLYLASHYEKLKGSPEDNEQKQLFVEQHKHYLDEIIEQISEFSKRVILADANLDKVLSAYNKHRDKPIREQAENIIHLFTLTNLGAPAAFKYFDTTIDRKRYTSTKEVLDATLIHQSITGLYETRIDLSQLGGDGGPAPAPAPGGTLNLEDEYRLYETSAEPEVSPGSTWLSDFPQAWAETGGMGLAVRQAPLIIPLKATSTPVSIKQYPMSQEAKLGIKPHIQRLLDQGILVPCQSPWNTPLLPVKKPGTNDYRPVQDLREVNKRVEDIHPTVPNPYNLLSGLPPSHRWYTVLDLKDAFFCLRLHPTSQPLFAFEWRDPGMGISGQLTWTRLPQGFKNSPTLFNEALHRDLADFRIQHPDLILLQYVDDILLAATSELDCQQGTRALLLTLGNLGYRASAKKAQLCQKQVKYLGYLLKEGQRWLTEARKETVMGQPTPKTPRQLREFLGKAGFCRLFIPGFAEMAAPLYPLTKPGTLFNWGPDQQKAYQEIKQALLTAPALGLPDLTKPFELFVDEKQGYAKGVLTQKLGPWRRPVAYLSKKLDPVAAGWPPCLRMVAAIAVLRKDAGKLTMGQPLVILAPHAVEALVKQPPDRWLSNARMTHYQAMLLDTDRVQFGPVVALNPATLLPLPEEGAPHDCLEILAETHGTRPDLTDQPIPDADHTWYTDGSSFLQEGQRKAGAAVTTETEVIWARALPAGTSAQRAELIALTQALKMAEGKRLNVYTDSRYAFATAHIHGEIYRRRGWLTSEGREIKNKSEILALLKALFLPKRLSIIHCLGHQKGDSAEARGNRLADQAAREAAIKTPPDTSTLLAGKRTADGSEFEKRTADGSEFESPKKKAKVE

SEQ ID NO: 1934 - protein, 2102 aa, synthetic construct
MPAAKRVKLDGGDKKYSIGLDIGTNSVGWAVITDEYKVPSKKFKVLGNTDRHSIKKNLIGALLFDSGETAEATRLKRTARRRYTRRKNRICYLQEIFSNEMAKVDDSFFHRLEESFLVEEDKKHERHPIFGNIVDEVAYHEKYPTIYHLRKKLVDSTDKADLRLIYLALAHMIKFRGHFLIEGDLNPDNSDVDKLFIQLVQTYNQLFEENPINASGVDAKAILSARLSKSRRLENLIAQLPGEKKNGLFGNLIALSLGLTPNFKSNFDLAEDAKLQLSKDTYDDDLDNLLAQIGDQYADLFLAAKNLSDAILLSDILRVNTEITKAPLSASMIKRYDEHHQDLTLLKALVRQQLPEKYKEIFFDQSKNGYAGYIDGGASQEEFYKFIKPILEKMDGTEELLVKLNREDLLRKQRTFDNGSIPHQIHLGELHAILRRQEDFYPFLKDNREKIEKILTFRIPYYVGPLARGNSRFAWMTRKSEETITPWNFEEVVDKGASAQSFIERMTNFDKNLPNEKVLPKHSLLYEYFTVYNELTKVKYVTEGMRKPAFLSGEQKKAIVDLLFKTNRKVTVKQLKEDYFKKIECFDSVEISGVEDRFNASLGTYHDLLKIIKDKDFLDNEENEDILEDIVLTLTLFEDREMIEERLKTYAHLFDDKVMKQLKRRRYTGWGRLSRKLINGIRDKQSGKTILDFLKSDGFANRNFMQLIHDDSLTFKEDIQKAQVSGQGDSLHEHIANLAGSPAIKKGILQTVKVVDELVKVMGRHKPENIVIEMARENQTTQKGQKNSRERMKRIEEGIKELGSQILKEHPVENTQLQNEKLYLYYLQNGRDMYVDQELDINRLSDYDVDHIVPQSFLKDDSIDNKVLTRSDKARGKSDNVPSEEVVKKMKNYWRQLLNAKLITQRKFDNLTKAERGGLSELDKAGFIKRQLVETRQITKHVAQILDSRMNTKYDENDKLIREVKVITLKSKLVSDFRKDFQFYKVREINNYHHAHDAYLNAVVGTALIKKYPKLESEFVYGDYKVYDVRKMIAKSEQEIGKATAKYFFYSNIMNFFKTEITLANGEIRKRPLIETNGETGEIVWDKGRDFATVRKVLSMPQVNIVKKTEVQTGGFSKESILPKRNSDKLIARKKDWDPKKYGGFDSPTVAYSVLVVAKVEKGKSKKLKSVKELLGITIMERSSFEKNPIDFLEAKGYKEVKKDLIIKLPKYSLFELENGRKRMLASAGELQKGNELALPSKYVNFLYLASHYEKLKGSPEDNEQKQLFVEQHKHYLDEIIEQISEFSKRVILADANLDKVLSAYNKHRDKPIREQAENIIHLFTLTNLGAPAAFKYFDTTIDRKRYTSTKEVLDATLIHQSITGLYETRIDLSQLGGDGGPAPAPAPAPAPGGTVSLQDEHRLFDIPVTTSLPDVWLQDFPQAWAETGGLGRAKCQAPIIIDLKPTAVPVSIKQYPMSLEAHMGIRQHIIKFLELGVLRPCRSPWNTPLLPVKKPGTQDYRPVQDLREINKRTVDIHPTVPNPYNLLSTLKPDYSWYTVLDLKDAFFCLPLAPQSQELFAFEWKDPERGISGQLTWTRLPQGFKNSPTLFNEALHRDLTDFRTQHPEVTLLQYVDDLLLAAPTKKACTQGTRHLLQELGEKGYRASAKKAQICQTKVTYLGYILSEGKRWLTPGRIETVARIPPPRNPREVREFLGKAGFCRLFIPGFAELAAPLYALTKPSTPFTWQTEHQLAFEALKKALLSAPALGLPDTSKPFTLFLDERQGIAKGVLTQKLGPWKRPVAYLSKKLDPVAAGWPPCLRIMAATAMLVKDSAKLTLGQPLTVITPHTLEAIVRQPPDRWITNARLTHYQALLLDTDRVQFGPPVTLNPATLLPVPENQPSPHDCRQVLAETHGTREDLKDQELPDADHTWYTDGSSYLDSGTRRAGAAVVDGHNTIWAQSLPPGTSAQKAELIALTKALELSKGKKANIYTDSRYAFATAHTHGSIYERRGWLTSEGKEIKNKAEIIALLKALFLPQEVAIIHCPGHQKGQDPVAVGNRQADRVARQAAMAEVLTLATEPDNTSHITAGKRTADGSEFEKRTADGSEFESPKKKAKVE

SEQ ID NO: 1935 - protein, 2102 aa, synthetic construct
MPAAKRVKLDGGDKKYSIGLDIGTNSVGWAVITDEYKVPSKKFKVLGNTDRHSIKKNLIGALLFDSGETAEATRLKRTARRRYTRRKNRICYLQEIFSNEMAKVDDSFFHRLEESFLVEEDKKHERHPIFGNIVDEVAYHEKYPTIYHLRKKLVDSTDKADLRLIYLALAHMIKFRGHFLIEGDLNPDNSDVDKLFIQLVQTYNQLFEENPINASGVDAKAILSARLSKSRRLENLIAQLPGEKKNGLFGNLIALSLGLTPNFKSNFDLAEDAKLQLSKDTYDDDLDNLLAQIGDQYADLFLAAKNLSDAILLSDILRVNTEITKAPLSASMIKRYDEHHQDLTLLKALVRQQLPEKYKEIFFDQSKNGYAGYIDGGASQEEFYKFIKPILEKMDGTEELLVKLNREDLLRKQRTFDNGSIPHQIHLGELHAILRRQEDFYPFLKDNREKIEKILTFRIPYYVGPLARGNSRFAWMTRKSEETITPWNFEEVVDKGASAQSFIERMTNFDKNLPNEKVLPKHSLLYEYFTVYNELTKVKYVTEGMRKPAFLSGEQKKAIVDLLFKTNRKVTVKQLKEDYFKKIECFDSVEISGVEDRFNASLGTYHDLLKIIKDKDFLDNEENEDILEDIVLTLTLFEDREMIEERLKTYAHLFDDKVMKQLKRRRYTGWGRLSRKLINGIRDKQSGKTILDFLKSDGFANRNFMQLIHDDSLTFKEDIQKAQVSGQGDSLHEHIANLAGSPAIKKGILQTVKVVDELVKVMGRHKPENIVIEMARENQTTQKGQKNSRERMKRIEEGIKELGSQILKEHPVENTQLQNEKLYLYYLQNGRDMYVDQELDINRLSDYDVDHIVPQSFLKDDSIDNKVLTRSDKARGKSDNVPSEEVVKKMKNYWRQLLNAKLITQRKFDNLTKAERGGLSELDKAGFIKRQLVETRQITKHVAQILDSRMNTKYDENDKLIREVKVITLKSKLVSDFRKDFQFYKVREINNYHHAHDAYLNAVVGTALIKKYPKLESEFVYGDYKVYDVRKMIAKSEQEIGKATAKYFFYSNIMNFFKTEITLANGEIRKRPLIETNGETGEIVWDKGRDFATVRKVLSMPQVNIVKKTEVQTGGFSKESILPKRNSDKLIARKKDWDPKKYGGFDSPTVAYSVLVVAKVEKGKSKKLKSVKELLGITIMERSSFEKNPIDFLEAKGYKEVKKDLIIKLPKYSLFELENGRKRMLASAGELQKGNELALPSKYVNFLYLASHYEKLKGSPEDNEQKQLFVEQHKHYLDEIIEQISEFSKRVILADANLDKVLSAYNKHRDKPIREQAENIIHLFTLTNLGAPAAFKYFDTTIDRKRYTSTKEVLDATLIHQSITGLYETRIDLSQLGGDGGEAAAKGGSGGGGGTVSLQDEHRLFDIPVTTSLPDVWLQDFPQAWAETGGLGRAKCQAPIIIDLKPTAVPVSIKQYPMSLEAHMGIRQHIIKFLELGVLRPCRSPWNTPLLPVKKPGTQDYRPVQDLREINKRTVDIHPTVPNPYNLLSTLKPDYSWYTVLDLKDAFFCLPLAPQSQELFAFEWKDPERGISGQLTWTRLPQGFKNSPTLFNEALHRDLTDFRTQHPEVTLLQYVDDLLLAAPTKKACTQGTRHLLQELGEKGYRASAKKAQICQTKVTYLGYILSEGKRWLTPGRIETVARIPPPRNPREVREFLGKAGFCRLFIPGFAELAAPLYALTKPSTPFTWQTEHQLAFEALKKALLSAPALGLPDTSKPFTLFLDERQGIAKGVLTQKLGPWKRPVAYLSKKLDPVAAGWPPCLRIMAATAMLVKDSAKLTLGQPLTVITPHTLEAIVRQPPDRWITNARLTHYQALLLDTDRVQFGPPVTLNPATLLPVPENQPSPHDCRQVLAETHGTREDLKDQELPDADHTWYTDGSSYLDSGTRRAGAAVVDGHNTIWAQSLPPGTSAQKAELIALTKALELSKGKKANIYTDSRYAFATAHTHGSIYERRGWLTSEGKEIKNKAEIIALLKALFLPQEVAIIHCPGHQKGQDPVAVGNRQADRVARQAAMAEVLTLATEPDNTSHITAGKRTADGSEFEKRTADGSEFESPKKKAKVE

SEQ ID NO: 1936 - protein, 2121 aa, synthetic construct
MPAAKRVKLDGGDKKYSIGLDIGTNSVGWAVITDEYKVPSKKFKVLGNTDRHSIKKNLIGALLFDSGETAEATRLKRTARRRYTRRKNRICYLQEIFSNEMAKVDDSFFHRLEESFLVEEDKKHERHPIFGNIVDEVAYHEKYPTIYHLRKKLVDSTDKADLRLIYLALAHMIKFRGHFLIEGDLNPDNSDVDKLFIQLVQTYNQLFEENPINASGVDAKAILSARLSKSRRLENLIAQLPGEKKNGLFGNLIALSLGLTPNFKSNFDLAEDAKLQLSKDTYDDDLDNLLAQIGDQYADLFLAAKNLSDAILLSDILRVNTEITKAPLSASMIKRYDEHHQDLTLLKALVRQQLPEKYKEIFFDQSKNGYAGYIDGGASQEEFYKFIKPILEKMDGTEELLVKLNREDLLRKQRTFDNGSIPHQIHLGELHAILRRQEDFYPFLKDNREKIEKILTFRIPYYVGPLARGNSRFAWMTRKSEETITPWNFEEVVDKGASAQSFIERMTNFDKNLPNEKVLPKHSLLYEYFTVYNELTKVKYVTEGMRKPAFLSGEQKKAIVDLLFKTNRKVTVKQLKEDYFKKIECFDSVEISGVEDRFNASLGTYHDLLKIIKDKDFLDNEENEDILEDIVLTLTLFEDREMIEERLKTYAHLFDDKVMKQLKRRRYTGWGRLSRKLINGIRDKQSGKTILDFLKSDGFANRNFMQLIHDDSLTFKEDIQKAQVSGQGDSLHEHIANLAGSPAIKKGILQTVKVVDELVKVMGRHKPENIVIEMARENQTTQKGQKNSRERMKRIEEGIKELGSQILKEHPVENTQLQNEKLYLYYLQNGRDMYVDQELDINRLSDYDVDHIVPQSFLKDDSIDNKVLTRSDKARGKSDNVPSEEVVKKMKNYWRQLLNAKLITQRKFDNLTKAERGGLSELDKAGFIKRQLVETRQITKHVAQILDSRMNTKYDENDKLIREVKVITLKSKLVSDFRKDFQFYKVREINNYHHAHDAYLNAVVGTALIKKYPKLESEFVYGDYKVYDVRKMIAKSEQEIGKATAKYFFYSNIMNFFKTEITLANGEIRKRPLIETNGETGEIVWDKGRDFATVRKVLSMPQVNIVKKTEVQTGGFSKESILPKRNSDKLIARKKDWDPKKYGGFDSPTVAYSVLVVAKVEKGKSKKLKSVKELLGITIMERSSFEKNPIDFLEAKGYKEVKKDLIIKLPKYSLFELENGRKRMLASAGELQKGNELALPSKYVNFLYLASHYEKLKGSPEDNEQKQLFVEQHKHYLDEIIEQISEFSKRVILADANLDKVLSAYNKHRDKPIREQAENIIHLFTLTNLGAPAAFKYFDTTIDRKRYTSTKEVLDATLIHQSITGLYETRIDLSQLGGDGGGGGGSGGGGSGGGGSGGGGSGGGGSGGGGSGGTVSLQDEHRLFDIPVTTSLPDVWLQDFPQAWAETGGLGRAKCQAPIIIDLKPTAVPVSIKQYPMSLEAHMGIRQHIIKFLELGVLRPCRSPWNTPLLPVKKPGTQDYRPVQDLREINKRTVDIHPTVPNPYNLLSTLKPDYSWYTVLDLKDAFFCLPLAPQSQELFAFEWKDPERGISGQLTWTRLPQGFKNSPTLFNEALHRDLTDFRTQHPEVTLLQYVDDLLLAAPTKKACTQGTRHLLQELGEKGYRASAKKAQICQTKVTYLGYILSEGKRWLTPGRIETVARIPPPRNPREVREFLGKAGFCRLFIPGFAELAAPLYALTKPSTPFTWQTEHQLAFEALKKALLSAPALGLPDTSKPFTLFLDERQGIAKGVLTQKLGPWKRPVAYLSKKLDPVAAGWPPCLRIMAATAMLVKDSAKLTLGQPLTVITPHTLEAIVRQPPDRWITNARLTHYQALLLDTDRVQFGPPVTLNPATLLPVPENQPSPHDCRQVLAETHGTREDLKDQELPDADHTWYTDGSSYLDSGTRRAGAAVVDGHNTIWAQSLPPGTSAQKAELIALTKALELSKGKKANIYTDSRYAFATAHTHGSIYERRGWLTSEGKEIKNKAEIIALLKALFLPQEVAIIHCPGHQKGQDPVAVGNRQADRVARQAAMAEVLTLATEPDNTSHITAGKRTADGSEFEKRTADGSEFESPKKKAKVE

SEQ ID NO: 1937 - protein, 2102 aa, synthetic construct
MPAAKRVKLDGGDKKYSIGLDIGTNSVGWAVITDEYKVPSKKFKVLGNTDRHSIKKNLIGALLFDSGETAEATRLKRTARRRYTRRKNRICYLQEIFSNEMAKVDDSFFHRLEESFLVEEDKKHERHPIFGNIVDEVAYHEKYPTIYHLRKKLVDSTDKADLRLIYLALAHMIKFRGHFLIEGDLNPDNSDVDKLFIQLVQTYNQLFEENPINASGVDAKAILSARLSKSRRLENLIAQLPGEKKNGLFGNLIALSLGLTPNFKSNFDLAEDAKLQLSKDTYDDDLDNLLAQIGDQYADLFLAAKNLSDAILLSDILRVNTEITKAPLSASMIKRYDEHHQDLTLLKALVRQQLPEKYKEIFFDQSKNGYAGYIDGGASQEEFYKFIKPILEKMDGTEELLVKLNREDLLRKQRTFDNGSIPHQIHLGELHAILRRQEDFYPFLKDNREKIEKILTFRIPYYVGPLARGNSRFAWMTRKSEETITPWNFEEVVDKGASAQSFIERMTNFDKNLPNEKVLPKHSLLYEYFTVYNELTKVKYVTEGMRKPAFLSGEQKKAIVDLLFKTNRKVTVKQLKEDYFKKIECFDSVEISGVEDRFNASLGTYHDLLKIIKDKDFLDNEENEDILEDIVLTLTLFEDREMIEERLKTYAHLFDDKVMKQLKRRRYTGWGRLSRKLINGIRDKQSGKTILDFLKSDGFANRNFMQLIHDDSLTFKEDIQKAQVSGQGDSLHEHIANLAGSPAIKKGILQTVKVVDELVKVMGRHKPENIVIEMARENQTTQKGQKNSRERMKRIEEGIKELGSQILKEHPVENTQLQNEKLYLYYLQNGRDMYVDQELDINRLSDYDVDHIVPQSFLKDDSIDNKVLTRSDKARGKSDNVPSEEVVKKMKNYWRQLLNAKLITQRKFDNLTKAERGGLSELDKAGFIKRQLVETRQITKHVAQILDSRMNTKYDENDKLIREVKVITLKSKLVSDFRKDFQFYKVREINNYHHAHDAYLNAVVGTALIKKYPKLESEFVYGDYKVYDVRKMIAKSEQEIGKATAKYFFYSNIMNFFKTEITLANGEIRKRPLIETNGETGEIVWDKGRDFATVRKVLSMPQVNIVKKTEVQTGGFSKESILPKRNSDKLIARKKDWDPKKYGGFDSPTVAYSVLVVAKVEKGKSKKLKSVKELLGITIMERSSFEKNPIDFLEAKGYKEVKKDLIIKLPKYSLFELENGRKRMLASAGELQKGNELALPSKYVNFLYLASHYEKLKGSPEDNEQKQLFVEQHKHYLDEIIEQISEFSKRVILADANLDKVLSAYNKHRDKPIREQAENIIHLFTLTNLGAPAAFKYFDTTIDRKRYTSTKEVLDATLIHQSITGLYETRIDLSQLGGDGGGGGGGSEAAAKGGTVSLQDEHRLFDIPVTTSLPDVWLQDFPQAWAETGGLGRAKCQAPIIIDLKPTAVPVSIKQYPMSLEAHMGIRQHIIKFLELGVLRPCRSPWNTPLLPVKKPGTQDYRPVQDLREINKRTVDIHPTVPNPYNLLSTLKPDYSWYTVLDLKDAFFCLPLAPQSQELFAFEWKDPERGISGQLTWTRLPQGFKNSPTLFNEALHRDLTDFRTQHPEVTLLQYVDDLLLAAPTKKACTQGTRHLLQELGEKGYRASAKKAQICQTKVTYLGYILSEGKRWLTPGRIETVARIPPPRNPREVREFLGKAGFCRLFIPGFAELAAPLYALTKPSTPFTWQTEHQLAFEALKKALLSAPALGLPDTSKPFTLFLDERQGIAKGVLTQKLGPWKRPVAYLSKKLDPVAAGWPPCLRIMAATAMLVKDSAKLTLGQPLTVITPHTLEAIVRQPPDRWITNARLTHYQALLLDTDRVQFGPPVTLNPATLLPVPENQPSPHDCRQVLAETHGTREDLKDQELPDADHTWYTDGSSYLDSGTRRAGAAVVDGHNTIWAQSLPPGTSAQKAELIALTKALELSKGKKANIYTDSRYAFATAHTHGSIYERRGWLTSEGKEIKNKAEIIALLKALFLPQEVAIIHCPGHQKGQDPVAVGNRQADRVARQAAMAEVLTLATEPDNTSHITAGKRTADGSEFEKRTADGSEFESPKKKAKVE

SEQ ID NO: 1938 - protein, 2102 aa, synthetic construct
MPAAKRVKLDGGDKKYSIGLDIGTNSVGWAVITDEYKVPSKKFKVLGNTDRHSIKKNLIGALLFDSGETAEATRLKRTARRRYTRRKNRICYLQEIFSNEMAKVDDSFFHRLEESFLVEEDKKHERHPIFGNIVDEVAYHEKYPTIYHLRKKLVDSTDKADLRLIYLALAHMIKFRGHFLIEGDLNPDNSDVDKLFIQLVQTYNQLFEENPINASGVDAKAILSARLSKSRRLENLIAQLPGEKKNGLFGNLIALSLGLTPNFKSNFDLAEDAKLQLSKDTYDDDLDNLLAQIGDQYADLFLAAKNLSDAILLSDILRVNTEITKAPLSASMIKRYDEHHQDLTLLKALVRQQLPEKYKEIFFDQSKNGYAGYIDGGASQEEFYKFIKPILEKMDGTEELLVKLNREDLLRKQRTFDNGSIPHQIHLGELHAILRRQEDFYPFLKDNREKIEKILTFRIPYYVGPLARGNSRFAWMTRKSEETITPWNFEEVVDKGASAQSFIERMTNFDKNLPNEKVLPKHSLLYEYFTVYNELTKVKYVTEGMRKPAFLSGEQKKAIVDLLFKTNRKVTVKQLKEDYFKKIECFDSVEISGVEDRFNASLGTYHDLLKIIKDKDFLDNEENEDILEDIVLTLTLFEDREMIEERLKTYAHLFDDKVMKQLKRRRYTGWGRLSRKLINGIRDKQSGKTILDFLKSDGFANRNFMQLIHDDSLTFKEDIQKAQVSGQGDSLHEHIANLAGSPAIKKGILQTVKVVDELVKVMGRHKPENIVIEMARENQTTQKGQKNSRERMKRIEEGIKELGSQILKEHPVENTQLQNEKLYLYYLQNGRDMYVDQELDINRLSDYDVDHIVPQSFLKDDSIDNKVLTRSDKARGKSDNVPSEEVVKKMKNYWRQLLNAKLITQRKFDNLTKAERGGLSELDKAGFIKRQLVETRQITKHVAQILDSRMNTKYDENDKLIREVKVITLKSKLVSDFRKDFQFYKVREINNYHHAHDAYLNAVVGTALIKKYPKLESEFVYGDYKVYDVRKMIAKSEQEIGKATAKYFFYSNIMNFFKTEITLANGEIRKRPLIETNGETGEIVWDKGRDFATVRKVLSMPQVNIVKKTEVQTGGFSKESILPKRNSDKLIARKKDWDPKKYGGFDSPTVAYSVLVVAKVEKGKSKKLKSVKELLGITIMERSSFEKNPIDFLEAKGYKEVKKDLIIKLPKYSLFELENGRKRMLASAGELQKGNELALPSKYVNFLYLASHYEKLKGSPEDNEQKQLFVEQHKHYLDEIIEQISEFSKRVILADANLDKVLSAYNKHRDKPIREQAENIIHLFTLTNLGAPAAFKYFDTTIDRKRYTSTKEVLDATLIHQSITGLYETRIDLSQLGGDGGGGGPAPEAAAKGGTVSLQDEHRLFDIPVTTSLPDVWLQDFPQAWAETGGLGRAKCQAPIIIDLKPTAVPVSIKQYPMSLEAHMGIRQHIIKFLELGVLRPCRSPWNTPLLPVKKPGTQDYRPVQDLREINKRTVDIHPTVPNPYNLLSTLKPDYSWYTVLDLKDAFFCLPLAPQSQELFAFEWKDPERGISGQLTWTRLPQGFKNSPTLFNEALHRDLTDFRTQHPEVTLLQYVDDLLLAAPTKKACTQGTRHLLQELGEKGYRASAKKAQICQTKVTYLGYILSEGKRWLTPGRIETVARIPPPRNPREVREFLGKAGFCRLFIPGFAELAAPLYALTKPSTPFTWQTEHQLAFEALKKALLSAPALGLPDTSKPFTLFLDERQGIAKGVLTQKLGPWKRPVAYLSKKLDPVAAGWPPCLRIMAATAMLVKDSAKLTLGQPLTVITPHTLEAIVRQPPDRWITNARLTHYQALLLDTDRVQFGPPVTLNPATLLPVPENQPSPHDCRQVLAETHGTREDLKDQELPDADHTWYTDGSSYLDSGTRRAGAAVVDGHNTIWAQSLPPGTSAQKAELIALTKALELSKGKKANIYTDSRYAFATAHTHGSIYERRGWLTSEGKEIKNKAEIIALLKALFLPQEVAIIHCPGHQKGQDPVAVGNRQADRVARQAAMAEVLTLATEPDNTSHITAGKRTADGSEFEKRTADGSEFESPKKKAKVE

SEQ ID NO: 1939 - protein, 2102 aa, synthetic construct
MPAAKRVKLDGGDKKYSIGLDIGTNSVGWAVITDEYKVPSKKFKVLGNTDRHSIKKNLIGALLFDSGETAEATRLKRTARRRYTRRKNRICYLQEIFSNEMAKVDDSFFHRLEESFLVEEDKKHERHPIFGNIVDEVAYHEKYPTIYHLRKKLVDSTDKADLRLIYLALAHMIKFRGHFLIEGDLNPDNSDVDKLFIQLVQTYNQLFEENPINASGVDAKAILSARLSKSRRLENLIAQLPGEKKNGLFGNLIALSLGLTPNFKSNFDLAEDAKLQLSKDTYDDDLDNLLAQIGDQYADLFLAAKNLSDAILLSDILRVNTEITKAPLSASMIKRYDEHHQDLTLLKALVRQQLPEKYKEIFFDQSKNGYAGYIDGGASQEEFYKFIKPILEKMDGTEELLVKLNREDLLRKQRTFDNGSIPHQIHLGELHAILRRQEDFYPFLKDNREKIEKILTFRIPYYVGPLARGNSRFAWMTRKSEETITPWNFEEVVDKGASAQSFIERMTNFDKNLPNEKVLPKHSLLYEYFTVYNELTKVKYVTEGMRKPAFLSGEQKKAIVDLLFKTNRKVTVKQLKEDYFKKIECFDSVEISGVEDRFNASLGTYHDLLKIIKDKDFLDNEENEDILEDIVLTLTLFEDREMIEERLKTYAHLFDDKVMKQLKRRRYTGWGRLSRKLINGIRDKQSGKTILDFLKSDGFANRNFMQLIHDDSLTFKEDIQKAQVSGQGDSLHEHIANLAGSPAIKKGILQTVKVVDELVKVMGRHKPENIVIEMARENQTTQKGQKNSRERMKRIEEGIKELGSQILKEHPVENTQLQNEKLYLYYLQNGRDMYVDQELDINRLSDYDVDHIVPQSFLKDDSIDNKVLTRSDKARGKSDNVPSEEVVKKMKNYWRQLLNAKLITQRKFDNLTKAERGGLSELDKAGFIKRQLVETRQITKHVAQILDSRMNTKYDENDKLIREVKVITLKSKLVSDFRKDFQFYKVREINNYHHAHDAYLNAVVGTALIKKYPKLESEFVYGDYKVYDVRKMIAKSEQEIGKATAKYFFYSNIMNFFKTEITLANGEIRKRPLIETNGETGEIVWDKGRDFATVRKVLSMPQVNIVKKTEVQTGGFSKESILPKRNSDKLIARKKDWDPKKYGGFDSPTVAYSVLVVAKVEKGKSKKLKSVKELLGITIMERSSFEKNPIDFLEAKGYKEVKKDLIIKLPKYSLFELENGRKRMLASAGELQKGNELALPSKYVNFLYLASHYEKLKGSPEDNEQKQLFVEQHKHYLDEIIEQISEFSKRVILADANLDKVLSAYNKHRDKPIREQAENIIHLFTLTNLGAPAAFKYFDTTIDRKRYTSTKEVLDATLIHQSITGLYETRIDLSQLGGDGGPAPGGSEAAAKGGTVSLQDEHRLFDIPVTTSLPDVWLQDFPQAWAETGGLGRAKCQAPIIIDLKPTAVPVSIKQYPMSLEAHMGIRQHIIKFLELGVLRPCRSPWNTPLLPVKKPGTQDYRPVQDLREINKRTVDIHPTVPNPYNLLSTLKPDYSWYTVLDLKDAFFCLPLAPQSQELFAFEWKDPERGISGQLTWTRLPQGFKNSPTLFNEALHRDLTDFRTQHPEVTLLQYVDDLLLAAPTKKACTQGTRHLLQELGEKGYRASAKKAQICQTKVTYLGYILSEGKRWLTPGRIETVARIPPPRNPREVREFLGKAGFCRLFIPGFAELAAPLYALTKPSTPFTWQTEHQLAFEALKKALLSAPALGLPDTSKPFTLFLDERQGIAKGVLTQKLGPWKRPVAYLSKKLDPVAAGWPPCLRIMAATAMLVKDSAKLTLGQPLTVITPHTLEAIVRQPPDRWITNARLTHYQALLLDTDRVQFGPPVTLNPATLLPVPENQPSPHDCRQVLAETHGTREDLKDQELPDADHTWYTDGSSYLDSGTRRAGAAVVDGHNTIWAQSLPPGTSAQKAELIALTKALELSKGKKANIYTDSRYAFATAHTHGSIYERRGWLTSEGKEIKNKAEIIALLKALFLPQEVAIIHCPGHQKGQDPVAVGNRQADRVARQAAMAEVLTLATEPDNTSHITAGKRTADGSEFEKRTADGSEFESPKKKAKVE

SEQ ID NO: 1940 - protein, 2097 aa, synthetic construct
MPAAKRVKLDGGDKKYSIGLDIGTNSVGWAVITDEYKVPSKKFKVLGNTDRHSIKKNLIGALLFDSGETAEATRLKRTARRRYTRRKNRICYLQEIFSNEMAKVDDSFFHRLEESFLVEEDKKHERHPIFGNIVDEVAYHEKYPTIYHLRKKLVDSTDKADLRLIYLALAHMIKFRGHFLIEGDLNPDNSDVDKLFIQLVQTYNQLFEENPINASGVDAKAILSARLSKSRRLENLIAQLPGEKKNGLFGNLIALSLGLTPNFKSNFDLAEDAKLQLSKDTYDDDLDNLLAQIGDQYADLFLAAKNLSDAILLSDILRVNTEITKAPLSASMIKRYDEHHQDLTLLKALVRQQLPEKYKEIFFDQSKNGYAGYIDGGASQEEFYKFIKPILEKMDGTEELLVKLNREDLLRKQRTFDNGSIPHQIHLGELHAILRRQEDFYPFLKDNREKIEKILTFRIPYYVGPLARGNSRFAWMTRKSEETITPWNFEEVVDKGASAQSFIERMTNFDKNLPNEKVLPKHSLLYEYFTVYNELTKVKYVTEGMRKPAFLSGEQKKAIVDLLFKTNRKVTVKQLKEDYFKKIECFDSVEISGVEDRFNASLGTYHDLLKIIKDKDFLDNEENEDILEDIVLTLTLFEDREMIEERLKTYAHLFDDKVMKQLKRRRYTGWGRLSRKLINGIRDKQSGKTILDFLKSDGFANRNFMQLIHDDSLTFKEDIQKAQVSGQGDSLHEHIANLAGSPAIKKGILQTVKVVDELVKVMGRHKPENIVIEMARENQTTQKGQKNSRERMKRIEEGIKELGSQILKEHPVENTQLQNEKLYLYYLQNGRDMYVDQELDINRLSDYDVDHIVPQSFLKDDSIDNKVLTRSDKARGKSDNVPSEEVVKKMKNYWRQLLNAKLITQRKFDNLTKAERGGLSELDKAGFIKRQLVETRQITKHVAQILDSRMNTKYDENDKLIREVKVITLKSKLVSDFRKDFQFYKVREINNYHHAHDAYLNAVVGTALIKKYPKLESEFVYGDYKVYDVRKMIAKSEQEIGKATAKYFFYSNIMNFFKTEITLANGEIRKRPLIETNGETGEIVWDKGRDFATVRKVLSMPQVNIVKKTEVQTGGFSKESILPKRNSDKLIARKKDWDPKKYGGFDSPTVAYSVLVVAKVEKGKSKKLKSVKELLGITIMERSSFEKNPIDFLEAKGYKEVKKDLIIKLPKYSLFELENGRKRMLASAGELQKGNELALPSKYVNFLYLASHYEKLKGSPEDNEQKQLFVEQHKHYLDEIIEQISEFSKRVILADANLDKVLSAYNKHRDKPIREQAENIIHLFTLTNLGAPAAFKYFDTTIDRKRYTSTKEVLDATLIHQSITGLYETRIDLSQLGGDGGGGSGGGGGTVSLQDEHRLFDIPVTTSLPDVWLQDFPQAWAETGGLGRAKCQAPIIIDLKPTAVPVSIKQYPMSLEAHMGIRQHIIKFLELGVLRPCRSPWNTPLLPVKKPGTQDYRPVQDLREINKRTVDIHPTVPNPYNLLSTLKPDYSWYTVLDLKDAFFCLPLAPQSQELFAFEWKDPERGISGQLTWTRLPQGFKNSPTLFNEALHRDLTDFRTQHPEVTLLQYVDDLLLAAPTKKACTQGTRHLLQELGEKGYRASAKKAQICQTKVTYLGYILSEGKRWLTPGRIETVARIPPPRNPREVREFLGKAGFCRLFIPGFAELAAPLYALTKPSTPFTWQTEHQLAFEALKKALLSAPALGLPDTSKPFTLFLDERQGIAKGVLTQKLGPWKRPVAYLSKKLDPVAAGWPPCLRIMAATAMLVKDSAKLTLGQPLTVITPHTLEAIVRQPPDRWITNARLTHYQALLLDTDRVQFGPPVTLNPATLLPVPENQPSPHDCRQVLAETHGTREDLKDQELPDADHTWYTDGSSYLDSGTRRAGAAVVDGHNTIWAQSLPPGTSAQKAELIALTKALELSKGKKANIYTDSRYAFATAHTHGSIYERRGWLTSEGKEIKNKAEIIALLKALFLPQEVAIIHCPGHQKGQDPVAVGNRQADRVARQAAMAEVLTLATEPDNTSHITAGKRTADGSEFEKRTADGSEFESPKKKAKVE

SEQ ID NO: 1941 - protein, 2111 aa, synthetic construct
MPAAKRVKLDGGDKKYSIGLDIGTNSVGWAVITDEYKVPSKKFKVLGNTDRHSIKKNLIGALLFDSGETAEATRLKRTARRRYTRRKNRICYLQEIFSNEMAKVDDSFFHRLEESFLVEEDKKHERHPIFGNIVDEVAYHEKYPTIYHLRKKLVDSTDKADLRLIYLALAHMIKFRGHFLIEGDLNPDNSDVDKLFIQLVQTYNQLFEENPINASGVDAKAILSARLSKSRRLENLIAQLPGEKKNGLFGNLIALSLGLTPNFKSNFDLAEDAKLQLSKDTYDDDLDNLLAQIGDQYADLFLAAKNLSDAILLSDILRVNTEITKAPLSASMIKRYDEHHQDLTLLKALVRQQLPEKYKEIFFDQSKNGYAGYIDGGASQEEFYKFIKPILEKMDGTEELLVKLNREDLLRKQRTFDNGSIPHQIHLGELHAILRRQEDFYPFLKDNREKIEKILTFRIPYYVGPLARGNSRFAWMTRKSEETITPWNFEEVVDKGASAQSFIERMTNFDKNLPNEKVLPKHSLLYEYFTVYNELTKVKYVTEGMRKPAFLSGEQKKAIVDLLFKTNRKVTVKQLKEDYFKKIECFDSVEISGVEDRFNASLGTYHDLLKIIKDKDFLDNEENEDILEDIVLTLTLFEDREMIEERLKTYAHLFDDKVMKQLKRRRYTGWGRLSRKLINGIRDKQSGKTILDFLKSDGFANRNFMQLIHDDSLTFKEDIQKAQVSGQGDSLHEHIANLAGSPAIKKGILQTVKVVDELVKVMGRHKPENIVIEMARENQTTQKGQKNSRERMKRIEEGIKELGSQILKEHPVENTQLQNEKLYLYYLQNGRDMYVDQELDINRLSDYDVDHIVPQSFLKDDSIDNKVLTRSDKARGKSDNVPSEEVVKKMKNYWRQLLNAKLITQRKFDNLTKAERGGLSELDKAGFIKRQLVETRQITKHVAQILDSRMNTKYDENDKLIREVKVITLKSKLVSDFRKDFQFYKVREINNYHHAHDAYLNAVVGTALIKKYPKLESEFVYGDYKVYDVRKMIAKSEQEIGKATAKYFFYSNIMNFFKTEITLANGEIRKRPLIETNGETGEIVWDKGRDFATVRKVLSMPQVNIVKKTEVQTGGFSKESILPKRNSDKLIARKKDWDPKKYGGFDSPTVAYSVLVVAKVEKGKSKKLKSVKELLGITIMERSSFEKNPIDFLEAKGYKEVKKDLIIKLPKYSLFELENGRKRMLASAGELQKGNELALPSKYVNFLYLASHYEKLKGSPEDNEQKQLFVEQHKHYLDEIIEQISEFSKRVILADANLDKVLSAYNKHRDKPIREQAENIIHLFTLTNLGAPAAFKYFDTTIDRKRYTSTKEVLDATLIHQSITGLYETRIDLSQLGGDGGEAAAKEAAAKEAAAKEAAAKGGTVSLQDEHRLFDIPVTTSLPDVWLQDFPQAWAETGGLGRAKCQAPIIIDLKPTAVPVSIKQYPMSLEAHMGIRQHIIKFLELGVLRPCRSPWNTPLLPVKKPGTQDYRPVQDLREINKRTVDIHPTVPNPYNLLSTLKPDYSWYTVLDLKDAFFCLPLAPQSQELFAFEWKDPERGISGQLTWTRLPQGFKNSPTLFNEALHRDLTDFRTQHPEVTLLQYVDDLLLAAPTKKACTQGTRHLLQELGEKGYRASAKKAQICQTKVTYLGYILSEGKRWLTPGRIETVARIPPPRNPREVREFLGKAGFCRLFIPGFAELAAPLYALTKPSTPFTWQTEHQLAFEALKKALLSAPALGLPDTSKPFTLFLDERQGIAKGVLTQKLGPWKRPVAYLSKKLDPVAAGWPPCLRIMAATAMLVKDSAKLTLGQPLTVITPHTLEAIVRQPPDRWITNARLTHYQALLLDTDRVQFGPPVTLNPATLLPVPENQPSPHDCRQVLAETHGTREDLKDQELPDADHTWYTDGSSYLDSGTRRAGAAVVDGHNTIWAQSLPPGTSAQKAELIALTKALELSKGKKANIYTDSRYAFATAHTHGSIYERRGWLTSEGKEIKNKAEIIALLKALFLPQEVAIIHCPGHQKGQDPVAVGNRQADRVARQAAMAEVLTLATEPDNTSHITAGKRTADGSEFEKRTADGSEFESPKKKAKVE

SEQ ID NO: 1942 - protein, 2100 aa, synthetic construct
MPAAKRVKLDGGDKKYSIGLDIGTNSVGWAVITDEYKVPSKKFKVLGNTDRHSIKKNLIGALLFDSGETAEATRLKRTARRRYTRRKNRICYLQEIFSNEMAKVDDSFFHRLEESFLVEEDKKHERHPIFGNIVDEVAYHEKYPTIYHLRKKLVDSTDKADLRLIYLALAHMIKFRGHFLIEGDLNPDNSDVDKLFIQLVQTYNQLFEENPINASGVDAKAILSARLSKSRRLENLIAQLPGEKKNGLFGNLIALSLGLTPNFKSNFDLAEDAKLQLSKDTYDDDLDNLLAQIGDQYADLFLAAKNLSDAILLSDILRVNTEITKAPLSASMIKRYDEHHQDLTLLKALVRQQLPEKYKEIFFDQSKNGYAGYIDGGASQEEFYKFIKPILEKMDGTEELLVKLNREDLLRKQRTFDNGSIPHQIHLGELHAILRRQEDFYPFLKDNREKIEKILTFRIPYYVGPLARGNSRFAWMTRKSEETITPWNFEEVVDKGASAQSFIERMTNFDKNLPNEKVLPKHSLLYEYFTVYNELTKVKYVTEGMRKPAFLSGEQKKAIVDLLFKTNRKVTVKQLKEDYFKKIECFDSVEISGVEDRFNASLGTYHDLLKIIKDKDFLDNEENEDILEDIVLTLTLFEDREMIEERLKTYAHLFDDKVMKQLKRRRYTGWGRLSRKLINGIRDKQSGKTILDFLKSDGFANRNFMQLIHDDSLTFKEDIQKAQVSGQGDSLHEHIANLAGSPAIKKGILQTVKVVDELVKVMGRHKPENIVIEMARENQTTQKGQKNSRERMKRIEEGIKELGSQILKEHPVENTQLQNEKLYLYYLQNGRDMYVDQELDINRLSDYDVDHIVPQSFLKDDSIDNKVLTRSDKARGKSDNVPSEEVVKKMKNYWRQLLNAKLITQRKFDNLTKAERGGLSELDKAGFIKRQLVETRQITKHVAQILDSRMNTKYDENDKLIREVKVITLKSKLVSDFRKDFQFYKVREINNYHHAHDAYLNAVVGTALIKKYPKLESEFVYGDYKVYDVRKMIAKSEQEIGKATAKYFFYSNIMNFFKTEITLANGEIRKRPLIETNGETGEIVWDKGRDFATVRKVLSMPQVNIVKKTEVQTGGFSKESILPKRNSDKLIARKKDWDPKKYGGFDSPTVAYSVLVVAKVEKGKSKKLKSVKELLGITIMERSSFEKNPIDFLEAKGYKEVKKDLIIKLPKYSLFELENGRKRMLASAGELQKGNELALPSKYVNFLYLASHYEKLKGSPEDNEQKQLFVEQHKHYLDEIIEQISEFSKRVILADANLDKVLSAYNKHRDKPIREQAENIIHLFTLTNLGAPAAFKYFDTTIDRKRYTSTKEVLDATLIHQSITGLYETRIDLSQLGGDGGGGSGGGPAPGGTVSLQDEHRLFDIPVTTSLPDVWLQDFPQAWAETGGLGRAKCQAPIIIDLKPTAVPVSIKQYPMSLEAHMGIRQHIIKFLELGVLRPCRSPWNTPLLPVKKPGTQDYRPVQDLREINKRTVDIHPTVPNPYNLLSTLKPDYSWYTVLDLKDAFFCLPLAPQSQELFAFEWKDPERGISGQLTWTRLPQGFKNSPTLFNEALHRDLTDFRTQHPEVTLLQYVDDLLLAAPTKKACTQGTRHLLQELGEKGYRASAKKAQICQTKVTYLGYILSEGKRWLTPGRIETVARIPPPRNPREVREFLGKAGFCRLFIPGFAELAAPLYALTKPSTPFTWQTEHQLAFEALKKALLSAPALGLPDTSKPFTLFLDERQGIAKGVLTQKLGPWKRPVAYLSKKLDPVAAGWPPCLRIMAATAMLVKDSAKLTLGQPLTVITPHTLEAIVRQPPDRWITNARLTHYQALLLDTDRVQFGPPVTLNPATLLPVPENQPSPHDCRQVLAETHGTREDLKDQELPDADHTWYTDGSSYLDSGTRRAGAAVVDGHNTIWAQSLPPGTSAQKAELIALTKALELSKGKKANIYTDSRYAFATAHTHGSIYERRGWLTSEGKEIKNKAEIIALLKALFLPQEVAIIHCPGHQKGQDPVAVGNRQADRVARQAAMAEVLTLATEPDNTSHITAGKRTADGSEFEKRTADGSEFESPKKKAKVE

SEQ ID NO: 1943 - protein, 2102 aa, synthetic construct
MPAAKRVKLDGGDKKYSIGLDIGTNSVGWAVITDEYKVPSKKFKVLGNTDRHSIKKNLIGALLFDSGETAEATRLKRTARRRYTRRKNRICYLQEIFSNEMAKVDDSFFHRLEESFLVEEDKKHERHPIFGNIVDEVAYHEKYPTIYHLRKKLVDSTDKADLRLIYLALAHMIKFRGHFLIEGDLNPDNSDVDKLFIQLVQTYNQLFEENPINASGVDAKAILSARLSKSRRLENLIAQLPGEKKNGLFGNLIALSLGLTPNFKSNFDLAEDAKLQLSKDTYDDDLDNLLAQIGDQYADLFLAAKNLSDAILLSDILRVNTEITKAPLSASMIKRYDEHHQDLTLLKALVRQQLPEKYKEIFFDQSKNGYAGYIDGGASQEEFYKFIKPILEKMDGTEELLVKLNREDLLRKQRTFDNGSIPHQIHLGELHAILRRQEDFYPFLKDNREKIEKILTFRIPYYVGPLARGNSRFAWMTRKSEETITPWNFEEVVDKGASAQSFIERMTNFDKNLPNEKVLPKHSLLYEYFTVYNELTKVKYVTEGMRKPAFLSGEQKKAIVDLLFKTNRKVTVKQLKEDYFKKIECFDSVEISGVEDRFNASLGTYHDLLKIIKDKDFLDNEENEDILEDIVLTLTLFEDREMIEERLKTYAHLFDDKVMKQLKRRRYTGWGRLSRKLINGIRDKQSGKTILDFLKSDGFANRNFMQLIHDDSLTFKEDIQKAQVSGQGDSLHEHIANLAGSPAIKKGILQTVKVVDELVKVMGRHKPENIVIEMARENQTTQKGQKNSRERMKRIEEGIKELGSQILKEHPVENTQLQNEKLYLYYLQNGRDMYVDQELDINRLSDYDVDHIVPQSFLKDDSIDNKVLTRSDKARGKSDNVPSEEVVKKMKNYWRQLLNAKLITQRKFDNLTKAERGGLSELDKAGFIKRQLVETRQITKHVAQILDSRMNTKYDENDKLIREVKVITLKSKLVSDFRKDFQFYKVREINNYHHAHDAYLNAVVGTALIKKYPKLESEFVYGDYKVYDVRKMIAKSEQEIGKATAKYFFYSNIMNFFKTEITLANGEIRKRPLIETNGETGEIVWDKGRDFATVRKVLSMPQVNIVKKTEVQTGGFSKESILPKRNSDKLIARKKDWDPKKYGGFDSPTVAYSVLVVAKVEKGKSKKLKSVKELLGITIMERSSFEKNPIDFLEAKGYKEVKKDLIIKLPKYSLFELENGRKRMLASAGELQKGNELALPSKYVNFLYLASHYEKLKGSPEDNEQKQLFVEQHKHYLDEIIEQISEFSKRVILADANLDKVLSAYNKHRDKPIREQAENIIHLFTLTNLGAPAAFKYFDTTIDRKRYTSTKEVLDATLIHQSITGLYETRIDLSQLGGDGGGGGEAAAKGGSGGTVSLQDEHRLFDIPVTTSLPDVWLQDFPQAWAETGGLGRAKCQAPIIIDLKPTAVPVSIKQYPMSLEAHMGIRQHIIKFLELGVLRPCRSPWNTPLLPVKKPGTQDYRPVQDLREINKRTVDIHPTVPNPYNLLSTLKPDYSWYTVLDLKDAFFCLPLAPQSQELFAFEWKDPERGISGQLTWTRLPQGFKNSPTLFNEALHRDLTDFRTQHPEVTLLQYVDDLLLAAPTKKACTQGTRHLLQELGEKGYRASAKKAQICQTKVTYLGYILSEGKRWLTPGRIETVARIPPPRNPREVREFLGKAGFCRLFIPGFAELAAPLYALTKPSTPFTWQTEHQLAFEALKKALLSAPALGLPDTSKPFTLFLDERQGIAKGVLTQKLGPWKRPVAYLSKKLDPVAAGWPPCLRIMAATAMLVKDSAKLTLGQPLTVITPHTLEAIVRQPPDRWITNARLTHYQALLLDTDRVQFGPPVTLNPATLLPVPENQPSPHDCRQVLAETHGTREDLKDQELPDADHTWYTDGSSYLDSGTRRAGAAVVDGHNTIWAQSLPPGTSAQKAELIALTKALELSKGKKANIYTDSRYAFATAHTHGSIYERRGWLTSEGKEIKNKAEIIALLKALFLPQEVAIIHCPGHQKGQDPVAVGNRQADRVARQAAMAEVLTLATEPDNTSHITAGKRTADGSEFEKRTADGSEFESPKKKAKVE

SEQ ID NO: 1944 - protein, 2116 aa, synthetic construct
MPAAKRVKLDGGDKKYSIGLDIGTNSVGWAVITDEYKVPSKKFKVLGNTDRHSIKKNLIGALLFDSGETAEATRLKRTARRRYTRRKNRICYLQEIFSNEMAKVDDSFFHRLEESFLVEEDKKHERHPIFGNIVDEVAYHEKYPTIYHLRKKLVDSTDKADLRLIYLALAHMIKFRGHFLIEGDLNPDNSDVDKLFIQLVQTYNQLFEENPINASGVDAKAILSARLSKSRRLENLIAQLPGEKKNGLFGNLIALSLGLTPNFKSNFDLAEDAKLQLSKDTYDDDLDNLLAQIGDQYADLFLAAKNLSDAILLSDILRVNTEITKAPLSASMIKRYDEHHQDLTLLKALVRQQLPEKYKEIFFDQSKNGYAGYIDGGASQEEFYKFIKPILEKMDGTEELLVKLNREDLLRKQRTFDNGSIPHQIHLGELHAILRRQEDFYPFLKDNREKIEKILTFRIPYYVGPLARGNSRFAWMTRKSEETITPWNFEEVVDKGASAQSFIERMTNFDKNLPNEKVLPKHSLLYEYFTVYNELTKVKYVTEGMRKPAFLSGEQKKAIVDLLFKTNRKVTVKQLKEDYFKKIECFDSVEISGVEDRFNASLGTYHDLLKIIKDKDFLDNEENEDILEDIVLTLTLFEDREMIEERLKTYAHLFDDKVMKQLKRRRYTGWGRLSRKLINGIRDKQSGKTILDFLKSDGFANRNFMQLIHDDSLTFKEDIQKAQVSGQGDSLHEHIANLAGSPAIKKGILQTVKVVDELVKVMGRHKPENIVIEMARENQTTQKGQKNSRERMKRIEEGIKELGSQILKEHPVENTQLQNEKLYLYYLQNGRDMYVDQELDINRLSDYDVDHIVPQSFLKDDSIDNKVLTRSDKARGKSDNVPSEEVVKKMKNYWRQLLNAKLITQRKFDNLTKAERGGLSELDKAGFIKRQLVETRQITKHVAQILDSRMNTKYDENDKLIREVKVITLKSKLVSDFRKDFQFYKVREINNYHHAHDAYLNAVVGTALIKKYPKLESEFVYGDYKVYDVRKMIAKSEQEIGKATAKYFFYSNIMNFFKTEITLANGEIRKRPLIETNGETGEIVWDKGRDFATVRKVLSMPQVNIVKKTEVQTGGFSKESILPKRNSDKLIARKKDWDPKKYGGFDSPTVAYSVLVVAKVEKGKSKKLKSVKELLGITIMERSSFEKNPIDFLEAKGYKEVKKDLIIKLPKYSLFELENGRKRMLASAGELQKGNELALPSKYVNFLYLASHYEKLKGSPEDNEQKQLFVEQHKHYLDEIIEQISEFSKRVILADANLDKVLSAYNKHRDKPIREQAENIIHLFTLTNLGAPAAFKYFDTTIDRKRYTSTKEVLDATLIHQSITGLYETRIDLSQLGGDGGGGGGSGGGGSGGGGSGGGGSGGGGSGGTVSLQDEHRLFDIPVTTSLPDVWLQDFPQAWAETGGLGRAKCQAPIIIDLKPTAVPVSIKQYPMSLEAHMGIRQHIIKFLELGVLRPCRSPWNTPLLPVKKPGTQDYRPVQDLREINKRTVDIHPTVPNPYNLLSTLKPDYSWYTVLDLKDAFFCLPLAPQSQELFAFEWKDPERGISGQLTWTRLPQGFKNSPTLFNEALHRDLTDFRTQHPEVTLLQYVDDLLLAAPTKKACTQGTRHLLQELGEKGYRASAKKAQICQTKVTYLGYILSEGKRWLTPGRIETVARIPPPRNPREVREFLGKAGFCRLFIPGFAELAAPLYALTKPSTPFTWQTEHQLAFEALKKALLSAPALGLPDTSKPFTLFLDERQGIAKGVLTQKLGPWKRPVAYLSKKLDPVAAGWPPCLRIMAATAMLVKDSAKLTLGQPLTVITPHTLEAIVRQPPDRWITNARLTHYQALLLDTDRVQFGPPVTLNPATLLPVPENQPSPHDCRQVLAETHGTREDLKDQELPDADHTWYTDGSSYLDSGTRRAGAAVVDGHNTIWAQSLPPGTSAQKAELIALTKALELSKGKKANIYTDSRYAFATAHTHGSIYERRGWLTSEGKEIKNKAEIIALLKALFLPQEVAIIHCPGHQKGQDPVAVGNRQADRVARQAAMAEVLTLATEPDNTSHITAGKRTADGSEFEKRTADGSEFESPKKKAKVE

SEQ ID NO: 1945 - protein, 2096 aa, synthetic construct
MPAAKRVKLDGGDKKYSIGLDIGTNSVGWAVITDEYKVPSKKFKVLGNTDRHSIKKNLIGALLFDSGETAEATRLKRTARRRYTRRKNRICYLQEIFSNEMAKVDDSFFHRLEESFLVEEDKKHERHPIFGNIVDEVAYHEKYPTIYHLRKKLVDSTDKADLRLIYLALAHMIKFRGHFLIEGDLNPDNSDVDKLFIQLVQTYNQLFEENPINASGVDAKAILSARLSKSRRLENLIAQLPGEKKNGLFGNLIALSLGLTPNFKSNFDLAEDAKLQLSKDTYDDDLDNLLAQIGDQYADLFLAAKNLSDAILLSDILRVNTEITKAPLSASMIKRYDEHHQDLTLLKALVRQQLPEKYKEIFFDQSKNGYAGYIDGGASQEEFYKFIKPILEKMDGTEELLVKLNREDLLRKQRTFDNGSIPHQIHLGELHAILRRQEDFYPFLKDNREKIEKILTFRIPYYVGPLARGNSRFAWMTRKSEETITPWNFEEVVDKGASAQSFIERMTNFDKNLPNEKVLPKHSLLYEYFTVYNELTKVKYVTEGMRKPAFLSGEQKKAIVDLLFKTNRKVTVKQLKEDYFKKIECFDSVEISGVEDRFNASLGTYHDLLKIIKDKDFLDNEENEDILEDIVLTLTLFEDREMIEERLKTYAHLFDDKVMKQLKRRRYTGWGRLSRKLINGIRDKQSGKTILDFLKSDGFANRNFMQLIHDDSLTFKEDIQKAQVSGQGDSLHEHIANLAGSPAIKKGILQTVKVVDELVKVMGRHKPENIVIEMARENQTTQKGQKNSRERMKRIEEGIKELGSQILKEHPVENTQLQNEKLYLYYLQNGRDMYVDQELDINRLSDYDVDHIVPQSFLKDDSIDNKVLTRSDKARGKSDNVPSEEVVKKMKNYWRQLLNAKLITQRKFDNLTKAERGGLSELDKAGFIKRQLVETRQITKHVAQILDSRMNTKYDENDKLIREVKVITLKSKLVSDFRKDFQFYKVREINNYHHAHDAYLNAVVGTALIKKYPKLESEFVYGDYKVYDVRKMIAKSEQEIGKATAKYFFYSNIMNFFKTEITLANGEIRKRPLIETNGETGEIVWDKGRDFATVRKVLSMPQVNIVKKTEVQTGGFSKESILPKRNSDKLIARKKDWDPKKYGGFDSPTVAYSVLVVAKVEKGKSKKLKSVKELLGITIMERSSFEKNPIDFLEAKGYKEVKKDLIIKLPKYSLFELENGRKRMLASAGELQKGNELALPSKYVNFLYLASHYEKLKGSPEDNEQKQLFVEQHKHYLDEIIEQISEFSKRVILADANLDKVLSAYNKHRDKPIREQAENIIHLFTLTNLGAPAAFKYFDTTIDRKRYTSTKEVLDATLIHQSITGLYETRIDLSQLGGDGGPAPAPGGTVSLQDEHRLFDIPVTTSLPDVWLQDFPQAWAETGGLGRAKCQAPIIIDLKPTAVPVSIKQYPMSLEAHMGIRQHIIKFLELGVLRPCRSPWNTPLLPVKKPGTQDYRPVQDLREINKRTVDIHPTVPNPYNLLSTLKPDYSWYTVLDLKDAFFCLPLAPQSQELFAFEWKDPERGISGQLTWTRLPQGFKNSPTLFNEALHRDLTDFRTQHPEVTLLQYVDDLLLAAPTKKACTQGTRHLLQELGEKGYRASAKKAQICQTKVTYLGYILSEGKRWLTPGRIETVARIPPPRNPREVREFLGKAGFCRLFIPGFAELAAPLYALTKPSTPFTWQTEHQLAFEALKKALLSAPALGLPDTSKPFTLFLDERQGIAKGVLTQKLGPWKRPVAYLSKKLDPVAAGWPPCLRIMAATAMLVKDSAKLTLGQPLTVITPHTLEAIVRQPPDRWITNARLTHYQALLLDTDRVQFGPPVTLNPATLLPVPENQPSPHDCRQVLAETHGTREDLKDQELPDADHTWYTDGSSYLDSGTRRAGAAVVDGHNTIWAQSLPPGTSAQKAELIALTKALELSKGKKANIYTDSRYAFATAHTHGSIYERRGWLTSEGKEIKNKAEIIALLKALFLPQEVAIIHCPGHQKGQDPVAVGNRQADRVARQAAMAEVLTLATEPDNTSHITAGKRTADGSEFEKRTADGSEFESPKKKAKVE

SEQ ID NO: 1946 - protein, 2116 aa, synthetic construct
MPAAKRVKLDGGDKKYSIGLDIGTNSVGWAVITDEYKVPSKKFKVLGNTDRHSIKKNLIGALLFDSGETAEATRLKRTARRRYTRRKNRICYLQEIFSNEMAKVDDSFFHRLEESFLVEEDKKHERHPIFGNIVDEVAYHEKYPTIYHLRKKLVDSTDKADLRLIYLALAHMIKFRGHFLIEGDLNPDNSDVDKLFIQLVQTYNQLFEENPINASGVDAKAILSARLSKSRRLENLIAQLPGEKKNGLFGNLIALSLGLTPNFKSNFDLAEDAKLQLSKDTYDDDLDNLLAQIGDQYADLFLAAKNLSDAILLSDILRVNTEITKAPLSASMIKRYDEHHQDLTLLKALVRQQLPEKYKEIFFDQSKNGYAGYIDGGASQEEFYKFIKPILEKMDGTEELLVKLNREDLLRKQRTFDNGSIPHQIHLGELHAILRRQEDFYPFLKDNREKIEKILTFRIPYYVGPLARGNSRFAWMTRKSEETITPWNFEEVVDKGASAQSFIERMTNFDKNLPNEKVLPKHSLLYEYFTVYNELTKVKYVTEGMRKPAFLSGEQKKAIVDLLFKTNRKVTVKQLKEDYFKKIECFDSVEISGVEDRFNASLGTYHDLLKIIKDKDFLDNEENEDILEDIVLTLTLFEDREMIEERLKTYAHLFDDKVMKQLKRRRYTGWGRLSRKLINGIRDKQSGKTILDFLKSDGFANRNFMQLIHDDSLTFKEDIQKAQVSGQGDSLHEHIANLAGSPAIKKGILQTVKVVDELVKVMGRHKPENIVIEMARENQTTQKGQKNSRERMKRIEEGIKELGSQILKEHPVENTQLQNEKLYLYYLQNGRDMYVDQELDINRLSDYDVDHIVPQSFLKDDSIDNKVLTRSDKARGKSDNVPSEEVVKKMKNYWRQLLNAKLITQRKFDNLTKAERGGLSELDKAGFIKRQLVETRQITKHVAQILDSRMNTKYDENDKLIREVKVITLKSKLVSDFRKDFQFYKVREINNYHHAHDAYLNAVVGTALIKKYPKLESEFVYGDYKVYDVRKMIAKSEQEIGKATAKYFFYSNIMNFFKTEITLANGEIRKRPLIETNGETGEIVWDKGRDFATVRKVLSMPQVNIVKKTEVQTGGFSKESILPKRNSDKLIARKKDWDPKKYGGFDSPTVAYSVLVVAKVEKGKSKKLKSVKELLGITIMERSSFEKNPIDFLEAKGYKEVKKDLIIKLPKYSLFELENGRKRMLASAGELQKGNELALPSKYVNFLYLASHYEKLKGSPEDNEQKQLFVEQHKHYLDEIIEQISEFSKRVILADANLDKVLSAYNKHRDKPIREQAENIIHLFTLTNLGAPAAFKYFDTTIDRKRYTSTKEVLDATLIHQSITGLYETRIDLSQLGGDGGEAAAKEAAAKEAAAKEAAAKEAAAKGGTVSLQDEHRLFDIPVTTSLPDVWLQDFPQAWAETGGLGRAKCQAPIIIDLKPTAVPVSIKQYPMSLEAHMGIRQHIIKFLELGVLRPCRSPWNTPLLPVKKPGTQDYRPVQDLREINKRTVDIHPTVPNPYNLLSTLKPDYSWYTVLDLKDAFFCLPLAPQSQELFAFEWKDPERGISGQLTWTRLPQGFKNSPTLFNEALHRDLTDFRTQHPEVTLLQYVDDLLLAAPTKKACTQGTRHLLQELGEKGYRASAKKAQICQTKVTYLGYILSEGKRWLTPGRIETVARIPPPRNPREVREFLGKAGFCRLFIPGFAELAAPLYALTKPSTPFTWQTEHQLAFEALKKALLSAPALGLPDTSKPFTLFLDERQGIAKGVLTQKLGPWKRPVAYLSKKLDPVAAGWPPCLRIMAATAMLVKDSAKLTLGQPLTVITPHTLEAIVRQPPDRWITNARLTHYQALLLDTDRVQFGPPVTLNPATLLPVPENQPSPHDCRQVLAETHGTREDLKDQELPDADHTWYTDGSSYLDSGTRRAGAAVVDGHNTIWAQSLPPGTSAQKAELIALTKALELSKGKKANIYTDSRYAFATAHTHGSIYERRGWLTSEGKEIKNKAEIIALLKALFLPQEVAIIHCPGHQKGQDPVAVGNRQADRVARQAAMAEVLTLATEPDNTSHITAGKRTADGSEFEKRTADGSEFESPKKKAKVE

SEQ ID NO: 1947 - protein, 2106 aa, synthetic construct
MPAAKRVKLDGGDKKYSIGLDIGTNSVGWAVITDEYKVPSKKFKVLGNTDRHSIKKNLIGALLFDSGETAEATRLKRTARRRYTRRKNRICYLQEIFSNEMAKVDDSFFHRLEESFLVEEDKKHERHPIFGNIVDEVAYHEKYPTIYHLRKKLVDSTDKADLRLIYLALAHMIKFRGHFLIEGDLNPDNSDVDKLFIQLVQTYNQLFEENPINASGVDAKAILSARLSKSRRLENLIAQLPGEKKNGLFGNLIALSLGLTPNFKSNFDLAEDAKLQLSKDTYDDDLDNLLAQIGDQYADLFLAAKNLSDAILLSDILRVNTEITKAPLSASMIKRYDEHHQDLTLLKALVRQQLPEKYKEIFFDQSKNGYAGYIDGGASQEEFYKFIKPILEKMDGTEELLVKLNREDLLRKQRTFDNGSIPHQIHLGELHAILRRQEDFYPFLKDNREKIEKILTFRIPYYVGPLARGNSRFAWMTRKSEETITPWNFEEVVDKGASAQSFIERMTNFDKNLPNEKVLPKHSLLYEYFTVYNELTKVKYVTEGMRKPAFLSGEQKKAIVDLLFKTNRKVTVKQLKEDYFKKIECFDSVEISGVEDRFNASLGTYHDLLKIIKDKDFLDNEENEDILEDIVLTLTLFEDREMIEERLKTYAHLFDDKVMKQLKRRRYTGWGRLSRKLINGIRDKQSGKTILDFLKSDGFANRNFMQLIHDDSLTFKEDIQKAQVSGQGDSLHEHIANLAGSPAIKKGILQTVKVVDELVKVMGRHKPENIVIEMARENQTTQKGQKNSRERMKRIEEGIKELGSQILKEHPVENTQLQNEKLYLYYLQNGRDMYVDQELDINRLSDYDVDHIVPQSFLKDDSIDNKVLTRSDKARGKSDNVPSEEVVKKMKNYWRQLLNAKLITQRKFDNLTKAERGGLSELDKAGFIKRQLVETRQITKHVAQILDSRMNTKYDENDKLIREVKVITLKSKLVSDFRKDFQFYKVREINNYHHAHDAYLNAVVGTALIKKYPKLESEFVYGDYKVYDVRKMIAKSEQEIGKATAKYFFYSNIMNFFKTEITLANGEIRKRPLIETNGETGEIVWDKGRDFATVRKVLSMPQVNIVKKTEVQTGGFSKESILPKRNSDKLIARKKDWDPKKYGGFDSPTVAYSVLVVAKVEKGKSKKLKSVKELLGITIMERSSFEKNPIDFLEAKGYKEVKKDLIIKLPKYSLFELENGRKRMLASAGELQKGNELALPSKYVNFLYLASHYEKLKGSPEDNEQKQLFVEQHKHYLDEIIEQISEFSKRVILADANLDKVLSAYNKHRDKPIREQAENIIHLFTLTNLGAPAAFKYFDTTIDRKRYTSTKEVLDATLIHQSITGLYETRIDLSQLGGDGGEAAAKGGGGSEAAAKGGTVSLQDEHRLFDIPVTTSLPDVWLQDFPQAWAETGGLGRAKCQAPIIIDLKPTAVPVSIKQYPMSLEAHMGIRQHIIKFLELGVLRPCRSPWNTPLLPVKKPGTQDYRPVQDLREINKRTVDIHPTVPNPYNLLSTLKPDYSWYTVLDLKDAFFCLPLAPQSQELFAFEWKDPERGISGQLTWTRLPQGFKNSPTLFNEALHRDLTDFRTQHPEVTLLQYVDDLLLAAPTKKACTQGTRHLLQELGEKGYRASAKKAQICQTKVTYLGYILSEGKRWLTPGRIETVARIPPPRNPREVREFLGKAGFCRLFIPGFAELAAPLYALTKPSTPFTWQTEHQLAFEALKKALLSAPALGLPDTSKPFTLFLDERQGIAKGVLTQKLGPWKRPVAYLSKKLDPVAAGWPPCLRIMAATAMLVKDSAKLTLGQPLTVITPHTLEAIVRQPPDRWITNARLTHYQALLLDTDRVQFGPPVTLNPATLLPVPENQPSPHDCRQVLAETHGTREDLKDQELPDADHTWYTDGSSYLDSGTRRAGAAVVDGHNTIWAQSLPPGTSAQKAELIALTKALELSKGKKANIYTDSRYAFATAHTHGSIYERRGWLTSEGKEIKNKAEIIALLKALFLPQEVAIIHCPGHQKGQDPVAVGNRQADRVARQAAMAEVLTLATEPDNTSHITAGKRTADGSEFEKRTADGSEFESPKKKAKVE

SEQ ID NO: 1948 - protein, 2106 aa, synthetic construct
MPAAKRVKLDGGDKKYSIGLDIGTNSVGWAVITDEYKVPSKKFKVLGNTDRHSIKKNLIGALLFDSGETAEATRLKRTARRRYTRRKNRICYLQEIFSNEMAKVDDSFFHRLEESFLVEEDKKHERHPIFGNIVDEVAYHEKYPTIYHLRKKLVDSTDKADLRLIYLALAHMIKFRGHFLIEGDLNPDNSDVDKLFIQLVQTYNQLFEENPINASGVDAKAILSARLSKSRRLENLIAQLPGEKKNGLFGNLIALSLGLTPNFKSNFDLAEDAKLQLSKDTYDDDLDNLLAQIGDQYADLFLAAKNLSDAILLSDILRVNTEITKAPLSASMIKRYDEHHQDLTLLKALVRQQLPEKYKEIFFDQSKNGYAGYIDGGASQEEFYKFIKPILEKMDGTEELLVKLNREDLLRKQRTFDNGSIPHQIHLGELHAILRRQEDFYPFLKDNREKIEKILTFRIPYYVGPLARGNSRFAWMTRKSEETITPWNFEEVVDKGASAQSFIERMTNFDKNLPNEKVLPKHSLLYEYFTVYNELTKVKYVTEGMRKPAFLSGEQKKAIVDLLFKTNRKVTVKQLKEDYFKKIECFDSVEISGVEDRFNASLGTYHDLLKIIKDKDFLDNEENEDILEDIVLTLTLFEDREMIEERLKTYAHLFDDKVMKQLKRRRYTGWGRLSRKLINGIRDKQSGKTILDFLKSDGFANRNFMQLIHDDSLTFKEDIQKAQVSGQGDSLHEHIANLAGSPAIKKGILQTVKVVDELVKVMGRHKPENIVIEMARENQTTQKGQKNSRERMKRIEEGIKELGSQILKEHPVENTQLQNEKLYLYYLQNGRDMYVDQELDINRLSDYDVDHIVPQSFLKDDSIDNKVLTRSDKARGKSDNVPSEEVVKKMKNYWRQLLNAKLITQRKFDNLTKAERGGLSELDKAGFIKRQLVETRQITKHVAQILDSRMNTKYDENDKLIREVKVITLKSKLVSDFRKDFQFYKVREINNYHHAHDAYLNAVVGTALIKKYPKLESEFVYGDYKVYDVRKMIAKSEQEIGKATAKYFFYSNIMNFFKTEITLANGEIRKRPLIETNGETGEIVWDKGRDFATVRKVLSMPQVNIVKKTEVQTGGFSKESILPKRNSDKLIARKKDWDPKKYGGFDSPTVAYSVLVVAKVEKGKSKKLKSVKELLGITIMERSSFEKNPIDFLEAKGYKEVKKDLIIKLPKYSLFELENGRKRMLASAGELQKGNELALPSKYVNFLYLASHYEKLKGSPEDNEQKQLFVEQHKHYLDEIIEQISEFSKRVILADANLDKVLSAYNKHRDKPIREQAENIIHLFTLTNLGAPAAFKYFDTTIDRKRYTSTKEVLDATLIHQSITGLYETRIDLSQLGGDGGGSSGSSGSSGSSGSSGGTVSLQDEHRLFDIPVTTSLPDVWLQDFPQAWAETGGLGRAKCQAPIIIDLKPTAVPVSIKQYPMSLEAHMGIRQHIIKFLELGVLRPCRSPWNTPLLPVKKPGTQDYRPVQDLREINKRTVDIHPTVPNPYNLLSTLKPDYSWYTVLDLKDAFFCLPLAPQSQELFAFEWKDPERGISGQLTWTRLPQGFKNSPTLFNEALHRDLTDFRTQHPEVTLLQYVDDLLLAAPTKKACTQGTRHLLQELGEKGYRASAKKAQICQTKVTYLGYILSEGKRWLTPGRIETVARIPPPRNPREVREFLGKAGFCRLFIPGFAELAAPLYALTKPSTPFTWQTEHQLAFEALKKALLSAPALGLPDTSKPFTLFLDERQGIAKGVLTQKLGPWKRPVAYLSKKLDPVAAGWPPCLRIMAATAMLVKDSAKLTLGQPLTVITPHTLEAIVRQPPDRWITNARLTHYQALLLDTDRVQFGPPVTLNPATLLPVPENQPSPHDCRQVLAETHGTREDLKDQELPDADHTWYTDGSSYLDSGTRRAGAAVVDGHNTIWAQSLPPGTSAQKAELIALTKALELSKGKKANIYTDSRYAFATAHTHGSIYERRGWLTSEGKEIKNKAEIIALLKALFLPQEVAIIHCPGHQKGQDPVAVGNRQADRVARQAAMAEVLTLATEPDNTSHITAGKRTADGSEFEKRTADGSEFESPKKKAKVE

SEQ ID NO: 1949 - protein, 2106 aa, synthetic construct
MPAAKRVKLDGGDKKYSIGLDIGTNSVGWAVITDEYKVPSKKFKVLGNTDRHSIKKNLIGALLFDSGETAEATRLKRTARRRYTRRKNRICYLQEIFSNEMAKVDDSFFHRLEESFLVEEDKKHERHPIFGNIVDEVAYHEKYPTIYHLRKKLVDSTDKADLRLIYLALAHMIKFRGHFLIEGDLNPDNSDVDKLFIQLVQTYNQLFEENPINASGVDAKAILSARLSKSRRLENLIAQLPGEKKNGLFGNLIALSLGLTPNFKSNFDLAEDAKLQLSKDTYDDDLDNLLAQIGDQYADLFLAAKNLSDAILLSDILRVNTEITKAPLSASMIKRYDEHHQDLTLLKALVRQQLPEKYKEIFFDQSKNGYAGYIDGGASQEEFYKFIKPILEKMDGTEELLVKLNREDLLRKQRTFDNGSIPHQIHLGELHAILRRQEDFYPFLKDNREKIEKILTFRIPYYVGPLARGNSRFAWMTRKSEETITPWNFEEVVDKGASAQSFIERMTNFDKNLPNEKVLPKHSLLYEYFTVYNELTKVKYVTEGMRKPAFLSGEQKKAIVDLLFKTNRKVTVKQLKEDYFKKIECFDSVEISGVEDRFNASLGTYHDLLKIIKDKDFLDNEENEDILEDIVLTLTLFEDREMIEERLKTYAHLFDDKVMKQLKRRRYTGWGRLSRKLINGIRDKQSGKTILDFLKSDGFANRNFMQLIHDDSLTFKEDIQKAQVSGQGDSLHEHIANLAGSPAIKKGILQTVKVVDELVKVMGRHKPENIVIEMARENQTTQKGQKNSRERMKRIEEGIKELGSQILKEHPVENTQLQNEKLYLYYLQNGRDMYVDQELDINRLSDYDVDHIVPQSFLKDDSIDNKVLTRSDKARGKSDNVPSEEVVKKMKNYWRQLLNAKLITQRKFDNLTKAERGGLSELDKAGFIKRQLVETRQITKHVAQILDSRMNTKYDENDKLIREVKVITLKSKLVSDFRKDFQFYKVREINNYHHAHDAYLNAVVGTALIKKYPKLESEFVYGDYKVYDVRKMIAKSEQEIGKATAKYFFYSNIMNFFKTEITLANGEIRKRPLIETNGETGEIVWDKGRDFATVRKVLSMPQVNIVKKTEVQTGGFSKESILPKRNSDKLIARKKDWDPKKYGGFDSPTVAYSVLVVAKVEKGKSKKLKSVKELLGITIMERSSFEKNPIDFLEAKGYKEVKKDLIIKLPKYSLFELENGRKRMLASAGELQKGNELALPSKYVNFLYLASHYEKLKGSPEDNEQKQLFVEQHKHYLDEIIEQISEFSKRVILADANLDKVLSAYNKHRDKPIREQAENIIHLFTLTNLGAPAAFKYFDTTIDRKRYTSTKEVLDATLIHQSITGLYETRIDLSQLGGDGGGGGGSEAAAKGGGGSGGTVSLQDEHRLFDIPVTTSLPDVWLQDFPQAWAETGGLGRAKCQAPIIIDLKPTAVPVSIKQYPMSLEAHMGIRQHIIKFLELGVLRPCRSPWNTPLLPVKKPGTQDYRPVQDLREINKRTVDIHPTVPNPYNLLSTLKPDYSWYTVLDLKDAFFCLPLAPQSQELFAFEWKDPERGISGQLTWTRLPQGFKNSPTLFNEALHRDLTDFRTQHPEVTLLQYVDDLLLAAPTKKACTQGTRHLLQELGEKGYRASAKKAQICQTKVTYLGYILSEGKRWLTPGRIETVARIPPPRNPREVREFLGKAGFCRLFIPGFAELAAPLYALTKPSTPFTWQTEHQLAFEALKKALLSAPALGLPDTSKPFTLFLDERQGIAKGVLTQKLGPWKRPVAYLSKKLDPVAAGWPPCLRIMAATAMLVKDSAKLTLGQPLTVITPHTLEAIVRQPPDRWITNARLTHYQALLLDTDRVQFGPPVTLNPATLLPVPENQPSPHDCRQVLAETHGTREDLKDQELPDADHTWYTDGSSYLDSGTRRAGAAVVDGHNTIWAQSLPPGTSAQKAELIALTKALELSKGKKANIYTDSRYAFATAHTHGSIYERRGWLTSEGKEIKNKAEIIALLKALFLPQEVAIIHCPGHQKGQDPVAVGNRQADRVARQAAMAEVLTLATEPDNTSHITAGKRTADGSEFEKRTADGSEFESPKKKAKVE

SEQ ID NO: 1950 - protein, 2097 aa, synthetic construct
MPAAKRVKLDGGDKKYSIGLDIGTNSVGWAVITDEYKVPSKKFKVLGNTDRHSIKKNLIGALLFDSGETAEATRLKRTARRRYTRRKNRICYLQEIFSNEMAKVDDSFFHRLEESFLVEEDKKHERHPIFGNIVDEVAYHEKYPTIYHLRKKLVDSTDKADLRLIYLALAHMIKFRGHFLIEGDLNPDNSDVDKLFIQLVQTYNQLFEENPINASGVDAKAILSARLSKSRRLENLIAQLPGEKKNGLFGNLIALSLGLTPNFKSNFDLAEDAKLQLSKDTYDDDLDNLLAQIGDQYADLFLAAKNLSDAILLSDILRVNTEITKAPLSASMIKRYDEHHQDLTLLKALVRQQLPEKYKEIFFDQSKNGYAGYIDGGASQEEFYKFIKPILEKMDGTEELLVKLNREDLLRKQRTFDNGSIPHQIHLGELHAILRRQEDFYPFLKDNREKIEKILTFRIPYYVGPLARGNSRFAWMTRKSEETITPWNFEEVVDKGASAQSFIERMTNFDKNLPNEKVLPKHSLLYEYFTVYNELTKVKYVTEGMRKPAFLSGEQKKAIVDLLFKTNRKVTVKQLKEDYFKKIECFDSVEISGVEDRFNASLGTYHDLLKIIKDKDFLDNEENEDILEDIVLTLTLFEDREMIEERLKTYAHLFDDKVMKQLKRRRYTGWGRLSRKLINGIRDKQSGKTILDFLKSDGFANRNFMQLIHDDSLTFKEDIQKAQVSGQGDSLHEHIANLAGSPAIKKGILQTVKVVDELVKVMGRHKPENIVIEMARENQTTQKGQKNSRERMKRIEEGIKELGSQILKEHPVENTQLQNEKLYLYYLQNGRDMYVDQELDINRLSDYDVDHIVPQSFLKDDSIDNKVLTRSDKARGKSDNVPSEEVVKKMKNYWRQLLNAKLITQRKFDNLTKAERGGLSELDKAGFIKRQLVETRQITKHVAQILDSRMNTKYDENDKLIREVKVITLKSKLVSDFRKDFQFYKVREINNYHHAHDAYLNAVVGTALIKKYPKLESEFVYGDYKVYDVRKMIAKSEQEIGKATAKYFFYSNIMNFFKTEITLANGEIRKRPLIETNGETGEIVWDKGRDFATVRKVLSMPQVNIVKKTEVQTGGFSKESILPKRNSDKLIARKKDWDPKKYGGFDSPTVAYSVLVVAKVEKGKSKKLKSVKELLGITIMERSSFEKNPIDFLEAKGYKEVKKDLIIKLPKYSLFELENGRKRMLASAGELQKGNELALPSKYVNFLYLASHYEKLKGSPEDNEQKQLFVEQHKHYLDEIIEQISEFSKRVILADANLDKVLSAYNKHRDKPIREQAENIIHLFTLTNLGAPAAFKYFDTTIDRKRYTSTKEVLDATLIHQSITGLYETRIDLSQLGGDGGGGGGSSGGTVSLQDEHRLFDIPVTTSLPDVWLQDFPQAWAETGGLGRAKCQAPIIIDLKPTAVPVSIKQYPMSLEAHMGIRQHIIKFLELGVLRPCRSPWNTPLLPVKKPGTQDYRPVQDLREINKRTVDIHPTVPNPYNLLSTLKPDYSWYTVLDLKDAFFCLPLAPQSQELFAFEWKDPERGISGQLTWTRLPQGFKNSPTLFNEALHRDLTDFRTQHPEVTLLQYVDDLLLAAPTKKACTQGTRHLLQELGEKGYRASAKKAQICQTKVTYLGYILSEGKRWLTPGRIETVARIPPPRNPREVREFLGKAGFCRLFIPGFAELAAPLYALTKPSTPFTWQTEHQLAFEALKKALLSAPALGLPDTSKPFTLFLDERQGIAKGVLTQKLGPWKRPVAYLSKKLDPVAAGWPPCLRIMAATAMLVKDSAKLTLGQPLTVITPHTLEAIVRQPPDRWITNARLTHYQALLLDTDRVQFGPPVTLNPATLLPVPENQPSPHDCRQVLAETHGTREDLKDQELPDADHTWYTDGSSYLDSGTRRAGAAVVDGHNTIWAQSLPPGTSAQKAELIALTKALELSKGKKANIYTDSRYAFATAHTHGSIYERRGWLTSEGKEIKNKAEIIALLKALFLPQEVAIIHCPGHQKGQDPVAVGNRQADRVARQAAMAEVLTLATEPDNTSHITAGKRTADGSEFEKRTADGSEFESPKKKAKVE

SEQ ID NO: 1951 - protein, 2102 aa, synthetic construct
MPAAKRVKLDGGDKKYSIGLDIGTNSVGWAVITDEYKVPSKKFKVLGNTDRHSIKKNLIGALLFDSGETAEATRLKRTARRRYTRRKNRICYLQEIFSNEMAKVDDSFFHRLEESFLVEEDKKHERHPIFGNIVDEVAYHEKYPTIYHLRKKLVDSTDKADLRLIYLALAHMIKFRGHFLIEGDLNPDNSDVDKLFIQLVQTYNQLFEENPINASGVDAKAILSARLSKSRRLENLIAQLPGEKKNGLFGNLIALSLGLTPNFKSNFDLAEDAKLQLSKDTYDDDLDNLLAQIGDQYADLFLAAKNLSDAILLSDILRVNTEITKAPLSASMIKRYDEHHQDLTLLKALVRQQLPEKYKEIFFDQSKNGYAGYIDGGASQEEFYKFIKPILEKMDGTEELLVKLNREDLLRKQRTFDNGSIPHQIHLGELHAILRRQEDFYPFLKDNREKIEKILTFRIPYYVGPLARGNSRFAWMTRKSEETITPWNFEEVVDKGASAQSFIERMTNFDKNLPNEKVLPKHSLLYEYFTVYNELTKVKYVTEGMRKPAFLSGEQKKAIVDLLFKTNRKVTVKQLKEDYFKKIECFDSVEISGVEDRFNASLGTYHDLLKIIKDKDFLDNEENEDILEDIVLTLTLFEDREMIEERLKTYAHLFDDKVMKQLKRRRYTGWGRLSRKLINGIRDKQSGKTILDFLKSDGFANRNFMQLIHDDSLTFKEDIQKAQVSGQGDSLHEHIANLAGSPAIKKGILQTVKVVDELVKVMGRHKPENIVIEMARENQTTQKGQKNSRERMKRIEEGIKELGSQILKEHPVENTQLQNEKLYLYYLQNGRDMYVDQELDINRLSDYDVDHIVPQSFLKDDSIDNKVLTRSDKARGKSDNVPSEEVVKKMKNYWRQLLNAKLITQRKFDNLTKAERGGLSELDKAGFIKRQLVETRQITKHVAQILDSRMNTKYDENDKLIREVKVITLKSKLVSDFRKDFQFYKVREINNYHHAHDAYLNAVVGTALIKKYPKLESEFVYGDYKVYDVRKMIAKSEQEIGKATAKYFFYSNIMNFFKTEITLANGEIRKRPLIETNGETGEIVWDKGRDFATVRKVLSMPQVNIVKKTEVQTGGFSKESILPKRNSDKLIARKKDWDPKKYGGFDSPTVAYSVLVVAKVEKGKSKKLKSVKELLGITIMERSSFEKNPIDFLEAKGYKEVKKDLIIKLPKYSLFELENGRKRMLASAGELQKGNELALPSKYVNFLYLASHYEKLKGSPEDNEQKQLFVEQHKHYLDEIIEQISEFSKRVILADANLDKVLSAYNKHRDKPIREQAENIIHLFTLTNLGAPAAFKYFDTTIDRKRYTSTKEVLDATLIHQSITGLYETRIDLSQLGGDGGGGSGSSEAAAKGGTVSLQDEHRLFDIPVTTSLPDVWLQDFPQAWAETGGLGRAKCQAPIIIDLKPTAVPVSIKQYPMSLEAHMGIRQHIIKFLELGVLRPCRSPWNTPLLPVKKPGTQDYRPVQDLREINKRTVDIHPTVPNPYNLLSTLKPDYSWYTVLDLKDAFFCLPLAPQSQELFAFEWKDPERGISGQLTWTRLPQGFKNSPTLFNEALHRDLTDFRTQHPEVTLLQYVDDLLLAAPTKKACTQGTRHLLQELGEKGYRASAKKAQICQTKVTYLGYILSEGKRWLTPGRIETVARIPPPRNPREVREFLGKAGFCRLFIPGFAELAAPLYALTKPSTPFTWQTEHQLAFEALKKALLSAPALGLPDTSKPFTLFLDERQGIAKGVLTQKLGPWKRPVAYLSKKLDPVAAGWPPCLRIMAATAMLVKDSAKLTLGQPLTVITPHTLEAIVRQPPDRWITNARLTHYQALLLDTDRVQFGPPVTLNPATLLPVPENQPSPHDCRQVLAETHGTREDLKDQELPDADHTWYTDGSSYLDSGTRRAGAAVVDGHNTIWAQSLPPGTSAQKAELIALTKALELSKGKKANIYTDSRYAFATAHTHGSIYERRGWLTSEGKEIKNKAEIIALLKALFLPQEVAIIHCPGHQKGQDPVAVGNRQADRVARQAAMAEVLTLATEPDNTSHITAGKRTADGSEFEKRTADGSEFESPKKKAKVE

SEQ ID NO: 1952 - protein, 2102 aa, synthetic construct
MPAAKRVKLDGGDKKYSIGLDIGTNSVGWAVITDEYKVPSKKFKVLGNTDRHSIKKNLIGALLFDSGETAEATRLKRTARRRYTRRKNRICYLQEIFSNEMAKVDDSFFHRLEESFLVEEDKKHERHPIFGNIVDEVAYHEKYPTIYHLRKKLVDSTDKADLRLIYLALAHMIKFRGHFLIEGDLNPDNSDVDKLFIQLVQTYNQLFEENPINASGVDAKAILSARLSKSRRLENLIAQLPGEKKNGLFGNLIALSLGLTPNFKSNFDLAEDAKLQLSKDTYDDDLDNLLAQIGDQYADLFLAAKNLSDAILLSDILRVNTEITKAPLSASMIKRYDEHHQDLTLLKALVRQQLPEKYKEIFFDQSKNGYAGYIDGGASQEEFYKFIKPILEKMDGTEELLVKLNREDLLRKQRTFDNGSIPHQIHLGELHAILRRQEDFYPFLKDNREKIEKILTFRIPYYVGPLARGNSRFAWMTRKSEETITPWNFEEVVDKGASAQSFIERMTNFDKNLPNEKVLPKHSLLYEYFTVYNELTKVKYVTEGMRKPAFLSGEQKKAIVDLLFKTNRKVTVKQLKEDYFKKIECFDSVEISGVEDRFNASLGTYHDLLKIIKDKDFLDNEENEDILEDIVLTLTLFEDREMIEERLKTYAHLFDDKVMKQLKRRRYTGWGRLSRKLINGIRDKQSGKTILDFLKSDGFANRNFMQLIHDDSLTFKEDIQKAQVSGQGDSLHEHIANLAGSPAIKKGILQTVKVVDELVKVMGRHKPENIVIEMARENQTTQKGQKNSRERMKRIEEGIKELGSQILKEHPVENTQLQNEKLYLYYLQNGRDMYVDQELDINRLSDYDVDHIVPQSFLKDDSIDNKVLTRSDKARGKSDNVPSEEVVKKMKNYWRQLLNAKLITQRKFDNLTKAERGGLSELDKAGFIKRQLVETRQITKHVAQILDSRMNTKYDENDKLIREVKVITLKSKLVSDFRKDFQFYKVREINNYHHAHDAYLNAVVGTALIKKYPKLESEFVYGDYKVYDVRKMIAKSEQEIGKATAKYFFYSNIMNFFKTEITLANGEIRKRPLIETNGETGEIVWDKGRDFATVRKVLSMPQVNIVKKTEVQTGGFSKESILPKRNSDKLIARKKDWDPKKYGGFDSPTVAYSVLVVAKVEKGKSKKLKSVKELLGITIMERSSFEKNPIDFLEAKGYKEVKKDLIIKLPKYSLFELENGRKRMLASAGELQKGNELALPSKYVNFLYLASHYEKLKGSPEDNEQKQLFVEQHKHYLDEIIEQISEFSKRVILADANLDKVLSAYNKHRDKPIREQAENIIHLFTLTNLGAPAAFKYFDTTIDRKRYTSTKEVLDATLIHQSITGLYETRIDLSQLGGDGGGSSGGGEAAAKGGTVSLQDEHRLFDIPVTTSLPDVWLQDFPQAWAETGGLGRAKCQAPIIIDLKPTAVPVSIKQYPMSLEAHMGIRQHIIKFLELGVLRPCRSPWNTPLLPVKKPGTQDYRPVQDLREINKRTVDIHPTVPNPYNLLSTLKPDYSWYTVLDLKDAFFCLPLAPQSQELFAFEWKDPERGISGQLTWTRLPQGFKNSPTLFNEALHRDLTDFRTQHPEVTLLQYVDDLLLAAPTKKACTQGTRHLLQELGEKGYRASAKKAQICQTKVTYLGYILSEGKRWLTPGRIETVARIPPPRNPREVREFLGKAGFCRLFIPGFAELAAPLYALTKPSTPFTWQTEHQLAFEALKKALLSAPALGLPDTSKPFTLFLDERQGIAKGVLTQKLGPWKRPVAYLSKKLDPVAAGWPPCLRIMAATAMLVKDSAKLTLGQPLTVITPHTLEAIVRQPPDRWITNARLTHYQALLLDTDRVQFGPPVTLNPATLLPVPENQPSPHDCRQVLAETHGTREDLKDQELPDADHTWYTDGSSYLDSGTRRAGAAVVDGHNTIWAQSLPPGTSAQKAELIALTKALELSKGKKANIYTDSRYAFATAHTHGSIYERRGWLTSEGKEIKNKAEIIALLKALFLPQEVAIIHCPGHQKGQDPVAVGNRQADRVARQAAMAEVLTLATEPDNTSHITAGKRTADGSEFEKRTADGSEFESPKKKAKVE

SEQ ID NO: 1953 - protein, 2098 aa, synthetic construct
MPAAKRVKLDGGDKKYSIGLDIGTNSVGWAVITDEYKVPSKKFKVLGNTDRHSIKKNLIGALLFDSGETAEATRLKRTARRRYTRRKNRICYLQEIFSNEMAKVDDSFFHRLEESFLVEEDKKHERHPIFGNIVDEVAYHEKYPTIYHLRKKLVDSTDKADLRLIYLALAHMIKFRGHFLIEGDLNPDNSDVDKLFIQLVQTYNQLFEENPINASGVDAKAILSARLSKSRRLENLIAQLPGEKKNGLFGNLIALSLGLTPNFKSNFDLAEDAKLQLSKDTYDDDLDNLLAQIGDQYADLFLAAKNLSDAILLSDILRVNTEITKAPLSASMIKRYDEHHQDLTLLKALVRQQLPEKYKEIFFDQSKNGYAGYIDGGASQEEFYKFIKPILEKMDGTEELLVKLNREDLLRKQRTFDNGSIPHQIHLGELHAILRRQEDFYPFLKDNREKIEKILTFRIPYYVGPLARGNSRFAWMTRKSEETITPWNFEEVVDKGASAQSFIERMTNFDKNLPNEKVLPKHSLLYEYFTVYNELTKVKYVTEGMRKPAFLSGEQKKAIVDLLFKTNRKVTVKQLKEDYFKKIECFDSVEISGVEDRFNASLGTYHDLLKIIKDKDFLDNEENEDILEDIVLTLTLFEDREMIEERLKTYAHLFDDKVMKQLKRRRYTGWGRLSRKLINGIRDKQSGKTILDFLKSDGFANRNFMQLIHDDSLTFKEDIQKAQVSGQGDSLHEHIANLAGSPAIKKGILQTVKVVDELVKVMGRHKPENIVIEMARENQTTQKGQKNSRERMKRIEEGIKELGSQILKEHPVENTQLQNEKLYLYYLQNGRDMYVDQELDINRLSDYDVDHIVPQSFLKDDSIDNKVLTRSDKARGKSDNVPSEEVVKKMKNYWRQLLNAKLITQRKFDNLTKAERGGLSELDKAGFIKRQLVETRQITKHVAQILDSRMNTKYDENDKLIREVKVITLKSKLVSDFRKDFQFYKVREINNYHHAHDAYLNAVVGTALIKKYPKLESEFVYGDYKVYDVRKMIAKSEQEIGKATAKYFFYSNIMNFFKTEITLANGEIRKRPLIETNGETGEIVWDKGRDFATVRKVLSMPQVNIVKKTEVQTGGFSKESILPKRNSDKLIARKKDWDPKKYGGFDSPTVAYSVLVVAKVEKGKSKKLKSVKELLGITIMERSSFEKNPIDFLEAKGYKEVKKDLIIKLPKYSLFELENGRKRMLASAGELQKGNELALPSKYVNFLYLASHYEKLKGSPEDNEQKQLFVEQHKHYLDEIIEQISEFSKRVILADANLDKVLSAYNKHRDKPIREQAENIIHLFTLTNLGAPAAFKYFDTTIDRKRYTSTKEVLDATLIHQSITGLYETRIDLSQLGGDGGPAPAPAPGGTVSLQDEHRLFDIPVTTSLPDVWLQDFPQAWAETGGLGRAKCQAPIIIDLKPTAVPVSIKQYPMSLEAHMGIRQHIIKFLELGVLRPCRSPWNTPLLPVKKPGTQDYRPVQDLREINKRTVDIHPTVPNPYNLLSTLKPDYSWYTVLDLKDAFFCLPLAPQSQELFAFEWKDPERGISGQLTWTRLPQGFKNSPTLFNEALHRDLTDFRTQHPEVTLLQYVDDLLLAAPTKKACTQGTRHLLQELGEKGYRASAKKAQICQTKVTYLGYILSEGKRWLTPGRIETVARIPPPRNPREVREFLGKAGFCRLFIPGFAELAAPLYALTKPSTPFTWQTEHQLAFEALKKALLSAPALGLPDTSKPFTLFLDERQGIAKGVLTQKLGPWKRPVAYLSKKLDPVAAGWPPCLRIMAATAMLVKDSAKLTLGQPLTVITPHTLEAIVRQPPDRWITNARLTHYQALLLDTDRVQFGPPVTLNPATLLPVPENQPSPHDCRQVLAETHGTREDLKDQELPDADHTWYTDGSSYLDSGTRRAGAAVVDGHNTIWAQSLPPGTSAQKAELIALTKALELSKGKKANIYTDSRYAFATAHTHGSIYERRGWLTSEGKEIKNKAEIIALLKALFLPQEVAIIHCPGHQKGQDPVAVGNRQADRVARQAAMAEVLTLATEPDNTSHITAGKRTADGSEFEKRTADGSEFESPKKKAKVE

SEQ ID NO: 1954 - protein, 2102 aa, synthetic construct
MPAAKRVKLDGGDKKYSIGLDIGTNSVGWAVITDEYKVPSKKFKVLGNTDRHSIKKNLIGALLFDSGETAEATRLKRTARRRYTRRKNRICYLQEIFSNEMAKVDDSFFHRLEESFLVEEDKKHERHPIFGNIVDEVAYHEKYPTIYHLRKKLVDSTDKADLRLIYLALAHMIKFRGHFLIEGDLNPDNSDVDKLFIQLVQTYNQLFEENPINASGVDAKAILSARLSKSRRLENLIAQLPGEKKNGLFGNLIALSLGLTPNFKSNFDLAEDAKLQLSKDTYDDDLDNLLAQIGDQYADLFLAAKNLSDAILLSDILRVNTEITKAPLSASMIKRYDEHHQDLTLLKALVRQQLPEKYKEIFFDQSKNGYAGYIDGGASQEEFYKFIKPILEKMDGTEELLVKLNREDLLRKQRTFDNGSIPHQIHLGELHAILRRQEDFYPFLKDNREKIEKILTFRIPYYVGPLARGNSRFAWMTRKSEETITPWNFEEVVDKGASAQSFIERMTNFDKNLPNEKVLPKHSLLYEYFTVYNELTKVKYVTEGMRKPAFLSGEQKKAIVDLLFKTNRKVTVKQLKEDYFKKIECFDSVEISGVEDRFNASLGTYHDLLKIIKDKDFLDNEENEDILEDIVLTLTLFEDREMIEERLKTYAHLFDDKVMKQLKRRRYTGWGRLSRKLINGIRDKQSGKTILDFLKSDGFANRNFMQLIHDDSLTFKEDIQKAQVSGQGDSLHEHIANLAGSPAIKKGILQTVKVVDELVKVMGRHKPENIVIEMARENQTTQKGQKNSRERMKRIEEGIKELGSQILKEHPVENTQLQNEKLYLYYLQNGRDMYVDQELDINRLSDYDVDHIVPQSFLKDDSIDNKVLTRSDKARGKSDNVPSEEVVKKMKNYWRQLLNAKLITQRKFDNLTKAERGGLSELDKAGFIKRQLVETRQITKHVAQILDSRMNTKYDENDKLIREVKVITLKSKLVSDFRKDFQFYKVREINNYHHAHDAYLNAVVGTALIKKYPKLESEFVYGDYKVYDVRKMIAKSEQEIGKATAKYFFYSNIMNFFKTEITLANGEIRKRPLIETNGETGEIVWDKGRDFATVRKVLSMPQVNIVKKTEVQTGGFSKESILPKRNSDKLIARKKDWDPKKYGGFDSPTVAYSVLVVAKVEKGKSKKLKSVKELLGITIMERSSFEKNPIDFLEAKGYKEVKKDLIIKLPKYSLFELENGRKRMLASAGELQKGNELALPSKYVNFLYLASHYEKLKGSPEDNEQKQLFVEQHKHYLDEIIEQISEFSKRVILADANLDKVLSAYNKHRDKPIREQAENIIHLFTLTNLGAPAAFKYFDTTIDRKRYTSTKEVLDATLIHQSITGLYETRIDLSQLGGDGGGGSPAPEAAAKGGTVSLQDEHRLFDIPVTTSLPDVWLQDFPQAWAETGGLGRAKCQAPIIIDLKPTAVPVSIKQYPMSLEAHMGIRQHIIKFLELGVLRPCRSPWNTPLLPVKKPGTQDYRPVQDLREINKRTVDIHPTVPNPYNLLSTLKPDYSWYTVLDLKDAFFCLPLAPQSQELFAFEWKDPERGISGQLTWTRLPQGFKNSPTLFNEALHRDLTDFRTQHPEVTLLQYVDDLLLAAPTKKACTQGTRHLLQELGEKGYRASAKKAQICQTKVTYLGYILSEGKRWLTPGRIETVARIPPPRNPREVREFLGKAGFCRLFIPGFAELAAPLYALTKPSTPFTWQTEHQLAFEALKKALLSAPALGLPDTSKPFTLFLDERQGIAKGVLTQKLGPWKRPVAYLSKKLDPVAAGWPPCLRIMAATAMLVKDSAKLTLGQPLTVITPHTLEAIVRQPPDRWITNARLTHYQALLLDTDRVQFGPPVTLNPATLLPVPENQPSPHDCRQVLAETHGTREDLKDQELPDADHTWYTDGSSYLDSGTRRAGAAVVDGHNTIWAQSLPPGTSAQKAELIALTKALELSKGKKANIYTDSRYAFATAHTHGSIYERRGWLTSEGKEIKNKAEIIALLKALFLPQEVAIIHCPGHQKGQDPVAVGNRQADRVARQAAMAEVLTLATEPDNTSHITAGKRTADGSEFEKRTADGSEFESPKKKAKVE

SEQ ID NO: 1955 - protein, 2103 aa, synthetic construct
MPAAKRVKLDGGDKKYSIGLDIGTNSVGWAVITDEYKVPSKKFKVLGNTDRHSIKKNLIGALLFDSGETAEATRLKRTARRRYTRRKNRICYLQEIFSNEMAKVDDSFFHRLEESFLVEEDKKHERHPIFGNIVDEVAYHEKYPTIYHLRKKLVDSTDKADLRLIYLALAHMIKFRGHFLIEGDLNPDNSDVDKLFIQLVQTYNQLFEENPINASGVDAKAILSARLSKSRRLENLIAQLPGEKKNGLFGNLIALSLGLTPNFKSNFDLAEDAKLQLSKDTYDDDLDNLLAQIGDQYADLFLAAKNLSDAILLSDILRVNTEITKAPLSASMIKRYDEHHQDLTLLKALVRQQLPEKYKEIFFDQSKNGYAGYIDGGASQEEFYKFIKPILEKMDGTEELLVKLNREDLLRKQRTFDNGSIPHQIHLGELHAILRRQEDFYPFLKDNREKIEKILTFRIPYYVGPLARGNSRFAWMTRKSEETITPWNFEEVVDKGASAQSFIERMTNFDKNLPNEKVLPKHSLLYEYFTVYNELTKVKYVTEGMRKPAFLSGEQKKAIVDLLFKTNRKVTVKQLKEDYFKKIECFDSVEISGVEDRFNASLGTYHDLLKIIKDKDFLDNEENEDILEDIVLTLTLFEDREMIEERLKTYAHLFDDKVMKQLKRRRYTGWGRLSRKLINGIRDKQSGKTILDFLKSDGFANRNFMQLIHDDSLTFKEDIQKAQVSGQGDSLHEHIANLAGSPAIKKGILQTVKVVDELVKVMGRHKPENIVIEMARENQTTQKGQKNSRERMKRIEEGIKELGSQILKEHPVENTQLQNEKLYLYYLQNGRDMYVDQELDINRLSDYDVDHIVPQSFLKDDSIDNKVLTRSDKARGKSDNVPSEEVVKKMKNYWRQLLNAKLITQRKFDNLTKAERGGLSELDKAGFIKRQLVETRQITKHVAQILDSRMNTKYDENDKLIREVKVITLKSKLVSDFRKDFQFYKVREINNYHHAHDAYLNAVVGTALIKKYPKLESEFVYGDYKVYDVRKMIAKSEQEIGKATAKYFFYSNIMNFFKTEITLANGEIRKRPLIETNGETGEIVWDKGRDFATVRKVLSMPQVNIVKKTEVQTGGFSKESILPKRNSDKLIARKKDWDPKKYGGFDSPTVAYSVLVVAKVEKGKSKKLKSVKELLGITIMERSSFEKNPIDFLEAKGYKEVKKDLIIKLPKYSLFELENGRKRMLASAGELQKGNELALPSKYVNFLYLASHYEKLKGSPEDNEQKQLFVEQHKHYLDEIIEQISEFSKRVILADANLDKVLSAYNKHRDKPIREQAENIIHLFTLTNLGAPAAFKYFDTTIDRKRYTSTKEVLDATLIHQSITGLYETRIDLSQLGGDGGGGSGGSGGSGGSGGTVSLQDEHRLFDIPVTTSLPDVWLQDFPQAWAETGGLGRAKCQAPIIIDLKPTAVPVSIKQYPMSLEAHMGIRQHIIKFLELGVLRPCRSPWNTPLLPVKKPGTQDYRPVQDLREINKRTVDIHPTVPNPYNLLSTLKPDYSWYTVLDLKDAFFCLPLAPQSQELFAFEWKDPERGISGQLTWTRLPQGFKNSPTLFNEALHRDLTDFRTQHPEVTLLQYVDDLLLAAPTKKACTQGTRHLLQELGEKGYRASAKKAQICQTKVTYLGYILSEGKRWLTPGRIETVARIPPPRNPREVREFLGKAGFCRLFIPGFAELAAPLYALTKPSTPFTWQTEHQLAFEALKKALLSAPALGLPDTSKPFTLFLDERQGIAKGVLTQKLGPWKRPVAYLSKKLDPVAAGWPPCLRIMAATAMLVKDSAKLTLGQPLTVITPHTLEAIVRQPPDRWITNARLTHYQALLLDTDRVQFGPPVTLNPATLLPVPENQPSPHDCRQVLAETHGTREDLKDQELPDADHTWYTDGSSYLDSGTRRAGAAVVDGHNTIWAQSLPPGTSAQKAELIALTKALELSKGKKANIYTDSRYAFATAHTHGSIYERRGWLTSEGKEIKNKAEIIALLKALFLPQEVAIIHCPGHQKGQDPVAVGNRQADRVARQAAMAEVLTLATEPDNTSHITAGKRTADGSEFEKRTADGSEFESPKKKAKVE

SEQ ID NO: 1956 - protein, 2097 aa, synthetic construct
MPAAKRVKLDGGDKKYSIGLDIGTNSVGWAVITDEYKVPSKKFKVLGNTDRHSIKKNLIGALLFDSGETAEATRLKRTARRRYTRRKNRICYLQEIFSNEMAKVDDSFFHRLEESFLVEEDKKHERHPIFGNIVDEVAYHEKYPTIYHLRKKLVDSTDKADLRLIYLALAHMIKFRGHFLIEGDLNPDNSDVDKLFIQLVQTYNQLFEENPINASGVDAKAILSARLSKSRRLENLIAQLPGEKKNGLFGNLIALSLGLTPNFKSNFDLAEDAKLQLSKDTYDDDLDNLLAQIGDQYADLFLAAKNLSDAILLSDILRVNTEITKAPLSASMIKRYDEHHQDLTLLKALVRQQLPEKYKEIFFDQSKNGYAGYIDGGASQEEFYKFIKPILEKMDGTEELLVKLNREDLLRKQRTFDNGSIPHQIHLGELHAILRRQEDFYPFLKDNREKIEKILTFRIPYYVGPLARGNSRFAWMTRKSEETITPWNFEEVVDKGASAQSFIERMTNFDKNLPNEKVLPKHSLLYEYFTVYNELTKVKYVTEGMRKPAFLSGEQKKAIVDLLFKTNRKVTVKQLKEDYFKKIECFDSVEISGVEDRFNASLGTYHDLLKIIKDKDFLDNEENEDILEDIVLTLTLFEDREMIEERLKTYAHLFDDKVMKQLKRRRYTGWGRLSRKLINGIRDKQSGKTILDFLKSDGFANRNFMQLIHDDSLTFKEDIQKAQVSGQGDSLHEHIANLAGSPAIKKGILQTVKVVDELVKVMGRHKPENIVIEMARENQTTQKGQKNSRERMKRIEEGIKELGSQILKEHPVENTQLQNEKLYLYYLQNGRDMYVDQELDINRLSDYDVDHIVPQSFLKDDSIDNKVLTRSDKARGKSDNVPSEEVVKKMKNYWRQLLNAKLITQRKFDNLTKAERGGLSELDKAGFIKRQLVETRQITKHVAQILDSRMNTKYDENDKLIREVKVITLKSKLVSDFRKDFQFYKVREINNYHHAHDAYLNAVVGTALIKKYPKLESEFVYGDYKVYDVRKMIAKSEQEIGKATAKYFFYSNIMNFFKTEITLANGEIRKRPLIETNGETGEIVWDKGRDFATVRKVLSMPQVNIVKKTEVQTGGFSKESILPKRNSDKLIARKKDWDPKKYGGFDSPTVAYSVLVVAKVEKGKSKKLKSVKELLGITIMERSSFEKNPIDFLEAKGYKEVKKDLIIKLPKYSLFELENGRKRMLASAGELQKGNELALPSKYVNFLYLASHYEKLKGSPEDNEQKQLFVEQHKHYLDEIIEQISEFSKRVILADANLDKVLSAYNKHRDKPIREQAENIIHLFTLTNLGAPAAFKYFDTTIDRKRYTSTKEVLDATLIHQSITGLYETRIDLSQLGGDGGGGGGGGGGTVSLQDEHRLFDIPVTTSLPDVWLQDFPQAWAETGGLGRAKCQAPIIIDLKPTAVPVSIKQYPMSLEAHMGIRQHIIKFLELGVLRPCRSPWNTPLLPVKKPGTQDYRPVQDLREINKRTVDIHPTVPNPYNLLSTLKPDYSWYTVLDLKDAFFCLPLAPQSQELFAFEWKDPERGISGQLTWTRLPQGFKNSPTLFNEALHRDLTDFRTQHPEVTLLQYVDDLLLAAPTKKACTQGTRHLLQELGEKGYRASAKKAQICQTKVTYLGYILSEGKRWLTPGRIETVARIPPPRNPREVREFLGKAGFCRLFIPGFAELAAPLYALTKPSTPFTWQTEHQLAFEALKKALLSAPALGLPDTSKPFTLFLDERQGIAKGVLTQKLGPWKRPVAYLSKKLDPVAAGWPPCLRIMAATAMLVKDSAKLTLGQPLTVITPHTLEAIVRQPPDRWITNARLTHYQALLLDTDRVQFGPPVTLNPATLLPVPENQPSPHDCRQVLAETHGTREDLKDQELPDADHTWYTDGSSYLDSGTRRAGAAVVDGHNTIWAQSLPPGTSAQKAELIALTKALELSKGKKANIYTDSRYAFATAHTHGSIYERRGWLTSEGKEIKNKAEIIALLKALFLPQEVAIIHCPGHQKGQDPVAVGNRQADRVARQAAMAEVLTLATEPDNTSHITAGKRTADGSEFEKRTADGSEFESPKKKAKVE

SEQ ID NO: 1957 - protein, 2109 aa, synthetic construct
MPAAKRVKLDGGDKKYSIGLDIGTNSVGWAVITDEYKVPSKKFKVLGNTDRHSIKKNLIGALLFDSGETAEATRLKRTARRRYTRRKNRICYLQEIFSNEMAKVDDSFFHRLEESFLVEEDKKHERHPIFGNIVDEVAYHEKYPTIYHLRKKLVDSTDKADLRLIYLALAHMIKFRGHFLIEGDLNPDNSDVDKLFIQLVQTYNQLFEENPINASGVDAKAILSARLSKSRRLENLIAQLPGEKKNGLFGNLIALSLGLTPNFKSNFDLAEDAKLQLSKDTYDDDLDNLLAQIGDQYADLFLAAKNLSDAILLSDILRVNTEITKAPLSASMIKRYDEHHQDLTLLKALVRQQLPEKYKEIFFDQSKNGYAGYIDGGASQEEFYKFIKPILEKMDGTEELLVKLNREDLLRKQRTFDNGSIPHQIHLGELHAILRRQEDFYPFLKDNREKIEKILTFRIPYYVGPLARGNSRFAWMTRKSEETITPWNFEEVVDKGASAQSFIERMTNFDKNLPNEKVLPKHSLLYEYFTVYNELTKVKYVTEGMRKPAFLSGEQKKAIVDLLFKTNRKVTVKQLKEDYFKKIECFDSVEISGVEDRFNASLGTYHDLLKIIKDKDFLDNEENEDILEDIVLTLTLFEDREMIEERLKTYAHLFDDKVMKQLKRRRYTGWGRLSRKLINGIRDKQSGKTILDFLKSDGFANRNFMQLIHDDSLTFKEDIQKAQVSGQGDSLHEHIANLAGSPAIKKGILQTVKVVDELVKVMGRHKPENIVIEMARENQTTQKGQKNSRERMKRIEEGIKELGSQILKEHPVENTQLQNEKLYLYYLQNGRDMYVDQELDINRLSDYDVDHIVPQSFLKDDSIDNKVLTRSDKARGKSDNVPSEEVVKKMKNYWRQLLNAKLITQRKFDNLTKAERGGLSELDKAGFIKRQLVETRQITKHVAQILDSRMNTKYDENDKLIREVKVITLKSKLVSDFRKDFQFYKVREINNYHHAHDAYLNAVVGTALIKKYPKLESEFVYGDYKVYDVRKMIAKSEQEIGKATAKYFFYSNIMNFFKTEITLANGEIRKRPLIETNGETGEIVWDKGRDFATVRKVLSMPQVNIVKKTEVQTGGFSKESILPKRNSDKLIARKKDWDPKKYGGFDSPTVAYSVLVVAKVEKGKSKKLKSVKELLGITIMERSSFEKNPIDFLEAKGYKEVKKDLIIKLPKYSLFELENGRKRMLASAGELQKGNELALPSKYVNFLYLASHYEKLKGSPEDNEQKQLFVEQHKHYLDEIIEQISEFSKRVILADANLDKVLSAYNKHRDKPIREQAENIIHLFTLTNLGAPAAFKYFDTTIDRKRYTSTKEVLDATLIHQSITGLYETRIDLSQLGGDGGGGSGGSGGSGGSGGSGGSGGTVSLQDEHRLFDIPVTTSLPDVWLQDFPQAWAETGGLGRAKCQAPIIIDLKPTAVPVSIKQYPMSLEAHMGIRQHIIKFLELGVLRPCRSPWNTPLLPVKKPGTQDYRPVQDLREINKRTVDIHPTVPNPYNLLSTLKPDYSWYTVLDLKDAFFCLPLAPQSQELFAFEWKDPERGISGQLTWTRLPQGFKNSPTLFNEALHRDLTDFRTQHPEVTLLQYVDDLLLAAPTKKACTQGTRHLLQELGEKGYRASAKKAQICQTKVTYLGYILSEGKRWLTPGRIETVARIPPPRNPREVREFLGKAGFCRLFIPGFAELAAPLYALTKPSTPFTWQTEHQLAFEALKKALLSAPALGLPDTSKPFTLFLDERQGIAKGVLTQKLGPWKRPVAYLSKKLDPVAAGWPPCLRIMAATAMLVKDSAKLTLGQPLTVITPHTLEAIVRQPPDRWITNARLTHYQALLLDTDRVQFGPPVTLNPATLLPVPENQPSPHDCRQVLAETHGTREDLKDQELPDADHTWYTDGSSYLDSGTRRAGAAVVDGHNTIWAQSLPPGTSAQKAELIALTKALELSKGKKANIYTDSRYAFATAHTHGSIYERRGWLTSEGKEIKNKAEIIALLKALFLPQEVAIIHCPGHQKGQDPVAVGNRQADRVARQAAMAEVLTLATEPDNTSHITAGKRTADGSEFEKRTADGSEFESPKKKAKVE

SEQ ID NO: 1958 - protein, 2100 aa, synthetic construct
MPAAKRVKLDGGDKKYSIGLDIGTNSVGWAVITDEYKVPSKKFKVLGNTDRHSIKKNLIGALLFDSGETAEATRLKRTARRRYTRRKNRICYLQEIFSNEMAKVDDSFFHRLEESFLVEEDKKHERHPIFGNIVDEVAYHEKYPTIYHLRKKLVDSTDKADLRLIYLALAHMIKFRGHFLIEGDLNPDNSDVDKLFIQLVQTYNQLFEENPINASGVDAKAILSARLSKSRRLENLIAQLPGEKKNGLFGNLIALSLGLTPNFKSNFDLAEDAKLQLSKDTYDDDLDNLLAQIGDQYADLFLAAKNLSDAILLSDILRVNTEITKAPLSASMIKRYDEHHQDLTLLKALVRQQLPEKYKEIFFDQSKNGYAGYIDGGASQEEFYKFIKPILEKMDGTEELLVKLNREDLLRKQRTFDNGSIPHQIHLGELHAILRRQEDFYPFLKDNREKIEKILTFRIPYYVGPLARGNSRFAWMTRKSEETITPWNFEEVVDKGASAQSFIERMTNFDKNLPNEKVLPKHSLLYEYFTVYNELTKVKYVTEGMRKPAFLSGEQKKAIVDLLFKTNRKVTVKQLKEDYFKKIECFDSVEISGVEDRFNASLGTYHDLLKIIKDKDFLDNEENEDILEDIVLTLTLFEDREMIEERLKTYAHLFDDKVMKQLKRRRYTGWGRLSRKLINGIRDKQSGKTILDFLKSDGFANRNFMQLIHDDSLTFKEDIQKAQVSGQGDSLHEHIANLAGSPAIKKGILQTVKVVDELVKVMGRHKPENIVIEMARENQTTQKGQKNSRERMKRIEEGIKELGSQILKEHPVENTQLQNEKLYLYYLQNGRDMYVDQELDINRLSDYDVDHIVPQSFLKDDSIDNKVLTRSDKARGKSDNVPSEEVVKKMKNYWRQLLNAKLITQRKFDNLTKAERGGLSELDKAGFIKRQLVETRQITKHVAQILDSRMNTKYDENDKLIREVKVITLKSKLVSDFRKDFQFYKVREINNYHHAHDAYLNAVVGTALIKKYPKLESEFVYGDYKVYDVRKMIAKSEQEIGKATAKYFFYSNIMNFFKTEITLANGEIRKRPLIETNGETGEIVWDKGRDFATVRKVLSMPQVNIVKKTEVQTGGFSKESILPKRNSDKLIARKKDWDPKKYGGFDSPTVAYSVLVVAKVEKGKSKKLKSVKELLGITIMERSSFEKNPIDFLEAKGYKEVKKDLIIKLPKYSLFELENGRKRMLASAGELQKGNELALPSKYVNFLYLASHYEKLKGSPEDNEQKQLFVEQHKHYLDEIIEQISEFSKRVILADANLDKVLSAYNKHRDKPIREQAENIIHLFTLTNLGAPAAFKYFDTTIDRKRYTSTKEVLDATLIHQSITGLYETRIDLSQLGGDGGGGSGSSPAPGGTVSLQDEHRLFDIPVTTSLPDVWLQDFPQAWAETGGLGRAKCQAPIIIDLKPTAVPVSIKQYPMSLEAHMGIRQHIIKFLELGVLRPCRSPWNTPLLPVKKPGTQDYRPVQDLREINKRTVDIHPTVPNPYNLLSTLKPDYSWYTVLDLKDAFFCLPLAPQSQELFAFEWKDPERGISGQLTWTRLPQGFKNSPTLFNEALHRDLTDFRTQHPEVTLLQYVDDLLLAAPTKKACTQGTRHLLQELGEKGYRASAKKAQICQTKVTYLGYILSEGKRWLTPGRIETVARIPPPRNPREVREFLGKAGFCRLFIPGFAELAAPLYALTKPSTPFTWQTEHQLAFEALKKALLSAPALGLPDTSKPFTLFLDERQGIAKGVLTQKLGPWKRPVAYLSKKLDPVAAGWPPCLRIMAATAMLVKDSAKLTLGQPLTVITPHTLEAIVRQPPDRWITNARLTHYQALLLDTDRVQFGPPVTLNPATLLPVPENQPSPHDCRQVLAETHGTREDLKDQELPDADHTWYTDGSSYLDSGTRRAGAAVVDGHNTIWAQSLPPGTSAQKAELIALTKALELSKGKKANIYTDSRYAFATAHTHGSIYERRGWLTSEGKEIKNKAEIIALLKALFLPQEVAIIHCPGHQKGQDPVAVGNRQADRVARQAAMAEVLTLATEPDNTSHITAGKRTADGSEFEKRTADGSEFESPKKKAKVE

SEQ ID NO: 1959 - protein, 2102 aa, synthetic construct
MPAAKRVKLDGGDKKYSIGLDIGTNSVGWAVITDEYKVPSKKFKVLGNTDRHSIKKNLIGALLFDSGETAEATRLKRTARRRYTRRKNRICYLQEIFSNEMAKVDDSFFHRLEESFLVEEDKKHERHPIFGNIVDEVAYHEKYPTIYHLRKKLVDSTDKADLRLIYLALAHMIKFRGHFLIEGDLNPDNSDVDKLFIQLVQTYNQLFEENPINASGVDAKAILSARLSKSRRLENLIAQLPGEKKNGLFGNLIALSLGLTPNFKSNFDLAEDAKLQLSKDTYDDDLDNLLAQIGDQYADLFLAAKNLSDAILLSDILRVNTEITKAPLSASMIKRYDEHHQDLTLLKALVRQQLPEKYKEIFFDQSKNGYAGYIDGGASQEEFYKFIKPILEKMDGTEELLVKLNREDLLRKQRTFDNGSIPHQIHLGELHAILRRQEDFYPFLKDNREKIEKILTFRIPYYVGPLARGNSRFAWMTRKSEETITPWNFEEVVDKGASAQSFIERMTNFDKNLPNEKVLPKHSLLYEYFTVYNELTKVKYVTEGMRKPAFLSGEQKKAIVDLLFKTNRKVTVKQLKEDYFKKIECFDSVEISGVEDRFNASLGTYHDLLKIIKDKDFLDNEENEDILEDIVLTLTLFEDREMIEERLKTYAHLFDDKVMKQLKRRRYTGWGRLSRKLINGIRDKQSGKTILDFLKSDGFANRNFMQLIHDDSLTFKEDIQKAQVSGQGDSLHEHIANLAGSPAIKKGILQTVKVVDELVKVMGRHKPENIVIEMARENQTTQKGQKNSRERMKRIEEGIKELGSQILKEHPVENTQLQNEKLYLYYLQNGRDMYVDQELDINRLSDYDVDHIVPQSFLKDDSIDNKVLTRSDKARGKSDNVPSEEVVKKMKNYWRQLLNAKLITQRKFDNLTKAERGGLSELDKAGFIKRQLVETRQITKHVAQILDSRMNTKYDENDKLIREVKVITLKSKLVSDFRKDFQFYKVREINNYHHAHDAYLNAVVGTALIKKYPKLESEFVYGDYKVYDVRKMIAKSEQEIGKATAKYFFYSNIMNFFKTEITLANGEIRKRPLIETNGETGEIVWDKGRDFATVRKVLSMPQVNIVKKTEVQTGGFSKESILPKRNSDKLIARKKDWDPKKYGGFDSPTVAYSVLVVAKVEKGKSKKLKSVKELLGITIMERSSFEKNPIDFLEAKGYKEVKKDLIIKLPKYSLFELENGRKRMLASAGELQKGNELALPSKYVNFLYLASHYEKLKGSPEDNEQKQLFVEQHKHYLDEIIEQISEFSKRVILADANLDKVLSAYNKHRDKPIREQAENIIHLFTLTNLGAPAAFKYFDTTIDRKRYTSTKEVLDATLIHQSITGLYETRIDLSQLGGDGGGSSEAAAKGGSGGTVSLQDEHRLFDIPVTTSLPDVWLQDFPQAWAETGGLGRAKCQAPIIIDLKPTAVPVSIKQYPMSLEAHMGIRQHIIKFLELGVLRPCRSPWNTPLLPVKKPGTQDYRPVQDLREINKRTVDIHPTVPNPYNLLSTLKPDYSWYTVLDLKDAFFCLPLAPQSQELFAFEWKDPERGISGQLTWTRLPQGFKNSPTLFNEALHRDLTDFRTQHPEVTLLQYVDDLLLAAPTKKACTQGTRHLLQELGEKGYRASAKKAQICQTKVTYLGYILSEGKRWLTPGRIETVARIPPPRNPREVREFLGKAGFCRLFIPGFAELAAPLYALTKPSTPFTWQTEHQLAFEALKKALLSAPALGLPDTSKPFTLFLDERQGIAKGVLTQKLGPWKRPVAYLSKKLDPVAAGWPPCLRIMAATAMLVKDSAKLTLGQPLTVITPHTLEAIVRQPPDRWITNARLTHYQALLLDTDRVQFGPPVTLNPATLLPVPENQPSPHDCRQVLAETHGTREDLKDQELPDADHTWYTDGSSYLDSGTRRAGAAVVDGHNTIWAQSLPPGTSAQKAELIALTKALELSKGKKANIYTDSRYAFATAHTHGSIYERRGWLTSEGKEIKNKAEIIALLKALFLPQEVAIIHCPGHQKGQDPVAVGNRQADRVARQAAMAEVLTLATEPDNTSHITAGKRTADGSEFEKRTADGSEFESPKKKAKVE

SEQ ID NO: 1960 - protein, 2099 aa, synthetic construct
MPAAKRVKLDGGDKKYSIGLDIGTNSVGWAVITDEYKVPSKKFKVLGNTDRHSIKKNLIGALLFDSGETAEATRLKRTARRRYTRRKNRICYLQEIFSNEMAKVDDSFFHRLEESFLVEEDKKHERHPIFGNIVDEVAYHEKYPTIYHLRKKLVDSTDKADLRLIYLALAHMIKFRGHFLIEGDLNPDNSDVDKLFIQLVQTYNQLFEENPINASGVDAKAILSARLSKSRRLENLIAQLPGEKKNGLFGNLIALSLGLTPNFKSNFDLAEDAKLQLSKDTYDDDLDNLLAQIGDQYADLFLAAKNLSDAILLSDILRVNTEITKAPLSASMIKRYDEHHQDLTLLKALVRQQLPEKYKEIFFDQSKNGYAGYIDGGASQEEFYKFIKPILEKMDGTEELLVKLNREDLLRKQRTFDNGSIPHQIHLGELHAILRRQEDFYPFLKDNREKIEKILTFRIPYYVGPLARGNSRFAWMTRKSEETITPWNFEEVVDKGASAQSFIERMTNFDKNLPNEKVLPKHSLLYEYFTVYNELTKVKYVTEGMRKPAFLSGEQKKAIVDLLFKTNRKVTVKQLKEDYFKKIECFDSVEISGVEDRFNASLGTYHDLLKIIKDKDFLDNEENEDILEDIVLTLTLFEDREMIEERLKTYAHLFDDKVMKQLKRRRYTGWGRLSRKLINGIRDKQSGKTILDFLKSDGFANRNFMQLIHDDSLTFKEDIQKAQVSGQGDSLHEHIANLAGSPAIKKGILQTVKVVDELVKVMGRHKPENIVIEMARENQTTQKGQKNSRERMKRIEEGIKELGSQILKEHPVENTQLQNEKLYLYYLQNGRDMYVDQELDINRLSDYDVDHIVPQSFLKDDSIDNKVLTRSDKARGKSDNVPSEEVVKKMKNYWRQLLNAKLITQRKFDNLTKAERGGLSELDKAGFIKRQLVETRQITKHVAQILDSRMNTKYDENDKLIREVKVITLKSKLVSDFRKDFQFYKVREINNYHHAHDAYLNAVVGTALIKKYPKLESEFVYGDYKVYDVRKMIAKSEQEIGKATAKYFFYSNIMNFFKTEITLANGEIRKRPLIETNGETGEIVWDKGRDFATVRKVLSMPQVNIVKKTEVQTGGFSKESILPKRNSDKLIARKKDWDPKKYGGFDSPTVAYSVLVVAKVEKGKSKKLKSVKELLGITIMERSSFEKNPIDFLEAKGYKEVKKDLIIKLPKYSLFELENGRKRMLASAGELQKGNELALPSKYVNFLYLASHYEKLKGSPEDNEQKQLFVEQHKHYLDEIIEQISEFSKRVILADANLDKVLSAYNKHRDKPIREQAENIIHLFTLTNLGAPAAFKYFDTTIDRKRYTSTKEVLDATLIHQSITGLYETRIDLSQLGGDGGEAAAKPAPGGTVSLQDEHRLFDIPVTTSLPDVWLQDFPQAWAETGGLGRAKCQAPIIIDLKPTAVPVSIKQYPMSLEAHMGIRQHIIKFLELGVLRPCRSPWNTPLLPVKKPGTQDYRPVQDLREINKRTVDIHPTVPNPYNLLSTLKPDYSWYTVLDLKDAFFCLPLAPQSQELFAFEWKDPERGISGQLTWTRLPQGFKNSPTLFNEALHRDLTDFRTQHPEVTLLQYVDDLLLAAPTKKACTQGTRHLLQELGEKGYRASAKKAQICQTKVTYLGYILSEGKRWLTPGRIETVARIPPPRNPREVREFLGKAGFCRLFIPGFAELAAPLYALTKPSTPFTWQTEHQLAFEALKKALLSAPALGLPDTSKPFTLFLDERQGIAKGVLTQKLGPWKRPVAYLSKKLDPVAAGWPPCLRIMAATAMLVKDSAKLTLGQPLTVITPHTLEAIVRQPPDRWITNARLTHYQALLLDTDRVQFGPPVTLNPATLLPVPENQPSPHDCRQVLAETHGTREDLKDQELPDADHTWYTDGSSYLDSGTRRAGAAVVDGHNTIWAQSLPPGTSAQKAELIALTKALELSKGKKANIYTDSRYAFATAHTHGSIYERRGWLTSEGKEIKNKAEIIALLKALFLPQEVAIIHCPGHQKGQDPVAVGNRQADRVARQAAMAEVLTLATEPDNTSHITAGKRTADGSEFEKRTADGSEFESPKKKAKVE

SEQ ID NO: 1961 - protein, 2100 aa, synthetic construct
MPAAKRVKLDGGDKKYSIGLDIGTNSVGWAVITDEYKVPSKKFKVLGNTDRHSIKKNLIGALLFDSGETAEATRLKRTARRRYTRRKNRICYLQEIFSNEMAKVDDSFFHRLEESFLVEEDKKHERHPIFGNIVDEVAYHEKYPTIYHLRKKLVDSTDKADLRLIYLALAHMIKFRGHFLIEGDLNPDNSDVDKLFIQLVQTYNQLFEENPINASGVDAKAILSARLSKSRRLENLIAQLPGEKKNGLFGNLIALSLGLTPNFKSNFDLAEDAKLQLSKDTYDDDLDNLLAQIGDQYADLFLAAKNLSDAILLSDILRVNTEITKAPLSASMIKRYDEHHQDLTLLKALVRQQLPEKYKEIFFDQSKNGYAGYIDGGASQEEFYKFIKPILEKMDGTEELLVKLNREDLLRKQRTFDNGSIPHQIHLGELHAILRRQEDFYPFLKDNREKIEKILTFRIPYYVGPLARGNSRFAWMTRKSEETITPWNFEEVVDKGASAQSFIERMTNFDKNLPNEKVLPKHSLLYEYFTVYNELTKVKYVTEGMRKPAFLSGEQKKAIVDLLFKTNRKVTVKQLKEDYFKKIECFDSVEISGVEDRFNASLGTYHDLLKIIKDKDFLDNEENEDILEDIVLTLTLFEDREMIEERLKTYAHLFDDKVMKQLKRRRYTGWGRLSRKLINGIRDKQSGKTILDFLKSDGFANRNFMQLIHDDSLTFKEDIQKAQVSGQGDSLHEHIANLAGSPAIKKGILQTVKVVDELVKVMGRHKPENIVIEMARENQTTQKGQKNSRERMKRIEEGIKELGSQILKEHPVENTQLQNEKLYLYYLQNGRDMYVDQELDINRLSDYDVDHIVPQSFLKDDSIDNKVLTRSDKARGKSDNVPSEEVVKKMKNYWRQLLNAKLITQRKFDNLTKAERGGLSELDKAGFIKRQLVETRQITKHVAQILDSRMNTKYDENDKLIREVKVITLKSKLVSDFRKDFQFYKVREINNYHHAHDAYLNAVVGTALIKKYPKLESEFVYGDYKVYDVRKMIAKSEQEIGKATAKYFFYSNIMNFFKTEITLANGEIRKRPLIETNGETGEIVWDKGRDFATVRKVLSMPQVNIVKKTEVQTGGFSKESILPKRNSDKLIARKKDWDPKKYGGFDSPTVAYSVLVVAKVEKGKSKKLKSVKELLGITIMERSSFEKNPIDFLEAKGYKEVKKDLIIKLPKYSLFELENGRKRMLASAGELQKGNELALPSKYVNFLYLASHYEKLKGSPEDNEQKQLFVEQHKHYLDEIIEQISEFSKRVILADANLDKVLSAYNKHRDKPIREQAENIIHLFTLTNLGAPAAFKYFDTTIDRKRYTSTKEVLDATLIHQSITGLYETRIDLSQLGGDGGPAPGSSGGSGGTVSLQDEHRLFDIPVTTSLPDVWLQDFPQAWAETGGLGRAKCQAPIIIDLKPTAVPVSIKQYPMSLEAHMGIRQHIIKFLELGVLRPCRSPWNTPLLPVKKPGTQDYRPVQDLREINKRTVDIHPTVPNPYNLLSTLKPDYSWYTVLDLKDAFFCLPLAPQSQELFAFEWKDPERGISGQLTWTRLPQGFKNSPTLFNEALHRDLTDFRTQHPEVTLLQYVDDLLLAAPTKKACTQGTRHLLQELGEKGYRASAKKAQICQTKVTYLGYILSEGKRWLTPGRIETVARIPPPRNPREVREFLGKAGFCRLFIPGFAELAAPLYALTKPSTPFTWQTEHQLAFEALKKALLSAPALGLPDTSKPFTLFLDERQGIAKGVLTQKLGPWKRPVAYLSKKLDPVAAGWPPCLRIMAATAMLVKDSAKLTLGQPLTVITPHTLEAIVRQPPDRWITNARLTHYQALLLDTDRVQFGPPVTLNPATLLPVPENQPSPHDCRQVLAETHGTREDLKDQELPDADHTWYTDGSSYLDSGTRRAGAAVVDGHNTIWAQSLPPGTSAQKAELIALTKALELSKGKKANIYTDSRYAFATAHTHGSIYERRGWLTSEGKEIKNKAEIIALLKALFLPQEVAIIHCPGHQKGQDPVAVGNRQADRVARQAAMAEVLTLATEPDNTSHITAGKRTADGSEFEKRTADGSEFESPKKKAKVE

SEQ ID NO: 1962 - protein, 2100 aa, synthetic construct
MPAAKRVKLDGGDKKYSIGLDIGTNSVGWAVITDEYKVPSKKFKVLGNTDRHSIKKNLIGALLFDSGETAEATRLKRTARRRYTRRKNRICYLQEIFSNEMAKVDDSFFHRLEESFLVEEDKKHERHPIFGNIVDEVAYHEKYPTIYHLRKKLVDSTDKADLRLIYLALAHMIKFRGHFLIEGDLNPDNSDVDKLFIQLVQTYNQLFEENPINASGVDAKAILSARLSKSRRLENLIAQLPGEKKNGLFGNLIALSLGLTPNFKSNFDLAEDAKLQLSKDTYDDDLDNLLAQIGDQYADLFLAAKNLSDAILLSDILRVNTEITKAPLSASMIKRYDEHHQDLTLLKALVRQQLPEKYKEIFFDQSKNGYAGYIDGGASQEEFYKFIKPILEKMDGTEELLVKLNREDLLRKQRTFDNGSIPHQIHLGELHAILRRQEDFYPFLKDNREKIEKILTFRIPYYVGPLARGNSRFAWMTRKSEETITPWNFEEVVDKGASAQSFIERMTNFDKNLPNEKVLPKHSLLYEYFTVYNELTKVKYVTEGMRKPAFLSGEQKKAIVDLLFKTNRKVTVKQLKEDYFKKIECFDSVEISGVEDRFNASLGTYHDLLKIIKDKDFLDNEENEDILEDIVLTLTLFEDREMIEERLKTYAHLFDDKVMKQLKRRRYTGWGRLSRKLINGIRDKQSGKTILDFLKSDGFANRNFMQLIHDDSLTFKEDIQKAQVSGQGDSLHEHIANLAGSPAIKKGILQTVKVVDELVKVMGRHKPENIVIEMARENQTTQKGQKNSRERMKRIEEGIKELGSQILKEHPVENTQLQNEKLYLYYLQNGRDMYVDQELDINRLSDYDVDHIVPQSFLKDDSIDNKVLTRSDKARGKSDNVPSEEVVKKMKNYWRQLLNAKLITQRKFDNLTKAERGGLSELDKAGFIKRQLVETRQITKHVAQILDSRMNTKYDENDKLIREVKVITLKSKLVSDFRKDFQFYKVREINNYHHAHDAYLNAVVGTALIKKYPKLESEFVYGDYKVYDVRKMIAKSEQEIGKATAKYFFYSNIMNFFKTEITLANGEIRKRPLIETNGETGEIVWDKGRDFATVRKVLSMPQVNIVKKTEVQTGGFSKESILPKRNSDKLIARKKDWDPKKYGGFDSPTVAYSVLVVAKVEKGKSKKLKSVKELLGITIMERSSFEKNPIDFLEAKGYKEVKKDLIIKLPKYSLFELENGRKRMLASAGELQKGNELALPSKYVNFLYLASHYEKLKGSPEDNEQKQLFVEQHKHYLDEIIEQISEFSKRVILADANLDKVLSAYNKHRDKPIREQAENIIHLFTLTNLGAPAAFKYFDTTIDRKRYTSTKEVLDATLIHQSITGLYETRIDLSQLGGDGGGSSPAPGGGGGTVSLQDEHRLFDIPVTTSLPDVWLQDFPQAWAETGGLGRAKCQAPIIIDLKPTAVPVSIKQYPMSLEAHMGIRQHIIKFLELGVLRPCRSPWNTPLLPVKKPGTQDYRPVQDLREINKRTVDIHPTVPNPYNLLSTLKPDYSWYTVLDLKDAFFCLPLAPQSQELFAFEWKDPERGISGQLTWTRLPQGFKNSPTLFNEALHRDLTDFRTQHPEVTLLQYVDDLLLAAPTKKACTQGTRHLLQELGEKGYRASAKKAQICQTKVTYLGYILSEGKRWLTPGRIETVARIPPPRNPREVREFLGKAGFCRLFIPGFAELAAPLYALTKPSTPFTWQTEHQLAFEALKKALLSAPALGLPDTSKPFTLFLDERQGIAKGVLTQKLGPWKRPVAYLSKKLDPVAAGWPPCLRIMAATAMLVKDSAKLTLGQPLTVITPHTLEAIVRQPPDRWITNARLTHYQALLLDTDRVQFGPPVTLNPATLLPVPENQPSPHDCRQVLAETHGTREDLKDQELPDADHTWYTDGSSYLDSGTRRAGAAVVDGHNTIWAQSLPPGTSAQKAELIALTKALELSKGKKANIYTDSRYAFATAHTHGSIYERRGWLTSEGKEIKNKAEIIALLKALFLPQEVAIIHCPGHQKGQDPVAVGNRQADRVARQAAMAEVLTLATEPDNTSHITAGKRTADGSEFEKRTADGSEFESPKKKAKVE

SEQ ID NO: 1963 - protein, 2101 aa, synthetic construct
MPAAKRVKLDGGDKKYSIGLDIGTNSVGWAVITDEYKVPSKKFKVLGNTDRHSIKKNLIGALLFDSGETAEATRLKRTARRRYTRRKNRICYLQEIFSNEMAKVDDSFFHRLEESFLVEEDKKHERHPIFGNIVDEVAYHEKYPTIYHLRKKLVDSTDKADLRLIYLALAHMIKFRGHFLIEGDLNPDNSDVDKLFIQLVQTYNQLFEENPINASGVDAKAILSARLSKSRRLENLIAQLPGEKKNGLFGNLIALSLGLTPNFKSNFDLAEDAKLQLSKDTYDDDLDNLLAQIGDQYADLFLAAKNLSDAILLSDILRVNTEITKAPLSASMIKRYDEHHQDLTLLKALVRQQLPEKYKEIFFDQSKNGYAGYIDGGASQEEFYKFIKPILEKMDGTEELLVKLNREDLLRKQRTFDNGSIPHQIHLGELHAILRRQEDFYPFLKDNREKIEKILTFRIPYYVGPLARGNSRFAWMTRKSEETITPWNFEEVVDKGASAQSFIERMTNFDKNLPNEKVLPKHSLLYEYFTVYNELTKVKYVTEGMRKPAFLSGEQKKAIVDLLFKTNRKVTVKQLKEDYFKKIECFDSVEISGVEDRFNASLGTYHDLLKIIKDKDFLDNEENEDILEDIVLTLTLFEDREMIEERLKTYAHLFDDKVMKQLKRRRYTGWGRLSRKLINGIRDKQSGKTILDFLKSDGFANRNFMQLIHDDSLTFKEDIQKAQVSGQGDSLHEHIANLAGSPAIKKGILQTVKVVDELVKVMGRHKPENIVIEMARENQTTQKGQKNSRERMKRIEEGIKELGSQILKEHPVENTQLQNEKLYLYYLQNGRDMYVDQELDINRLSDYDVDHIVPQSFLKDDSIDNKVLTRSDKARGKSDNVPSEEVVKKMKNYWRQLLNAKLITQRKFDNLTKAERGGLSELDKAGFIKRQLVETRQITKHVAQILDSRMNTKYDENDKLIREVKVITLKSKLVSDFRKDFQFYKVREINNYHHAHDAYLNAVVGTALIKKYPKLESEFVYGDYKVYDVRKMIAKSEQEIGKATAKYFFYSNIMNFFKTEITLANGEIRKRPLIETNGETGEIVWDKGRDFATVRKVLSMPQVNIVKKTEVQTGGFSKESILPKRNSDKLIARKKDWDPKKYGGFDSPTVAYSVLVVAKVEKGKSKKLKSVKELLGITIMERSSFEKNPIDFLEAKGYKEVKKDLIIKLPKYSLFELENGRKRMLASAGELQKGNELALPSKYVNFLYLASHYEKLKGSPEDNEQKQLFVEQHKHYLDEIIEQISEFSKRVILADANLDKVLSAYNKHRDKPIREQAENIIHLFTLTNLGAPAAFKYFDTTIDRKRYTSTKEVLDATLIHQSITGLYETRIDLSQLGGDGGEAAAKEAAAKGGTVSLQDEHRLFDIPVTTSLPDVWLQDFPQAWAETGGLGRAKCQAPIIIDLKPTAVPVSIKQYPMSLEAHMGIRQHIIKFLELGVLRPCRSPWNTPLLPVKKPGTQDYRPVQDLREINKRTVDIHPTVPNPYNLLSTLKPDYSWYTVLDLKDAFFCLPLAPQSQELFAFEWKDPERGISGQLTWTRLPQGFKNSPTLFNEALHRDLTDFRTQHPEVTLLQYVDDLLLAAPTKKACTQGTRHLLQELGEKGYRASAKKAQICQTKVTYLGYILSEGKRWLTPGRIETVARIPPPRNPREVREFLGKAGFCRLFIPGFAELAAPLYALTKPSTPFTWQTEHQLAFEALKKALLSAPALGLPDTSKPFTLFLDERQGIAKGVLTQKLGPWKRPVAYLSKKLDPVAAGWPPCLRIMAATAMLVKDSAKLTLGQPLTVITPHTLEAIVRQPPDRWITNARLTHYQALLLDTDRVQFGPPVTLNPATLLPVPENQPSPHDCRQVLAETHGTREDLKDQELPDADHTWYTDGSSYLDSGTRRAGAAVVDGHNTIWAQSLPPGTSAQKAELIALTKALELSKGKKANIYTDSRYAFATAHTHGSIYERRGWLTSEGKEIKNKAEIIALLKALFLPQEVAIIHCPGHQKGQDPVAVGNRQADRVARQAAMAEVLTLATEPDNTSHITAGKRTADGSEFEKRTADGSEFESPKKKAKVE

SEQ ID NO: 1964 - protein, 2100 aa, synthetic construct
MPAAKRVKLDGGDKKYSIGLDIGTNSVGWAVITDEYKVPSKKFKVLGNTDRHSIKKNLIGALLFDSGETAEATRLKRTARRRYTRRKNRICYLQEIFSNEMAKVDDSFFHRLEESFLVEEDKKHERHPIFGNIVDEVAYHEKYPTIYHLRKKLVDSTDKADLRLIYLALAHMIKFRGHFLIEGDLNPDNSDVDKLFIQLVQTYNQLFEENPINASGVDAKAILSARLSKSRRLENLIAQLPGEKKNGLFGNLIALSLGLTPNFKSNFDLAEDAKLQLSKDTYDDDLDNLLAQIGDQYADLFLAAKNLSDAILLSDILRVNTEITKAPLSASMIKRYDEHHQDLTLLKALVRQQLPEKYKEIFFDQSKNGYAGYIDGGASQEEFYKFIKPILEKMDGTEELLVKLNREDLLRKQRTFDNGSIPHQIHLGELHAILRRQEDFYPFLKDNREKIEKILTFRIPYYVGPLARGNSRFAWMTRKSEETITPWNFEEVVDKGASAQSFIERMTNFDKNLPNEKVLPKHSLLYEYFTVYNELTKVKYVTEGMRKPAFLSGEQKKAIVDLLFKTNRKVTVKQLKEDYFKKIECFDSVEISGVEDRFNASLGTYHDLLKIIKDKDFLDNEENEDILEDIVLTLTLFEDREMIEERLKTYAHLFDDKVMKQLKRRRYTGWGRLSRKLINGIRDKQSGKTILDFLKSDGFANRNFMQLIHDDSLTFKEDIQKAQVSGQGDSLHEHIANLAGSPAIKKGILQTVKVVDELVKVMGRHKPENIVIEMARENQTTQKGQKNSRERMKRIEEGIKELGSQILKEHPVENTQLQNEKLYLYYLQNGRDMYVDQELDINRLSDYDVDHIVPQSFLKDDSIDNKVLTRSDKARGKSDNVPSEEVVKKMKNYWRQLLNAKLITQRKFDNLTKAERGGLSELDKAGFIKRQLVETRQITKHVAQILDSRMNTKYDENDKLIREVKVITLKSKLVSDFRKDFQFYKVREINNYHHAHDAYLNAVVGTALIKKYPKLESEFVYGDYKVYDVRKMIAKSEQEIGKATAKYFFYSNIMNFFKTEITLANGEIRKRPLIETNGETGEIVWDKGRDFATVRKVLSMPQVNIVKKTEVQTGGFSKESILPKRNSDKLIARKKDWDPKKYGGFDSPTVAYSVLVVAKVEKGKSKKLKSVKELLGITIMERSSFEKNPIDFLEAKGYKEVKKDLIIKLPKYSLFELENGRKRMLASAGELQKGNELALPSKYVNFLYLASHYEKLKGSPEDNEQKQLFVEQHKHYLDEIIEQISEFSKRVILADANLDKVLSAYNKHRDKPIREQAENIIHLFTLTNLGAPAAFKYFDTTIDRKRYTSTKEVLDATLIHQSITGLYETRIDLSQLGGDGGGGSPAPGSSGGTVSLQDEHRLFDIPVTTSLPDVWLQDFPQAWAETGGLGRAKCQAPIIIDLKPTAVPVSIKQYPMSLEAHMGIRQHIIKFLELGVLRPCRSPWNTPLLPVKKPGTQDYRPVQDLREINKRTVDIHPTVPNPYNLLSTLKPDYSWYTVLDLKDAFFCLPLAPQSQELFAFEWKDPERGISGQLTWTRLPQGFKNSPTLFNEALHRDLTDFRTQHPEVTLLQYVDDLLLAAPTKKACTQGTRHLLQELGEKGYRASAKKAQICQTKVTYLGYILSEGKRWLTPGRIETVARIPPPRNPREVREFLGKAGFCRLFIPGFAELAAPLYALTKPSTPFTWQTEHQLAFEALKKALLSAPALGLPDTSKPFTLFLDERQGIAKGVLTQKLGPWKRPVAYLSKKLDPVAAGWPPCLRIMAATAMLVKDSAKLTLGQPLTVITPHTLEAIVRQPPDRWITNARLTHYQALLLDTDRVQFGPPVTLNPATLLPVPENQPSPHDCRQVLAETHGTREDLKDQELPDADHTWYTDGSSYLDSGTRRAGAAVVDGHNTIWAQSLPPGTSAQKAELIALTKALELSKGKKANIYTDSRYAFATAHTHGSIYERRGWLTSEGKEIKNKAEIIALLKALFLPQEVAIIHCPGHQKGQDPVAVGNRQADRVARQAAMAEVLTLATEPDNTSHITAGKRTADGSEFEKRTADGSEFESPKKKAKVE

SEQ ID NO: 1965 - protein, 2099 aa, synthetic construct
MPAAKRVKLDGGDKKYSIGLDIGTNSVGWAVITDEYKVPSKKFKVLGNTDRHSIKKNLIGALLFDSGETAEATRLKRTARRRYTRRKNRICYLQEIFSNEMAKVDDSFFHRLEESFLVEEDKKHERHPIFGNIVDEVAYHEKYPTIYHLRKKLVDSTDKADLRLIYLALAHMIKFRGHFLIEGDLNPDNSDVDKLFIQLVQTYNQLFEENPINASGVDAKAILSARLSKSRRLENLIAQLPGEKKNGLFGNLIALSLGLTPNFKSNFDLAEDAKLQLSKDTYDDDLDNLLAQIGDQYADLFLAAKNLSDAILLSDILRVNTEITKAPLSASMIKRYDEHHQDLTLLKALVRQQLPEKYKEIFFDQSKNGYAGYIDGGASQEEFYKFIKPILEKMDGTEELLVKLNREDLLRKQRTFDNGSIPHQIHLGELHAILRRQEDFYPFLKDNREKIEKILTFRIPYYVGPLARGNSRFAWMTRKSEETITPWNFEEVVDKGASAQSFIERMTNFDKNLPNEKVLPKHSLLYEYFTVYNELTKVKYVTEGMRKPAFLSGEQKKAIVDLLFKTNRKVTVKQLKEDYFKKIECFDSVEISGVEDRFNASLGTYHDLLKIIKDKDFLDNEENEDILEDIVLTLTLFEDREMIEERLKTYAHLFDDKVMKQLKRRRYTGWGRLSRKLINGIRDKQSGKTILDFLKSDGFANRNFMQLIHDDSLTFKEDIQKAQVSGQGDSLHEHIANLAGSPAIKKGILQTVKVVDELVKVMGRHKPENIVIEMARENQTTQKGQKNSRERMKRIEEGIKELGSQILKEHPVENTQLQNEKLYLYYLQNGRDMYVDQELDINRLSDYDVDHIVPQSFLKDDSIDNKVLTRSDKARGKSDNVPSEEVVKKMKNYWRQLLNAKLITQRKFDNLTKAERGGLSELDKAGFIKRQLVETRQITKHVAQILDSRMNTKYDENDKLIREVKVITLKSKLVSDFRKDFQFYKVREINNYHHAHDAYLNAVVGTALIKKYPKLESEFVYGDYKVYDVRKMIAKSEQEIGKATAKYFFYSNIMNFFKTEITLANGEIRKRPLIETNGETGEIVWDKGRDFATVRKVLSMPQVNIVKKTEVQTGGFSKESILPKRNSDKLIARKKDWDPKKYGGFDSPTVAYSVLVVAKVEKGKSKKLKSVKELLGITIMERSSFEKNPIDFLEAKGYKEVKKDLIIKLPKYSLFELENGRKRMLASAGELQKGNELALPSKYVNFLYLASHYEKLKGSPEDNEQKQLFVEQHKHYLDEIIEQISEFSKRVILADANLDKVLSAYNKHRDKPIREQAENIIHLFTLTNLGAPAAFKYFDTTIDRKRYTSTKEVLDATLIHQSITGLYETRIDLSQLGGDGGGSSEAAAKGGTVSLQDEHRLFDIPVTTSLPDVWLQDFPQAWAETGGLGRAKCQAPIIIDLKPTAVPVSIKQYPMSLEAHMGIRQHIIKFLELGVLRPCRSPWNTPLLPVKKPGTQDYRPVQDLREINKRTVDIHPTVPNPYNLLSTLKPDYSWYTVLDLKDAFFCLPLAPQSQELFAFEWKDPERGISGQLTWTRLPQGFKNSPTLFNEALHRDLTDFRTQHPEVTLLQYVDDLLLAAPTKKACTQGTRHLLQELGEKGYRASAKKAQICQTKVTYLGYILSEGKRWLTPGRIETVARIPPPRNPREVREFLGKAGFCRLFIPGFAELAAPLYALTKPSTPFTWQTEHQLAFEALKKALLSAPALGLPDTSKPFTLFLDERQGIAKGVLTQKLGPWKRPVAYLSKKLDPVAAGWPPCLRIMAATAMLVKDSAKLTLGQPLTVITPHTLEAIVRQPPDRWITNARLTHYQALLLDTDRVQFGPPVTLNPATLLPVPENQPSPHDCRQVLAETHGTREDLKDQELPDADHTWYTDGSSYLDSGTRRAGAAVVDGHNTIWAQSLPPGTSAQKAELIALTKALELSKGKKANIYTDSRYAFATAHTHGSIYERRGWLTSEGKEIKNKAEIIALLKALFLPQEVAIIHCPGHQKGQDPVAVGNRQADRVARQAAMAEVLTLATEPDNTSHITAGKRTADGSEFEKRTADGSEFESPKKKAKVE

SEQ ID NO: 1966 - protein, 2111 aa, synthetic construct
MPAAKRVKLDGGDKKYSIGLDIGTNSVGWAVITDEYKVPSKKFKVLGNTDRHSIKKNLIGALLFDSGETAEATRLKRTARRRYTRRKNRICYLQEIFSNEMAKVDDSFFHRLEESFLVEEDKKHERHPIFGNIVDEVAYHEKYPTIYHLRKKLVDSTDKADLRLIYLALAHMIKFRGHFLIEGDLNPDNSDVDKLFIQLVQTYNQLFEENPINASGVDAKAILSARLSKSRRLENLIAQLPGEKKNGLFGNLIALSLGLTPNFKSNFDLAEDAKLQLSKDTYDDDLDNLLAQIGDQYADLFLAAKNLSDAILLSDILRVNTEITKAPLSASMIKRYDEHHQDLTLLKALVRQQLPEKYKEIFFDQSKNGYAGYIDGGASQEEFYKFIKPILEKMDGTEELLVKLNREDLLRKQRTFDNGSIPHQIHLGELHAILRRQEDFYPFLKDNREKIEKILTFRIPYYVGPLARGNSRFAWMTRKSEETITPWNFEEVVDKGASAQSFIERMTNFDKNLPNEKVLPKHSLLYEYFTVYNELTKVKYVTEGMRKPAFLSGEQKKAIVDLLFKTNRKVTVKQLKEDYFKKIECFDSVEISGVEDRFNASLGTYHDLLKIIKDKDFLDNEENEDILEDIVLTLTLFEDREMIEERLKTYAHLFDDKVMKQLKRRRYTGWGRLSRKLINGIRDKQSGKTILDFLKSDGFANRNFMQLIHDDSLTFKEDIQKAQVSGQGDSLHEHIANLAGSPAIKKGILQTVKVVDELVKVMGRHKPENIVIEMARENQTTQKGQKNSRERMKRIEEGIKELGSQILKEHPVENTQLQNEKLYLYYLQNGRDMYVDQELDINRLSDYDVDHIVPQSFLKDDSIDNKVLTRSDKARGKSDNVPSEEVVKKMKNYWRQLLNAKLITQRKFDNLTKAERGGLSELDKAGFIKRQLVETRQITKHVAQILDSRMNTKYDENDKLIREVKVITLKSKLVSDFRKDFQFYKVREINNYHHAHDAYLNAVVGTALIKKYPKLESEFVYGDYKVYDVRKMIAKSEQEIGKATAKYFFYSNIMNFFKTEITLANGEIRKRPLIETNGETGEIVWDKGRDFATVRKVLSMPQVNIVKKTEVQTGGFSKESILPKRNSDKLIARKKDWDPKKYGGFDSPTVAYSVLVVAKVEKGKSKKLKSVKELLGITIMERSSFEKNPIDFLEAKGYKEVKKDLIIKLPKYSLFELENGRKRMLASAGELQKGNELALPSKYVNFLYLASHYEKLKGSPEDNEQKQLFVEQHKHYLDEIIEQISEFSKRVILADANLDKVLSAYNKHRDKPIREQAENIIHLFTLTNLGAPAAFKYFDTTIDRKRYTSTKEVLDATLIHQSITGLYETRIDLSQLGGDGGGGGGSGGGGSGGGGSGGGGSGGTVSLQDEHRLFDIPVTTSLPDVWLQDFPQAWAETGGLGRAKCQAPIIIDLKPTAVPVSIKQYPMSLEAHMGIRQHIIKFLELGVLRPCRSPWNTPLLPVKKPGTQDYRPVQDLREINKRTVDIHPTVPNPYNLLSTLKPDYSWYTVLDLKDAFFCLPLAPQSQELFAFEWKDPERGISGQLTWTRLPQGFKNSPTLFNEALHRDLTDFRTQHPEVTLLQYVDDLLLAAPTKKACTQGTRHLLQELGEKGYRASAKKAQICQTKVTYLGYILSEGKRWLTPGRIETVARIPPPRNPREVREFLGKAGFCRLFIPGFAELAAPLYALTKPSTPFTWQTEHQLAFEALKKALLSAPALGLPDTSKPFTLFLDERQGIAKGVLTQKLGPWKRPVAYLSKKLDPVAAGWPPCLRIMAATAMLVKDSAKLTLGQPLTVITPHTLEAIVRQPPDRWITNARLTHYQALLLDTDRVQFGPPVTLNPATLLPVPENQPSPHDCRQVLAETHGTREDLKDQELPDADHTWYTDGSSYLDSGTRRAGAAVVDGHNTIWAQSLPPGTSAQKAELIALTKALELSKGKKANIYTDSRYAFATAHTHGSIYERRGWLTSEGKEIKNKAEIIALLKALFLPQEVAIIHCPGHQKGQDPVAVGNRQADRVARQAAMAEVLTLATEPDNTSHITAGKRTADGSEFEKRTADGSEFESPKKKAKVE

SEQ ID NO: 1967 - protein, 2137 aa, synthetic construct
MPAAKRVKLDGGDKKYSIGLDIGTNSVGWAVITDEYKVPSKKFKVLGNTDRHSIKKNLIGALLFDSGETAEATRLKRTARRRYTRRKNRICYLQEIFSNEMAKVDDSFFHRLEESFLVEEDKKHERHPIFGNIVDEVAYHEKYPTIYHLRKKLVDSTDKADLRLIYLALAHMIKFRGHFLIEGDLNPDNSDVDKLFIQLVQTYNQLFEENPINASGVDAKAILSARLSKSRRLENLIAQLPGEKKNGLFGNLIALSLGLTPNFKSNFDLAEDAKLQLSKDTYDDDLDNLLAQIGDQYADLFLAAKNLSDAILLSDILRVNTEITKAPLSASMIKRYDEHHQDLTLLKALVRQQLPEKYKEIFFDQSKNGYAGYIDGGASQEEFYKFIKPILEKMDGTEELLVKLNREDLLRKQRTFDNGSIPHQIHLGELHAILRRQEDFYPFLKDNREKIEKILTFRIPYYVGPLARGNSRFAWMTRKSEETITPWNFEEVVDKGASAQSFIERMTNFDKNLPNEKVLPKHSLLYEYFTVYNELTKVKYVTEGMRKPAFLSGEQKKAIVDLLFKTNRKVTVKQLKEDYFKKIECFDSVEISGVEDRFNASLGTYHDLLKIIKDKDFLDNEENEDILEDIVLTLTLFEDREMIEERLKTYAHLFDDKVMKQLKRRRYTGWGRLSRKLINGIRDKQSGKTILDFLKSDGFANRNFMQLIHDDSLTFKEDIQKAQVSGQGDSLHEHIANLAGSPAIKKGILQTVKVVDELVKVMGRHKPENIVIEMARENQTTQKGQKNSRERMKRIEEGIKELGSQILKEHPVENTQLQNEKLYLYYLQNGRDMYVDQELDINRLSDYDVDHIVPQSFLKDDSIDNKVLTRSDKARGKSDNVPSEEVVKKMKNYWRQLLNAKLITQRKFDNLTKAERGGLSELDKAGFIKRQLVETRQITKHVAQILDSRMNTKYDENDKLIREVKVITLKSKLVSDFRKDFQFYKVREINNYHHAHDAYLNAVVGTALIKKYPKLESEFVYGDYKVYDVRKMIAKSEQEIGKATAKYFFYSNIMNFFKTEITLANGEIRKRPLIETNGETGEIVWDKGRDFATVRKVLSMPQVNIVKKTEVQTGGFSKESILPKRNSDKLIARKKDWDPKKYGGFDSPTVAYSVLVVAKVEKGKSKKLKSVKELLGITIMERSSFEKNPIDFLEAKGYKEVKKDLIIKLPKYSLFELENGRKRMLASAGELQKGNELALPSKYVNFLYLASHYEKLKGSPEDNEQKQLFVEQHKHYLDEIIEQISEFSKRVILADANLDKVLSAYNKHRDKPIREQAENIIHLFTLTNLGAPAAFKYFDTTIDRKRYTSTKEVLDATLIHQSITGLYETRIDLSQLGGDGGAEAAAKEAAAKEAAAKEAAAKALEAEAAAKEAAAKEAAAKEAAAKAGGTVSLQDEHRLFDIPVTTSLPDVWLQDFPQAWAETGGLGRAKCQAPIIIDLKPTAVPVSIKQYPMSLEAHMGIRQHIIKFLELGVLRPCRSPWNTPLLPVKKPGTQDYRPVQDLREINKRTVDIHPTVPNPYNLLSTLKPDYSWYTVLDLKDAFFCLPLAPQSQELFAFEWKDPERGISGQLTWTRLPQGFKNSPTLFNEALHRDLTDFRTQHPEVTLLQYVDDLLLAAPTKKACTQGTRHLLQELGEKGYRASAKKAQICQTKVTYLGYILSEGKRWLTPGRIETVARIPPPRNPREVREFLGKAGFCRLFIPGFAELAAPLYALTKPSTPFTWQTEHQLAFEALKKALLSAPALGLPDTSKPFTLFLDERQGIAKGVLTQKLGPWKRPVAYLSKKLDPVAAGWPPCLRIMAATAMLVKDSAKLTLGQPLTVITPHTLEAIVRQPPDRWITNARLTHYQALLLDTDRVQFGPPVTLNPATLLPVPENQPSPHDCRQVLAETHGTREDLKDQELPDADHTWYTDGSSYLDSGTRRAGAAVVDGHNTIWAQSLPPGTSAQKAELIALTKALELSKGKKANIYTDSRYAFATAHTHGSIYERRGWLTSEGKEIKNKAEIIALLKALFLPQEVAIIHCPGHQKGQDPVAVGNRQADRVARQAAMAEVLTLATEPDNTSHITAGKRTADGSEFEKRTADGSEFESPKKKAKVE

SEQ ID NO: 1968 - protein, 2102 aa, synthetic construct
MPAAKRVKLDGGDKKYSIGLDIGTNSVGWAVITDEYKVPSKKFKVLGNTDRHSIKKNLIGALLFDSGETAEATRLKRTARRRYTRRKNRICYLQEIFSNEMAKVDDSFFHRLEESFLVEEDKKHERHPIFGNIVDEVAYHEKYPTIYHLRKKLVDSTDKADLRLIYLALAHMIKFRGHFLIEGDLNPDNSDVDKLFIQLVQTYNQLFEENPINASGVDAKAILSARLSKSRRLENLIAQLPGEKKNGLFGNLIALSLGLTPNFKSNFDLAEDAKLQLSKDTYDDDLDNLLAQIGDQYADLFLAAKNLSDAILLSDILRVNTEITKAPLSASMIKRYDEHHQDLTLLKALVRQQLPEKYKEIFFDQSKNGYAGYIDGGASQEEFYKFIKPILEKMDGTEELLVKLNREDLLRKQRTFDNGSIPHQIHLGELHAILRRQEDFYPFLKDNREKIEKILTFRIPYYVGPLARGNSRFAWMTRKSEETITPWNFEEVVDKGASAQSFIERMTNFDKNLPNEKVLPKHSLLYEYFTVYNELTKVKYVTEGMRKPAFLSGEQKKAIVDLLFKTNRKVTVKQLKEDYFKKIECFDSVEISGVEDRFNASLGTYHDLLKIIKDKDFLDNEENEDILEDIVLTLTLFEDREMIEERLKTYAHLFDDKVMKQLKRRRYTGWGRLSRKLINGIRDKQSGKTILDFLKSDGFANRNFMQLIHDDSLTFKEDIQKAQVSGQGDSLHEHIANLAGSPAIKKGILQTVKVVDELVKVMGRHKPENIVIEMARENQTTQKGQKNSRERMKRIEEGIKELGSQILKEHPVENTQLQNEKLYLYYLQNGRDMYVDQELDINRLSDYDVDHIVPQSFLKDDSIDNKVLTRSDKARGKSDNVPSEEVVKKMKNYWRQLLNAKLITQRKFDNLTKAERGGLSELDKAGFIKRQLVETRQITKHVAQILDSRMNTKYDENDKLIREVKVITLKSKLVSDFRKDFQFYKVREINNYHHAHDAYLNAVVGTALIKKYPKLESEFVYGDYKVYDVRKMIAKSEQEIGKATAKYFFYSNIMNFFKTEITLANGEIRKRPLIETNGETGEIVWDKGRDFATVRKVLSMPQVNIVKKTEVQTGGFSKESILPKRNSDKLIARKKDWDPKKYGGFDSPTVAYSVLVVAKVEKGKSKKLKSVKELLGITIMERSSFEKNPIDFLEAKGYKEVKKDLIIKLPKYSLFELENGRKRMLASAGELQKGNELALPSKYVNFLYLASHYEKLKGSPEDNEQKQLFVEQHKHYLDEIIEQISEFSKRVILADANLDKVLSAYNKHRDKPIREQAENIIHLFTLTNLGAPAAFKYFDTTIDRKRYTSTKEVLDATLIHQSITGLYETRIDLSQLGGDGGPAPGSSEAAAKGGTVSLQDEHRLFDIPVTTSLPDVWLQDFPQAWAETGGLGRAKCQAPIIIDLKPTAVPVSIKQYPMSLEAHMGIRQHIIKFLELGVLRPCRSPWNTPLLPVKKPGTQDYRPVQDLREINKRTVDIHPTVPNPYNLLSTLKPDYSWYTVLDLKDAFFCLPLAPQSQELFAFEWKDPERGISGQLTWTRLPQGFKNSPTLFNEALHRDLTDFRTQHPEVTLLQYVDDLLLAAPTKKACTQGTRHLLQELGEKGYRASAKKAQICQTKVTYLGYILSEGKRWLTPGRIETVARIPPPRNPREVREFLGKAGFCRLFIPGFAELAAPLYALTKPSTPFTWQTEHQLAFEALKKALLSAPALGLPDTSKPFTLFLDERQGIAKGVLTQKLGPWKRPVAYLSKKLDPVAAGWPPCLRIMAATAMLVKDSAKLTLGQPLTVITPHTLEAIVRQPPDRWITNARLTHYQALLLDTDRVQFGPPVTLNPATLLPVPENQPSPHDCRQVLAETHGTREDLKDQELPDADHTWYTDGSSYLDSGTRRAGAAVVDGHNTIWAQSLPPGTSAQKAELIALTKALELSKGKKANIYTDSRYAFATAHTHGSIYERRGWLTSEGKEIKNKAEIIALLKALFLPQEVAIIHCPGHQKGQDPVAVGNRQADRVARQAAMAEVLTLATEPDNTSHITAGKRTADGSEFEKRTADGSEFESPKKKAKVE

SEQ ID NO: 1969 - protein, 2102 aa, synthetic construct
MPAAKRVKLDGGDKKYSIGLDIGTNSVGWAVITDEYKVPSKKFKVLGNTDRHSIKKNLIGALLFDSGETAEATRLKRTARRRYTRRKNRICYLQEIFSNEMAKVDDSFFHRLEESFLVEEDKKHERHPIFGNIVDEVAYHEKYPTIYHLRKKLVDSTDKADLRLIYLALAHMIKFRGHFLIEGDLNPDNSDVDKLFIQLVQTYNQLFEENPINASGVDAKAILSARLSKSRRLENLIAQLPGEKKNGLFGNLIALSLGLTPNFKSNFDLAEDAKLQLSKDTYDDDLDNLLAQIGDQYADLFLAAKNLSDAILLSDILRVNTEITKAPLSASMIKRYDEHHQDLTLLKALVRQQLPEKYKEIFFDQSKNGYAGYIDGGASQEEFYKFIKPILEKMDGTEELLVKLNREDLLRKQRTFDNGSIPHQIHLGELHAILRRQEDFYPFLKDNREKIEKILTFRIPYYVGPLARGNSRFAWMTRKSEETITPWNFEEVVDKGASAQSFIERMTNFDKNLPNEKVLPKHSLLYEYFTVYNELTKVKYVTEGMRKPAFLSGEQKKAIVDLLFKTNRKVTVKQLKEDYFKKIECFDSVEISGVEDRFNASLGTYHDLLKIIKDKDFLDNEENEDILEDIVLTLTLFEDREMIEERLKTYAHLFDDKVMKQLKRRRYTGWGRLSRKLINGIRDKQSGKTILDFLKSDGFANRNFMQLIHDDSLTFKEDIQKAQVSGQGDSLHEHIANLAGSPAIKKGILQTVKVVDELVKVMGRHKPENIVIEMARENQTTQKGQKNSRERMKRIEEGIKELGSQILKEHPVENTQLQNEKLYLYYLQNGRDMYVDQELDINRLSDYDVDHIVPQSFLKDDSIDNKVLTRSDKARGKSDNVPSEEVVKKMKNYWRQLLNAKLITQRKFDNLTKAERGGLSELDKAGFIKRQLVETRQITKHVAQILDSRMNTKYDENDKLIREVKVITLKSKLVSDFRKDFQFYKVREINNYHHAHDAYLNAVVGTALIKKYPKLESEFVYGDYKVYDVRKMIAKSEQEIGKATAKYFFYSNIMNFFKTEITLANGEIRKRPLIETNGETGEIVWDKGRDFATVRKVLSMPQVNIVKKTEVQTGGFSKESILPKRNSDKLIARKKDWDPKKYGGFDSPTVAYSVLVVAKVEKGKSKKLKSVKELLGITIMERSSFEKNPIDFLEAKGYKEVKKDLIIKLPKYSLFELENGRKRMLASAGELQKGNELALPSKYVNFLYLASHYEKLKGSPEDNEQKQLFVEQHKHYLDEIIEQISEFSKRVILADANLDKVLSAYNKHRDKPIREQAENIIHLFTLTNLGAPAAFKYFDTTIDRKRYTSTKEVLDATLIHQSITGLYETRIDLSQLGGDGGGGGEAAAKPAPGGTVSLQDEHRLFDIPVTTSLPDVWLQDFPQAWAETGGLGRAKCQAPIIIDLKPTAVPVSIKQYPMSLEAHMGIRQHIIKFLELGVLRPCRSPWNTPLLPVKKPGTQDYRPVQDLREINKRTVDIHPTVPNPYNLLSTLKPDYSWYTVLDLKDAFFCLPLAPQSQELFAFEWKDPERGISGQLTWTRLPQGFKNSPTLFNEALHRDLTDFRTQHPEVTLLQYVDDLLLAAPTKKACTQGTRHLLQELGEKGYRASAKKAQICQTKVTYLGYILSEGKRWLTPGRIETVARIPPPRNPREVREFLGKAGFCRLFIPGFAELAAPLYALTKPSTPFTWQTEHQLAFEALKKALLSAPALGLPDTSKPFTLFLDERQGIAKGVLTQKLGPWKRPVAYLSKKLDPVAAGWPPCLRIMAATAMLVKDSAKLTLGQPLTVITPHTLEAIVRQPPDRWITNARLTHYQALLLDTDRVQFGPPVTLNPATLLPVPENQPSPHDCRQVLAETHGTREDLKDQELPDADHTWYTDGSSYLDSGTRRAGAAVVDGHNTIWAQSLPPGTSAQKAELIALTKALELSKGKKANIYTDSRYAFATAHTHGSIYERRGWLTSEGKEIKNKAEIIALLKALFLPQEVAIIHCPGHQKGQDPVAVGNRQADRVARQAAMAEVLTLATEPDNTSHITAGKRTADGSEFEKRTADGSEFESPKKKAKVE

SEQ ID NO: 1970 - protein, 2097 aa, synthetic construct
MPAAKRVKLDGGDKKYSIGLDIGTNSVGWAVITDEYKVPSKKFKVLGNTDRHSIKKNLIGALLFDSGETAEATRLKRTARRRYTRRKNRICYLQEIFSNEMAKVDDSFFHRLEESFLVEEDKKHERHPIFGNIVDEVAYHEKYPTIYHLRKKLVDSTDKADLRLIYLALAHMIKFRGHFLIEGDLNPDNSDVDKLFIQLVQTYNQLFEENPINASGVDAKAILSARLSKSRRLENLIAQLPGEKKNGLFGNLIALSLGLTPNFKSNFDLAEDAKLQLSKDTYDDDLDNLLAQIGDQYADLFLAAKNLSDAILLSDILRVNTEITKAPLSASMIKRYDEHHQDLTLLKALVRQQLPEKYKEIFFDQSKNGYAGYIDGGASQEEFYKFIKPILEKMDGTEELLVKLNREDLLRKQRTFDNGSIPHQIHLGELHAILRRQEDFYPFLKDNREKIEKILTFRIPYYVGPLARGNSRFAWMTRKSEETITPWNFEEVVDKGASAQSFIERMTNFDKNLPNEKVLPKHSLLYEYFTVYNELTKVKYVTEGMRKPAFLSGEQKKAIVDLLFKTNRKVTVKQLKEDYFKKIECFDSVEISGVEDRFNASLGTYHDLLKIIKDKDFLDNEENEDILEDIVLTLTLFEDREMIEERLKTYAHLFDDKVMKQLKRRRYTGWGRLSRKLINGIRDKQSGKTILDFLKSDGFANRNFMQLIHDDSLTFKEDIQKAQVSGQGDSLHEHIANLAGSPAIKKGILQTVKVVDELVKVMGRHKPENIVIEMARENQTTQKGQKNSRERMKRIEEGIKELGSQILKEHPVENTQLQNEKLYLYYLQNGRDMYVDQELDINRLSDYDVDHIVPQSFLKDDSIDNKVLTRSDKARGKSDNVPSEEVVKKMKNYWRQLLNAKLITQRKFDNLTKAERGGLSELDKAGFIKRQLVETRQITKHVAQILDSRMNTKYDENDKLIREVKVITLKSKLVSDFRKDFQFYKVREINNYHHAHDAYLNAVVGTALIKKYPKLESEFVYGDYKVYDVRKMIAKSEQEIGKATAKYFFYSNIMNFFKTEITLANGEIRKRPLIETNGETGEIVWDKGRDFATVRKVLSMPQVNIVKKTEVQTGGFSKESILPKRNSDKLIARKKDWDPKKYGGFDSPTVAYSVLVVAKVEKGKSKKLKSVKELLGITIMERSSFEKNPIDFLEAKGYKEVKKDLIIKLPKYSLFELENGRKRMLASAGELQKGNELALPSKYVNFLYLASHYEKLKGSPEDNEQKQLFVEQHKHYLDEIIEQISEFSKRVILADANLDKVLSAYNKHRDKPIREQAENIIHLFTLTNLGAPAAFKYFDTTIDRKRYTSTKEVLDATLIHQSITGLYETRIDLSQLGGDGGGSSGSSGGTVSLQDEHRLFDIPVTTSLPDVWLQDFPQAWAETGGLGRAKCQAPIIIDLKPTAVPVSIKQYPMSLEAHMGIRQHIIKFLELGVLRPCRSPWNTPLLPVKKPGTQDYRPVQDLREINKRTVDIHPTVPNPYNLLSTLKPDYSWYTVLDLKDAFFCLPLAPQSQELFAFEWKDPERGISGQLTWTRLPQGFKNSPTLFNEALHRDLTDFRTQHPEVTLLQYVDDLLLAAPTKKACTQGTRHLLQELGEKGYRASAKKAQICQTKVTYLGYILSEGKRWLTPGRIETVARIPPPRNPREVREFLGKAGFCRLFIPGFAELAAPLYALTKPSTPFTWQTEHQLAFEALKKALLSAPALGLPDTSKPFTLFLDERQGIAKGVLTQKLGPWKRPVAYLSKKLDPVAAGWPPCLRIMAATAMLVKDSAKLTLGQPLTVITPHTLEAIVRQPPDRWITNARLTHYQALLLDTDRVQFGPPVTLNPATLLPVPENQPSPHDCRQVLAETHGTREDLKDQELPDADHTWYTDGSSYLDSGTRRAGAAVVDGHNTIWAQSLPPGTSAQKAELIALTKALELSKGKKANIYTDSRYAFATAHTHGSIYERRGWLTSEGKEIKNKAEIIALLKALFLPQEVAIIHCPGHQKGQDPVAVGNRQADRVARQAAMAEVLTLATEPDNTSHITAGKRTADGSEFEKRTADGSEFESPKKKAKVE

SEQ ID NO: 1971 - protein, 2099 aa, synthetic construct
MPAAKRVKLDGGDKKYSIGLDIGTNSVGWAVITDEYKVPSKKFKVLGNTDRHSIKKNLIGALLFDSGETAEATRLKRTARRRYTRRKNRICYLQEIFSNEMAKVDDSFFHRLEESFLVEEDKKHERHPIFGNIVDEVAYHEKYPTIYHLRKKLVDSTDKADLRLIYLALAHMIKFRGHFLIEGDLNPDNSDVDKLFIQLVQTYNQLFEENPINASGVDAKAILSARLSKSRRLENLIAQLPGEKKNGLFGNLIALSLGLTPNFKSNFDLAEDAKLQLSKDTYDDDLDNLLAQIGDQYADLFLAAKNLSDAILLSDILRVNTEITKAPLSASMIKRYDEHHQDLTLLKALVRQQLPEKYKEIFFDQSKNGYAGYIDGGASQEEFYKFIKPILEKMDGTEELLVKLNREDLLRKQRTFDNGSIPHQIHLGELHAILRRQEDFYPFLKDNREKIEKILTFRIPYYVGPLARGNSRFAWMTRKSEETITPWNFEEVVDKGASAQSFIERMTNFDKNLPNEKVLPKHSLLYEYFTVYNELTKVKYVTEGMRKPAFLSGEQKKAIVDLLFKTNRKVTVKQLKEDYFKKIECFDSVEISGVEDRFNASLGTYHDLLKIIKDKDFLDNEENEDILEDIVLTLTLFEDREMIEERLKTYAHLFDDKVMKQLKRRRYTGWGRLSRKLINGIRDKQSGKTILDFLKSDGFANRNFMQLIHDDSLTFKEDIQKAQVSGQGDSLHEHIANLAGSPAIKKGILQTVKVVDELVKVMGRHKPENIVIEMARENQTTQKGQKNSRERMKRIEEGIKELGSQILKEHPVENTQLQNEKLYLYYLQNGRDMYVDQELDINRLSDYDVDHIVPQSFLKDDSIDNKVLTRSDKARGKSDNVPSEEVVKKMKNYWRQLLNAKLITQRKFDNLTKAERGGLSELDKAGFIKRQLVETRQITKHVAQILDSRMNTKYDENDKLIREVKVITLKSKLVSDFRKDFQFYKVREINNYHHAHDAYLNAVVGTALIKKYPKLESEFVYGDYKVYDVRKMIAKSEQEIGKATAKYFFYSNIMNFFKTEITLANGEIRKRPLIETNGETGEIVWDKGRDFATVRKVLSMPQVNIVKKTEVQTGGFSKESILPKRNSDKLIARKKDWDPKKYGGFDSPTVAYSVLVVAKVEKGKSKKLKSVKELLGITIMERSSFEKNPIDFLEAKGYKEVKKDLIIKLPKYSLFELENGRKRMLASAGELQKGNELALPSKYVNFLYLASHYEKLKGSPEDNEQKQLFVEQHKHYLDEIIEQISEFSKRVILADANLDKVLSAYNKHRDKPIREQAENIIHLFTLTNLGAPAAFKYFDTTIDRKRYTSTKEVLDATLIHQSITGLYETRIDLSQLGGDGGEAAAKGSSGGTVSLQDEHRLFDIPVTTSLPDVWLQDFPQAWAETGGLGRAKCQAPIIIDLKPTAVPVSIKQYPMSLEAHMGIRQHIIKFLELGVLRPCRSPWNTPLLPVKKPGTQDYRPVQDLREINKRTVDIHPTVPNPYNLLSTLKPDYSWYTVLDLKDAFFCLPLAPQSQELFAFEWKDPERGISGQLTWTRLPQGFKNSPTLFNEALHRDLTDFRTQHPEVTLLQYVDDLLLAAPTKKACTQGTRHLLQELGEKGYRASAKKAQICQTKVTYLGYILSEGKRWLTPGRIETVARIPPPRNPREVREFLGKAGFCRLFIPGFAELAAPLYALTKPSTPFTWQTEHQLAFEALKKALLSAPALGLPDTSKPFTLFLDERQGIAKGVLTQKLGPWKRPVAYLSKKLDPVAAGWPPCLRIMAATAMLVKDSAKLTLGQPLTVITPHTLEAIVRQPPDRWITNARLTHYQALLLDTDRVQFGPPVTLNPATLLPVPENQPSPHDCRQVLAETHGTREDLKDQELPDADHTWYTDGSSYLDSGTRRAGAAVVDGHNTIWAQSLPPGTSAQKAELIALTKALELSKGKKANIYTDSRYAFATAHTHGSIYERRGWLTSEGKEIKNKAEIIALLKALFLPQEVAIIHCPGHQKGQDPVAVGNRQADRVARQAAMAEVLTLATEPDNTSHITAGKRTADGSEFEKRTADGSEFESPKKKAKVE

SEQ ID NO: 1972 - protein, 2102 aa, synthetic construct
MPAAKRVKLDGGDKKYSIGLDIGTNSVGWAVITDEYKVPSKKFKVLGNTDRHSIKKNLIGALLFDSGETAEATRLKRTARRRYTRRKNRICYLQEIFSNEMAKVDDSFFHRLEESFLVEEDKKHERHPIFGNIVDEVAYHEKYPTIYHLRKKLVDSTDKADLRLIYLALAHMIKFRGHFLIEGDLNPDNSDVDKLFIQLVQTYNQLFEENPINASGVDAKAILSARLSKSRRLENLIAQLPGEKKNGLFGNLIALSLGLTPNFKSNFDLAEDAKLQLSKDTYDDDLDNLLAQIGDQYADLFLAAKNLSDAILLSDILRVNTEITKAPLSASMIKRYDEHHQDLTLLKALVRQQLPEKYKEIFFDQSKNGYAGYIDGGASQEEFYKFIKPILEKMDGTEELLVKLNREDLLRKQRTFDNGSIPHQIHLGELHAILRRQEDFYPFLKDNREKIEKILTFRIPYYVGPLARGNSRFAWMTRKSEETITPWNFEEVVDKGASAQSFIERMTNFDKNLPNEKVLPKHSLLYEYFTVYNELTKVKYVTEGMRKPAFLSGEQKKAIVDLLFKTNRKVTVKQLKEDYFKKIECFDSVEISGVEDRFNASLGTYHDLLKIIKDKDFLDNEENEDILEDIVLTLTLFEDREMIEERLKTYAHLFDDKVMKQLKRRRYTGWGRLSRKLINGIRDKQSGKTILDFLKSDGFANRNFMQLIHDDSLTFKEDIQKAQVSGQGDSLHEHIANLAGSPAIKKGILQTVKVVDELVKVMGRHKPENIVIEMARENQTTQKGQKNSRERMKRIEEGIKELGSQILKEHPVENTQLQNEKLYLYYLQNGRDMYVDQELDINRLSDYDVDHIVPQSFLKDDSIDNKVLTRSDKARGKSDNVPSEEVVKKMKNYWRQLLNAKLITQRKFDNLTKAERGGLSELDKAGFIKRQLVETRQITKHVAQILDSRMNTKYDENDKLIREVKVITLKSKLVSDFRKDFQFYKVREINNYHHAHDAYLNAVVGTALIKKYPKLESEFVYGDYKVYDVRKMIAKSEQEIGKATAKYFFYSNIMNFFKTEITLANGEIRKRPLIETNGETGEIVWDKGRDFATVRKVLSMPQVNIVKKTEVQTGGFSKESILPKRNSDKLIARKKDWDPKKYGGFDSPTVAYSVLVVAKVEKGKSKKLKSVKELLGITIMERSSFEKNPIDFLEAKGYKEVKKDLIIKLPKYSLFELENGRKRMLASAGELQKGNELALPSKYVNFLYLASHYEKLKGSPEDNEQKQLFVEQHKHYLDEIIEQISEFSKRVILADANLDKVLSAYNKHRDKPIREQAENIIHLFTLTNLGAPAAFKYFDTTIDRKRYTSTKEVLDATLIHQSITGLYETRIDLSQLGGDGGGSSEAAAKGGGGGTVSLQDEHRLFDIPVTTSLPDVWLQDFPQAWAETGGLGRAKCQAPIIIDLKPTAVPVSIKQYPMSLEAHMGIRQHIIKFLELGVLRPCRSPWNTPLLPVKKPGTQDYRPVQDLREINKRTVDIHPTVPNPYNLLSTLKPDYSWYTVLDLKDAFFCLPLAPQSQELFAFEWKDPERGISGQLTWTRLPQGFKNSPTLFNEALHRDLTDFRTQHPEVTLLQYVDDLLLAAPTKKACTQGTRHLLQELGEKGYRASAKKAQICQTKVTYLGYILSEGKRWLTPGRIETVARIPPPRNPREVREFLGKAGFCRLFIPGFAELAAPLYALTKPSTPFTWQTEHQLAFEALKKALLSAPALGLPDTSKPFTLFLDERQGIAKGVLTQKLGPWKRPVAYLSKKLDPVAAGWPPCLRIMAATAMLVKDSAKLTLGQPLTVITPHTLEAIVRQPPDRWITNARLTHYQALLLDTDRVQFGPPVTLNPATLLPVPENQPSPHDCRQVLAETHGTREDLKDQELPDADHTWYTDGSSYLDSGTRRAGAAVVDGHNTIWAQSLPPGTSAQKAELIALTKALELSKGKKANIYTDSRYAFATAHTHGSIYERRGWLTSEGKEIKNKAEIIALLKALFLPQEVAIIHCPGHQKGQDPVAVGNRQADRVARQAAMAEVLTLATEPDNTSHITAGKRTADGSEFEKRTADGSEFESPKKKAKVE

SEQ ID NO: 1973 - protein, 2102 aa, synthetic construct
MPAAKRVKLDGGDKKYSIGLDIGTNSVGWAVITDEYKVPSKKFKVLGNTDRHSIKKNLIGALLFDSGETAEATRLKRTARRRYTRRKNRICYLQEIFSNEMAKVDDSFFHRLEESFLVEEDKKHERHPIFGNIVDEVAYHEKYPTIYHLRKKLVDSTDKADLRLIYLALAHMIKFRGHFLIEGDLNPDNSDVDKLFIQLVQTYNQLFEENPINASGVDAKAILSARLSKSRRLENLIAQLPGEKKNGLFGNLIALSLGLTPNFKSNFDLAEDAKLQLSKDTYDDDLDNLLAQIGDQYADLFLAAKNLSDAILLSDILRVNTEITKAPLSASMIKRYDEHHQDLTLLKALVRQQLPEKYKEIFFDQSKNGYAGYIDGGASQEEFYKFIKPILEKMDGTEELLVKLNREDLLRKQRTFDNGSIPHQIHLGELHAILRRQEDFYPFLKDNREKIEKILTFRIPYYVGPLARGNSRFAWMTRKSEETITPWNFEEVVDKGASAQSFIERMTNFDKNLPNEKVLPKHSLLYEYFTVYNELTKVKYVTEGMRKPAFLSGEQKKAIVDLLFKTNRKVTVKQLKEDYFKKIECFDSVEISGVEDRFNASLGTYHDLLKIIKDKDFLDNEENEDILEDIVLTLTLFEDREMIEERLKTYAHLFDDKVMKQLKRRRYTGWGRLSRKLINGIRDKQSGKTILDFLKSDGFANRNFMQLIHDDSLTFKEDIQKAQVSGQGDSLHEHIANLAGSPAIKKGILQTVKVVDELVKVMGRHKPENIVIEMARENQTTQKGQKNSRERMKRIEEGIKELGSQILKEHPVENTQLQNEKLYLYYLQNGRDMYVDQELDINRLSDYDVDHIVPQSFLKDDSIDNKVLTRSDKARGKSDNVPSEEVVKKMKNYWRQLLNAKLITQRKFDNLTKAERGGLSELDKAGFIKRQLVETRQITKHVAQILDSRMNTKYDENDKLIREVKVITLKSKLVSDFRKDFQFYKVREINNYHHAHDAYLNAVVGTALIKKYPKLESEFVYGDYKVYDVRKMIAKSEQEIGKATAKYFFYSNIMNFFKTEITLANGEIRKRPLIETNGETGEIVWDKGRDFATVRKVLSMPQVNIVKKTEVQTGGFSKESILPKRNSDKLIARKKDWDPKKYGGFDSPTVAYSVLVVAKVEKGKSKKLKSVKELLGITIMERSSFEKNPIDFLEAKGYKEVKKDLIIKLPKYSLFELENGRKRMLASAGELQKGNELALPSKYVNFLYLASHYEKLKGSPEDNEQKQLFVEQHKHYLDEIIEQISEFSKRVILADANLDKVLSAYNKHRDKPIREQAENIIHLFTLTNLGAPAAFKYFDTTIDRKRYTSTKEVLDATLIHQSITGLYETRIDLSQLGGDGGPAPEAAAKGGGGGTVSLQDEHRLFDIPVTTSLPDVWLQDFPQAWAETGGLGRAKCQAPIIIDLKPTAVPVSIKQYPMSLEAHMGIRQHIIKFLELGVLRPCRSPWNTPLLPVKKPGTQDYRPVQDLREINKRTVDIHPTVPNPYNLLSTLKPDYSWYTVLDLKDAFFCLPLAPQSQELFAFEWKDPERGISGQLTWTRLPQGFKNSPTLFNEALHRDLTDFRTQHPEVTLLQYVDDLLLAAPTKKACTQGTRHLLQELGEKGYRASAKKAQICQTKVTYLGYILSEGKRWLTPGRIETVARIPPPRNPREVREFLGKAGFCRLFIPGFAELAAPLYALTKPSTPFTWQTEHQLAFEALKKALLSAPALGLPDTSKPFTLFLDERQGIAKGVLTQKLGPWKRPVAYLSKKLDPVAAGWPPCLRIMAATAMLVKDSAKLTLGQPLTVITPHTLEAIVRQPPDRWITNARLTHYQALLLDTDRVQFGPPVTLNPATLLPVPENQPSPHDCRQVLAETHGTREDLKDQELPDADHTWYTDGSSYLDSGTRRAGAAVVDGHNTIWAQSLPPGTSAQKAELIALTKALELSKGKKANIYTDSRYAFATAHTHGSIYERRGWLTSEGKEIKNKAEIIALLKALFLPQEVAIIHCPGHQKGQDPVAVGNRQADRVARQAAMAEVLTLATEPDNTSHITAGKRTADGSEFEKRTADGSEFESPKKKAKVE

SEQ ID NO: 1974 - protein, 2100 aa, synthetic construct
MPAAKRVKLDGGDKKYSIGLDIGTNSVGWAVITDEYKVPSKKFKVLGNTDRHSIKKNLIGALLFDSGETAEATRLKRTARRRYTRRKNRICYLQEIFSNEMAKVDDSFFHRLEESFLVEEDKKHERHPIFGNIVDEVAYHEKYPTIYHLRKKLVDSTDKADLRLIYLALAHMIKFRGHFLIEGDLNPDNSDVDKLFIQLVQTYNQLFEENPINASGVDAKAILSARLSKSRRLENLIAQLPGEKKNGLFGNLIALSLGLTPNFKSNFDLAEDAKLQLSKDTYDDDLDNLLAQIGDQYADLFLAAKNLSDAILLSDILRVNTEITKAPLSASMIKRYDEHHQDLTLLKALVRQQLPEKYKEIFFDQSKNGYAGYIDGGASQEEFYKFIKPILEKMDGTEELLVKLNREDLLRKQRTFDNGSIPHQIHLGELHAILRRQEDFYPFLKDNREKIEKILTFRIPYYVGPLARGNSRFAWMTRKSEETITPWNFEEVVDKGASAQSFIERMTNFDKNLPNEKVLPKHSLLYEYFTVYNELTKVKYVTEGMRKPAFLSGEQKKAIVDLLFKTNRKVTVKQLKEDYFKKIECFDSVEISGVEDRFNASLGTYHDLLKIIKDKDFLDNEENEDILEDIVLTLTLFEDREMIEERLKTYAHLFDDKVMKQLKRRRYTGWGRLSRKLINGIRDKQSGKTILDFLKSDGFANRNFMQLIHDDSLTFKEDIQKAQVSGQGDSLHEHIANLAGSPAIKKGILQTVKVVDELVKVMGRHKPENIVIEMARENQTTQKGQKNSRERMKRIEEGIKELGSQILKEHPVENTQLQNEKLYLYYLQNGRDMYVDQELDINRLSDYDVDHIVPQSFLKDDSIDNKVLTRSDKARGKSDNVPSEEVVKKMKNYWRQLLNAKLITQRKFDNLTKAERGGLSELDKAGFIKRQLVETRQITKHVAQILDSRMNTKYDENDKLIREVKVITLKSKLVSDFRKDFQFYKVREINNYHHAHDAYLNAVVGTALIKKYPKLESEFVYGDYKVYDVRKMIAKSEQEIGKATAKYFFYSNIMNFFKTEITLANGEIRKRPLIETNGETGEIVWDKGRDFATVRKVLSMPQVNIVKKTEVQTGGFSKESILPKRNSDKLIARKKDWDPKKYGGFDSPTVAYSVLVVAKVEKGKSKKLKSVKELLGITIMERSSFEKNPIDFLEAKGYKEVKKDLIIKLPKYSLFELENGRKRMLASAGELQKGNELALPSKYVNFLYLASHYEKLKGSPEDNEQKQLFVEQHKHYLDEIIEQISEFSKRVILADANLDKVLSAYNKHRDKPIREQAENIIHLFTLTNLGAPAAFKYFDTTIDRKRYTSTKEVLDATLIHQSITGLYETRIDLSQLGGDGGGGSGSSGGGGGTVSLQDEHRLFDIPVTTSLPDVWLQDFPQAWAETGGLGRAKCQAPIIIDLKPTAVPVSIKQYPMSLEAHMGIRQHIIKFLELGVLRPCRSPWNTPLLPVKKPGTQDYRPVQDLREINKRTVDIHPTVPNPYNLLSTLKPDYSWYTVLDLKDAFFCLPLAPQSQELFAFEWKDPERGISGQLTWTRLPQGFKNSPTLFNEALHRDLTDFRTQHPEVTLLQYVDDLLLAAPTKKACTQGTRHLLQELGEKGYRASAKKAQICQTKVTYLGYILSEGKRWLTPGRIETVARIPPPRNPREVREFLGKAGFCRLFIPGFAELAAPLYALTKPSTPFTWQTEHQLAFEALKKALLSAPALGLPDTSKPFTLFLDERQGIAKGVLTQKLGPWKRPVAYLSKKLDPVAAGWPPCLRIMAATAMLVKDSAKLTLGQPLTVITPHTLEAIVRQPPDRWITNARLTHYQALLLDTDRVQFGPPVTLNPATLLPVPENQPSPHDCRQVLAETHGTREDLKDQELPDADHTWYTDGSSYLDSGTRRAGAAVVDGHNTIWAQSLPPGTSAQKAELIALTKALELSKGKKANIYTDSRYAFATAHTHGSIYERRGWLTSEGKEIKNKAEIIALLKALFLPQEVAIIHCPGHQKGQDPVAVGNRQADRVARQAAMAEVLTLATEPDNTSHITAGKRTADGSEFEKRTADGSEFESPKKKAKVE

SEQ ID NO: 1975 - protein, 2102 aa, synthetic construct
MPAAKRVKLDGGDKKYSIGLDIGTNSVGWAVITDEYKVPSKKFKVLGNTDRHSIKKNLIGALLFDSGETAEATRLKRTARRRYTRRKNRICYLQEIFSNEMAKVDDSFFHRLEESFLVEEDKKHERHPIFGNIVDEVAYHEKYPTIYHLRKKLVDSTDKADLRLIYLALAHMIKFRGHFLIEGDLNPDNSDVDKLFIQLVQTYNQLFEENPINASGVDAKAILSARLSKSRRLENLIAQLPGEKKNGLFGNLIALSLGLTPNFKSNFDLAEDAKLQLSKDTYDDDLDNLLAQIGDQYADLFLAAKNLSDAILLSDILRVNTEITKAPLSASMIKRYDEHHQDLTLLKALVRQQLPEKYKEIFFDQSKNGYAGYIDGGASQEEFYKFIKPILEKMDGTEELLVKLNREDLLRKQRTFDNGSIPHQIHLGELHAILRRQEDFYPFLKDNREKIEKILTFRIPYYVGPLARGNSRFAWMTRKSEETITPWNFEEVVDKGASAQSFIERMTNFDKNLPNEKVLPKHSLLYEYFTVYNELTKVKYVTEGMRKPAFLSGEQKKAIVDLLFKTNRKVTVKQLKEDYFKKIECFDSVEISGVEDRFNASLGTYHDLLKIIKDKDFLDNEENEDILEDIVLTLTLFEDREMIEERLKTYAHLFDDKVMKQLKRRRYTGWGRLSRKLINGIRDKQSGKTILDFLKSDGFANRNFMQLIHDDSLTFKEDIQKAQVSGQGDSLHEHIANLAGSPAIKKGILQTVKVVDELVKVMGRHKPENIVIEMARENQTTQKGQKNSRERMKRIEEGIKELGSQILKEHPVENTQLQNEKLYLYYLQNGRDMYVDQELDINRLSDYDVDHIVPQSFLKDDSIDNKVLTRSDKARGKSDNVPSEEVVKKMKNYWRQLLNAKLITQRKFDNLTKAERGGLSELDKAGFIKRQLVETRQITKHVAQILDSRMNTKYDENDKLIREVKVITLKSKLVSDFRKDFQFYKVREINNYHHAHDAYLNAVVGTALIKKYPKLESEFVYGDYKVYDVRKMIAKSEQEIGKATAKYFFYSNIMNFFKTEITLANGEIRKRPLIETNGETGEIVWDKGRDFATVRKVLSMPQVNIVKKTEVQTGGFSKESILPKRNSDKLIARKKDWDPKKYGGFDSPTVAYSVLVVAKVEKGKSKKLKSVKELLGITIMERSSFEKNPIDFLEAKGYKEVKKDLIIKLPKYSLFELENGRKRMLASAGELQKGNELALPSKYVNFLYLASHYEKLKGSPEDNEQKQLFVEQHKHYLDEIIEQISEFSKRVILADANLDKVLSAYNKHRDKPIREQAENIIHLFTLTNLGAPAAFKYFDTTIDRKRYTSTKEVLDATLIHQSITGLYETRIDLSQLGGDGGGGGGSSEAAAKGGTVSLQDEHRLFDIPVTTSLPDVWLQDFPQAWAETGGLGRAKCQAPIIIDLKPTAVPVSIKQYPMSLEAHMGIRQHIIKFLELGVLRPCRSPWNTPLLPVKKPGTQDYRPVQDLREINKRTVDIHPTVPNPYNLLSTLKPDYSWYTVLDLKDAFFCLPLAPQSQELFAFEWKDPERGISGQLTWTRLPQGFKNSPTLFNEALHRDLTDFRTQHPEVTLLQYVDDLLLAAPTKKACTQGTRHLLQELGEKGYRASAKKAQICQTKVTYLGYILSEGKRWLTPGRIETVARIPPPRNPREVREFLGKAGFCRLFIPGFAELAAPLYALTKPSTPFTWQTEHQLAFEALKKALLSAPALGLPDTSKPFTLFLDERQGIAKGVLTQKLGPWKRPVAYLSKKLDPVAAGWPPCLRIMAATAMLVKDSAKLTLGQPLTVITPHTLEAIVRQPPDRWITNARLTHYQALLLDTDRVQFGPPVTLNPATLLPVPENQPSPHDCRQVLAETHGTREDLKDQELPDADHTWYTDGSSYLDSGTRRAGAAVVDGHNTIWAQSLPPGTSAQKAELIALTKALELSKGKKANIYTDSRYAFATAHTHGSIYERRGWLTSEGKEIKNKAEIIALLKALFLPQEVAIIHCPGHQKGQDPVAVGNRQADRVARQAAMAEVLTLATEPDNTSHITAGKRTADGSEFEKRTADGSEFESPKKKAKVE

SEQ ID NO: 1976 - protein, 2100 aa, synthetic construct
MPAAKRVKLDGGDKKYSIGLDIGTNSVGWAVITDEYKVPSKKFKVLGNTDRHSIKKNLIGALLFDSGETAEATRLKRTARRRYTRRKNRICYLQEIFSNEMAKVDDSFFHRLEESFLVEEDKKHERHPIFGNIVDEVAYHEKYPTIYHLRKKLVDSTDKADLRLIYLALAHMIKFRGHFLIEGDLNPDNSDVDKLFIQLVQTYNQLFEENPINASGVDAKAILSARLSKSRRLENLIAQLPGEKKNGLFGNLIALSLGLTPNFKSNFDLAEDAKLQLSKDTYDDDLDNLLAQIGDQYADLFLAAKNLSDAILLSDILRVNTEITKAPLSASMIKRYDEHHQDLTLLKALVRQQLPEKYKEIFFDQSKNGYAGYIDGGASQEEFYKFIKPILEKMDGTEELLVKLNREDLLRKQRTFDNGSIPHQIHLGELHAILRRQEDFYPFLKDNREKIEKILTFRIPYYVGPLARGNSRFAWMTRKSEETITPWNFEEVVDKGASAQSFIERMTNFDKNLPNEKVLPKHSLLYEYFTVYNELTKVKYVTEGMRKPAFLSGEQKKAIVDLLFKTNRKVTVKQLKEDYFKKIECFDSVEISGVEDRFNASLGTYHDLLKIIKDKDFLDNEENEDILEDIVLTLTLFEDREMIEERLKTYAHLFDDKVMKQLKRRRYTGWGRLSRKLINGIRDKQSGKTILDFLKSDGFANRNFMQLIHDDSLTFKEDIQKAQVSGQGDSLHEHIANLAGSPAIKKGILQTVKVVDELVKVMGRHKPENIVIEMARENQTTQKGQKNSRERMKRIEEGIKELGSQILKEHPVENTQLQNEKLYLYYLQNGRDMYVDQELDINRLSDYDVDHIVPQSFLKDDSIDNKVLTRSDKARGKSDNVPSEEVVKKMKNYWRQLLNAKLITQRKFDNLTKAERGGLSELDKAGFIKRQLVETRQITKHVAQILDSRMNTKYDENDKLIREVKVITLKSKLVSDFRKDFQFYKVREINNYHHAHDAYLNAVVGTALIKKYPKLESEFVYGDYKVYDVRKMIAKSEQEIGKATAKYFFYSNIMNFFKTEITLANGEIRKRPLIETNGETGEIVWDKGRDFATVRKVLSMPQVNIVKKTEVQTGGFSKESILPKRNSDKLIARKKDWDPKKYGGFDSPTVAYSVLVVAKVEKGKSKKLKSVKELLGITIMERSSFEKNPIDFLEAKGYKEVKKDLIIKLPKYSLFELENGRKRMLASAGELQKGNELALPSKYVNFLYLASHYEKLKGSPEDNEQKQLFVEQHKHYLDEIIEQISEFSKRVILADANLDKVLSAYNKHRDKPIREQAENIIHLFTLTNLGAPAAFKYFDTTIDRKRYTSTKEVLDATLIHQSITGLYETRIDLSQLGGDGGGGSPAPGGGGGTVSLQDEHRLFDIPVTTSLPDVWLQDFPQAWAETGGLGRAKCQAPIIIDLKPTAVPVSIKQYPMSLEAHMGIRQHIIKFLELGVLRPCRSPWNTPLLPVKKPGTQDYRPVQDLREINKRTVDIHPTVPNPYNLLSTLKPDYSWYTVLDLKDAFFCLPLAPQSQELFAFEWKDPERGISGQLTWTRLPQGFKNSPTLFNEALHRDLTDFRTQHPEVTLLQYVDDLLLAAPTKKACTQGTRHLLQELGEKGYRASAKKAQICQTKVTYLGYILSEGKRWLTPGRIETVARIPPPRNPREVREFLGKAGFCRLFIPGFAELAAPLYALTKPSTPFTWQTEHQLAFEALKKALLSAPALGLPDTSKPFTLFLDERQGIAKGVLTQKLGPWKRPVAYLSKKLDPVAAGWPPCLRIMAATAMLVKDSAKLTLGQPLTVITPHTLEAIVRQPPDRWITNARLTHYQALLLDTDRVQFGPPVTLNPATLLPVPENQPSPHDCRQVLAETHGTREDLKDQELPDADHTWYTDGSSYLDSGTRRAGAAVVDGHNTIWAQSLPPGTSAQKAELIALTKALELSKGKKANIYTDSRYAFATAHTHGSIYERRGWLTSEGKEIKNKAEIIALLKALFLPQEVAIIHCPGHQKGQDPVAVGNRQADRVARQAAMAEVLTLATEPDNTSHITAGKRTADGSEFEKRTADGSEFESPKKKAKVE

SEQ ID NO: 1977 - protein, 2102 aa, synthetic construct
MPAAKRVKLDGGDKKYSIGLDIGTNSVGWAVITDEYKVPSKKFKVLGNTDRHSIKKNLIGALLFDSGETAEATRLKRTARRRYTRRKNRICYLQEIFSNEMAKVDDSFFHRLEESFLVEEDKKHERHPIFGNIVDEVAYHEKYPTIYHLRKKLVDSTDKADLRLIYLALAHMIKFRGHFLIEGDLNPDNSDVDKLFIQLVQTYNQLFEENPINASGVDAKAILSARLSKSRRLENLIAQLPGEKKNGLFGNLIALSLGLTPNFKSNFDLAEDAKLQLSKDTYDDDLDNLLAQIGDQYADLFLAAKNLSDAILLSDILRVNTEITKAPLSASMIKRYDEHHQDLTLLKALVRQQLPEKYKEIFFDQSKNGYAGYIDGGASQEEFYKFIKPILEKMDGTEELLVKLNREDLLRKQRTFDNGSIPHQIHLGELHAILRRQEDFYPFLKDNREKIEKILTFRIPYYVGPLARGNSRFAWMTRKSEETITPWNFEEVVDKGASAQSFIERMTNFDKNLPNEKVLPKHSLLYEYFTVYNELTKVKYVTEGMRKPAFLSGEQKKAIVDLLFKTNRKVTVKQLKEDYFKKIECFDSVEISGVEDRFNASLGTYHDLLKIIKDKDFLDNEENEDILEDIVLTLTLFEDREMIEERLKTYAHLFDDKVMKQLKRRRYTGWGRLSRKLINGIRDKQSGKTILDFLKSDGFANRNFMQLIHDDSLTFKEDIQKAQVSGQGDSLHEHIANLAGSPAIKKGILQTVKVVDELVKVMGRHKPENIVIEMARENQTTQKGQKNSRERMKRIEEGIKELGSQILKEHPVENTQLQNEKLYLYYLQNGRDMYVDQELDINRLSDYDVDHIVPQSFLKDDSIDNKVLTRSDKARGKSDNVPSEEVVKKMKNYWRQLLNAKLITQRKFDNLTKAERGGLSELDKAGFIKRQLVETRQITKHVAQILDSRMNTKYDENDKLIREVKVITLKSKLVSDFRKDFQFYKVREINNYHHAHDAYLNAVVGTALIKKYPKLESEFVYGDYKVYDVRKMIAKSEQEIGKATAKYFFYSNIMNFFKTEITLANGEIRKRPLIETNGETGEIVWDKGRDFATVRKVLSMPQVNIVKKTEVQTGGFSKESILPKRNSDKLIARKKDWDPKKYGGFDSPTVAYSVLVVAKVEKGKSKKLKSVKELLGITIMERSSFEKNPIDFLEAKGYKEVKKDLIIKLPKYSLFELENGRKRMLASAGELQKGNELALPSKYVNFLYLASHYEKLKGSPEDNEQKQLFVEQHKHYLDEIIEQISEFSKRVILADANLDKVLSAYNKHRDKPIREQAENIIHLFTLTNLGAPAAFKYFDTTIDRKRYTSTKEVLDATLIHQSITGLYETRIDLSQLGGDGGPAPGGGEAAAKGGTVSLQDEHRLFDIPVTTSLPDVWLQDFPQAWAETGGLGRAKCQAPIIIDLKPTAVPVSIKQYPMSLEAHMGIRQHIIKFLELGVLRPCRSPWNTPLLPVKKPGTQDYRPVQDLREINKRTVDIHPTVPNPYNLLSTLKPDYSWYTVLDLKDAFFCLPLAPQSQELFAFEWKDPERGISGQLTWTRLPQGFKNSPTLFNEALHRDLTDFRTQHPEVTLLQYVDDLLLAAPTKKACTQGTRHLLQELGEKGYRASAKKAQICQTKVTYLGYILSEGKRWLTPGRIETVARIPPPRNPREVREFLGKAGFCRLFIPGFAELAAPLYALTKPSTPFTWQTEHQLAFEALKKALLSAPALGLPDTSKPFTLFLDERQGIAKGVLTQKLGPWKRPVAYLSKKLDPVAAGWPPCLRIMAATAMLVKDSAKLTLGQPLTVITPHTLEAIVRQPPDRWITNARLTHYQALLLDTDRVQFGPPVTLNPATLLPVPENQPSPHDCRQVLAETHGTREDLKDQELPDADHTWYTDGSSYLDSGTRRAGAAVVDGHNTIWAQSLPPGTSAQKAELIALTKALELSKGKKANIYTDSRYAFATAHTHGSIYERRGWLTSEGKEIKNKAEIIALLKALFLPQEVAIIHCPGHQKGQDPVAVGNRQADRVARQAAMAEVLTLATEPDNTSHITAGKRTADGSEFEKRTADGSEFESPKKKAKVE

SEQ ID NO: 1978 - protein, 2100 aa, synthetic construct
MPAAKRVKLDGGDKKYSIGLDIGTNSVGWAVITDEYKVPSKKFKVLGNTDRHSIKKNLIGALLFDSGETAEATRLKRTARRRYTRRKNRICYLQEIFSNEMAKVDDSFFHRLEESFLVEEDKKHERHPIFGNIVDEVAYHEKYPTIYHLRKKLVDSTDKADLRLIYLALAHMIKFRGHFLIEGDLNPDNSDVDKLFIQLVQTYNQLFEENPINASGVDAKAILSARLSKSRRLENLIAQLPGEKKNGLFGNLIALSLGLTPNFKSNFDLAEDAKLQLSKDTYDDDLDNLLAQIGDQYADLFLAAKNLSDAILLSDILRVNTEITKAPLSASMIKRYDEHHQDLTLLKALVRQQLPEKYKEIFFDQSKNGYAGYIDGGASQEEFYKFIKPILEKMDGTEELLVKLNREDLLRKQRTFDNGSIPHQIHLGELHAILRRQEDFYPFLKDNREKIEKILTFRIPYYVGPLARGNSRFAWMTRKSEETITPWNFEEVVDKGASAQSFIERMTNFDKNLPNEKVLPKHSLLYEYFTVYNELTKVKYVTEGMRKPAFLSGEQKKAIVDLLFKTNRKVTVKQLKEDYFKKIECFDSVEISGVEDRFNASLGTYHDLLKIIKDKDFLDNEENEDILEDIVLTLTLFEDREMIEERLKTYAHLFDDKVMKQLKRRRYTGWGRLSRKLINGIRDKQSGKTILDFLKSDGFANRNFMQLIHDDSLTFKEDIQKAQVSGQGDSLHEHIANLAGSPAIKKGILQTVKVVDELVKVMGRHKPENIVIEMARENQTTQKGQKNSRERMKRIEEGIKELGSQILKEHPVENTQLQNEKLYLYYLQNGRDMYVDQELDINRLSDYDVDHIVPQSFLKDDSIDNKVLTRSDKARGKSDNVPSEEVVKKMKNYWRQLLNAKLITQRKFDNLTKAERGGLSELDKAGFIKRQLVETRQITKHVAQILDSRMNTKYDENDKLIREVKVITLKSKLVSDFRKDFQFYKVREINNYHHAHDAYLNAVVGTALIKKYPKLESEFVYGDYKVYDVRKMIAKSEQEIGKATAKYFFYSNIMNFFKTEITLANGEIRKRPLIETNGETGEIVWDKGRDFATVRKVLSMPQVNIVKKTEVQTGGFSKESILPKRNSDKLIARKKDWDPKKYGGFDSPTVAYSVLVVAKVEKGKSKKLKSVKELLGITIMERSSFEKNPIDFLEAKGYKEVKKDLIIKLPKYSLFELENGRKRMLASAGELQKGNELALPSKYVNFLYLASHYEKLKGSPEDNEQKQLFVEQHKHYLDEIIEQISEFSKRVILADANLDKVLSAYNKHRDKPIREQAENIIHLFTLTNLGAPAAFKYFDTTIDRKRYTSTKEVLDATLIHQSITGLYETRIDLSQLGGDGGPAPAPAPAPGGTVSLQDEHRLFDIPVTTSLPDVWLQDFPQAWAETGGLGRAKCQAPIIIDLKPTAVPVSIKQYPMSLEAHMGIRQHIIKFLELGVLRPCRSPWNTPLLPVKKPGTQDYRPVQDLREINKRTVDIHPTVPNPYNLLSTLKPDYSWYTVLDLKDAFFCLPLAPQSQELFAFEWKDPERGISGQLTWTRLPQGFKNSPTLFNEALHRDLTDFRTQHPEVTLLQYVDDLLLAAPTKKACTQGTRHLLQELGEKGYRASAKKAQICQTKVTYLGYILSEGKRWLTPGRIETVARIPPPRNPREVREFLGKAGFCRLFIPGFAELAAPLYALTKPSTPFTWQTEHQLAFEALKKALLSAPALGLPDTSKPFTLFLDERQGIAKGVLTQKLGPWKRPVAYLSKKLDPVAAGWPPCLRIMAATAMLVKDSAKLTLGQPLTVITPHTLEAIVRQPPDRWITNARLTHYQALLLDTDRVQFGPPVTLNPATLLPVPENQPSPHDCRQVLAETHGTREDLKDQELPDADHTWYTDGSSYLDSGTRRAGAAVVDGHNTIWAQSLPPGTSAQKAELIALTKALELSKGKKANIYTDSRYAFATAHTHGSIYERRGWLTSEGKEIKNKAEIIALLKALFLPQEVAIIHCPGHQKGQDPVAVGNRQADRVARQAAMAEVLTLATEPDNTSHITAGKRTADGSEFEKRTADGSEFESPKKKAKVE

SEQ ID NO: 1979 - protein, 2099 aa, synthetic construct
MPAAKRVKLDGGDKKYSIGLDIGTNSVGWAVITDEYKVPSKKFKVLGNTDRHSIKKNLIGALLFDSGETAEATRLKRTARRRYTRRKNRICYLQEIFSNEMAKVDDSFFHRLEESFLVEEDKKHERHPIFGNIVDEVAYHEKYPTIYHLRKKLVDSTDKADLRLIYLALAHMIKFRGHFLIEGDLNPDNSDVDKLFIQLVQTYNQLFEENPINASGVDAKAILSARLSKSRRLENLIAQLPGEKKNGLFGNLIALSLGLTPNFKSNFDLAEDAKLQLSKDTYDDDLDNLLAQIGDQYADLFLAAKNLSDAILLSDILRVNTEITKAPLSASMIKRYDEHHQDLTLLKALVRQQLPEKYKEIFFDQSKNGYAGYIDGGASQEEFYKFIKPILEKMDGTEELLVKLNREDLLRKQRTFDNGSIPHQIHLGELHAILRRQEDFYPFLKDNREKIEKILTFRIPYYVGPLARGNSRFAWMTRKSEETITPWNFEEVVDKGASAQSFIERMTNFDKNLPNEKVLPKHSLLYEYFTVYNELTKVKYVTEGMRKPAFLSGEQKKAIVDLLFKTNRKVTVKQLKEDYFKKIECFDSVEISGVEDRFNASLGTYHDLLKIIKDKDFLDNEENEDILEDIVLTLTLFEDREMIEERLKTYAHLFDDKVMKQLKRRRYTGWGRLSRKLINGIRDKQSGKTILDFLKSDGFANRNFMQLIHDDSLTFKEDIQKAQVSGQGDSLHEHIANLAGSPAIKKGILQTVKVVDELVKVMGRHKPENIVIEMARENQTTQKGQKNSRERMKRIEEGIKELGSQILKEHPVENTQLQNEKLYLYYLQNGRDMYVDQELDINRLSDYDVDHIVPQSFLKDDSIDNKVLTRSDKARGKSDNVPSEEVVKKMKNYWRQLLNAKLITQRKFDNLTKAERGGLSELDKAGFIKRQLVETRQITKHVAQILDSRMNTKYDENDKLIREVKVITLKSKLVSDFRKDFQFYKVREINNYHHAHDAYLNAVVGTALIKKYPKLESEFVYGDYKVYDVRKMIAKSEQEIGKATAKYFFYSNIMNFFKTEITLANGEIRKRPLIETNGETGEIVWDKGRDFATVRKVLSMPQVNIVKKTEVQTGGFSKESILPKRNSDKLIARKKDWDPKKYGGFDSPTVAYSVLVVAKVEKGKSKKLKSVKELLGITIMERSSFEKNPIDFLEAKGYKEVKKDLIIKLPKYSLFELENGRKRMLASAGELQKGNELALPSKYVNFLYLASHYEKLKGSPEDNEQKQLFVEQHKHYLDEIIEQISEFSKRVILADANLDKVLSAYNKHRDKPIREQAENIIHLFTLTNLGAPAAFKYFDTTIDRKRYTSTKEVLDATLIHQSITGLYETRIDLSQLGGDGGGGGGGGGGGGTVSLQDEHRLFDIPVTTSLPDVWLQDFPQAWAETGGLGRAKCQAPIIIDLKPTAVPVSIKQYPMSLEAHMGIRQHIIKFLELGVLRPCRSPWNTPLLPVKKPGTQDYRPVQDLREINKRTVDIHPTVPNPYNLLSTLKPDYSWYTVLDLKDAFFCLPLAPQSQELFAFEWKDPERGISGQLTWTRLPQGFKNSPTLFNEALHRDLTDFRTQHPEVTLLQYVDDLLLAAPTKKACTQGTRHLLQELGEKGYRASAKKAQICQTKVTYLGYILSEGKRWLTPGRIETVARIPPPRNPREVREFLGKAGFCRLFIPGFAELAAPLYALTKPSTPFTWQTEHQLAFEALKKALLSAPALGLPDTSKPFTLFLDERQGIAKGVLTQKLGPWKRPVAYLSKKLDPVAAGWPPCLRIMAATAMLVKDSAKLTLGQPLTVITPHTLEAIVRQPPDRWITNARLTHYQALLLDTDRVQFGPPVTLNPATLLPVPENQPSPHDCRQVLAETHGTREDLKDQELPDADHTWYTDGSSYLDSGTRRAGAAVVDGHNTIWAQSLPPGTSAQKAELIALTKALELSKGKKANIYTDSRYAFATAHTHGSIYERRGWLTSEGKEIKNKAEIIALLKALFLPQEVAIIHCPGHQKGQDPVAVGNRQADRVARQAAMAEVLTLATEPDNTSHITAGKRTADGSEFEKRTADGSEFESPKKKAKVE

SEQ ID NO: 1980 - protein, 2107 aa, synthetic construct
MPAAKRVKLDGGDKKYSIGLDIGTNSVGWAVITDEYKVPSKKFKVLGNTDRHSIKKNLIGALLFDSGETAEATRLKRTARRRYTRRKNRICYLQEIFSNEMAKVDDSFFHRLEESFLVEEDKKHERHPIFGNIVDEVAYHEKYPTIYHLRKKLVDSTDKADLRLIYLALAHMIKFRGHFLIEGDLNPDNSDVDKLFIQLVQTYNQLFEENPINASGVDAKAILSARLSKSRRLENLIAQLPGEKKNGLFGNLIALSLGLTPNFKSNFDLAEDAKLQLSKDTYDDDLDNLLAQIGDQYADLFLAAKNLSDAILLSDILRVNTEITKAPLSASMIKRYDEHHQDLTLLKALVRQQLPEKYKEIFFDQSKNGYAGYIDGGASQEEFYKFIKPILEKMDGTEELLVKLNREDLLRKQRTFDNGSIPHQIHLGELHAILRRQEDFYPFLKDNREKIEKILTFRIPYYVGPLARGNSRFAWMTRKSEETITPWNFEEVVDKGASAQSFIERMTNFDKNLPNEKVLPKHSLLYEYFTVYNELTKVKYVTEGMRKPAFLSGEQKKAIVDLLFKTNRKVTVKQLKEDYFKKIECFDSVEISGVEDRFNASLGTYHDLLKIIKDKDFLDNEENEDILEDIVLTLTLFEDREMIEERLKTYAHLFDDKVMKQLKRRRYTGWGRLSRKLINGIRDKQSGKTILDFLKSDGFANRNFMQLIHDDSLTFKEDIQKAQVSGQGDSLHEHIANLAGSPAIKKGILQTVKVVDELVKVMGRHKPENIVIEMARENQTTQKGQKNSRERMKRIEEGIKELGSQILKEHPVENTQLQNEKLYLYYLQNGRDMYVDQELDINRLSDYDVDHIVPQSFLKDDSIDNKVLTRSDKARGKSDNVPSEEVVKKMKNYWRQLLNAKLITQRKFDNLTKAERGGLSELDKAGFIKRQLVETRQITKHVAQILDSRMNTKYDENDKLIREVKVITLKSKLVSDFRKDFQFYKVREINNYHHAHDAYLNAVVGTALIKKYPKLESEFVYGDYKVYDVRKMIAKSEQEIGKATAKYFFYSNIMNFFKTEITLANGEIRKRPLIETNGETGEIVWDKGRDFATVRKVLSMPQVNIVKKTEVQTGGFSKESILPKRNSDKLIARKKDWDPKKYGGFDSPTVAYSVLVVAKVEKGKSKKLKSVKELLGITIMERSSFEKNPIDFLEAKGYKEVKKDLIIKLPKYSLFELENGRKRMLASAGELQKGNELALPSKYVNFLYLASHYEKLKGSPEDNEQKQLFVEQHKHYLDEIIEQISEFSKRVILADANLDKVLSAYNKHRDKPIREQAENIIHLFTLTNLGAPAAFKYFDTTIDRKRYTSTKEVLDATLIHQSITGLYETRIDLSQLGGDGGSGSETPGTSESATPESGGTVSLQDEHRLFDIPVTTSLPDVWLQDFPQAWAETGGLGRAKCQAPIIIDLKPTAVPVSIKQYPMSLEAHMGIRQHIIKFLELGVLRPCRSPWNTPLLPVKKPGTQDYRPVQDLREINKRTVDIHPTVPNPYNLLSTLKPDYSWYTVLDLKDAFFCLPLAPQSQELFAFEWKDPERGISGQLTWTRLPQGFKNSPTLFNEALHRDLTDFRTQHPEVTLLQYVDDLLLAAPTKKACTQGTRHLLQELGEKGYRASAKKAQICQTKVTYLGYILSEGKRWLTPGRIETVARIPPPRNPREVREFLGKAGFCRLFIPGFAELAAPLYALTKPSTPFTWQTEHQLAFEALKKALLSAPALGLPDTSKPFTLFLDERQGIAKGVLTQKLGPWKRPVAYLSKKLDPVAAGWPPCLRIMAATAMLVKDSAKLTLGQPLTVITPHTLEAIVRQPPDRWITNARLTHYQALLLDTDRVQFGPPVTLNPATLLPVPENQPSPHDCRQVLAETHGTREDLKDQELPDADHTWYTDGSSYLDSGTRRAGAAVVDGHNTIWAQSLPPGTSAQKAELIALTKALELSKGKKANIYTDSRYAFATAHTHGSIYERRGWLTSEGKEIKNKAEIIALLKALFLPQEVAIIHCPGHQKGQDPVAVGNRQADRVARQAAMAEVLTLATEPDNTSHITAGKRTADGSEFEKRTADGSEFESPKKKAKVE

SEQ ID NO: 1981 - protein, 2102 aa, synthetic construct
MPAAKRVKLDGGDKKYSIGLDIGTNSVGWAVITDEYKVPSKKFKVLGNTDRHSIKKNLIGALLFDSGETAEATRLKRTARRRYTRRKNRICYLQEIFSNEMAKVDDSFFHRLEESFLVEEDKKHERHPIFGNIVDEVAYHEKYPTIYHLRKKLVDSTDKADLRLIYLALAHMIKFRGHFLIEGDLNPDNSDVDKLFIQLVQTYNQLFEENPINASGVDAKAILSARLSKSRRLENLIAQLPGEKKNGLFGNLIALSLGLTPNFKSNFDLAEDAKLQLSKDTYDDDLDNLLAQIGDQYADLFLAAKNLSDAILLSDILRVNTEITKAPLSASMIKRYDEHHQDLTLLKALVRQQLPEKYKEIFFDQSKNGYAGYIDGGASQEEFYKFIKPILEKMDGTEELLVKLNREDLLRKQRTFDNGSIPHQIHLGELHAILRRQEDFYPFLKDNREKIEKILTFRIPYYVGPLARGNSRFAWMTRKSEETITPWNFEEVVDKGASAQSFIERMTNFDKNLPNEKVLPKHSLLYEYFTVYNELTKVKYVTEGMRKPAFLSGEQKKAIVDLLFKTNRKVTVKQLKEDYFKKIECFDSVEISGVEDRFNASLGTYHDLLKIIKDKDFLDNEENEDILEDIVLTLTLFEDREMIEERLKTYAHLFDDKVMKQLKRRRYTGWGRLSRKLINGIRDKQSGKTILDFLKSDGFANRNFMQLIHDDSLTFKEDIQKAQVSGQGDSLHEHIANLAGSPAIKKGILQTVKVVDELVKVMGRHKPENIVIEMARENQTTQKGQKNSRERMKRIEEGIKELGSQILKEHPVENTQLQNEKLYLYYLQNGRDMYVDQELDINRLSDYDVDHIVPQSFLKDDSIDNKVLTRSDKARGKSDNVPSEEVVKKMKNYWRQLLNAKLITQRKFDNLTKAERGGLSELDKAGFIKRQLVETRQITKHVAQILDSRMNTKYDENDKLIREVKVITLKSKLVSDFRKDFQFYKVREINNYHHAHDAYLNAVVGTALIKKYPKLESEFVYGDYKVYDVRKMIAKSEQEIGKATAKYFFYSNIMNFFKTEITLANGEIRKRPLIETNGETGEIVWDKGRDFATVRKVLSMPQVNIVKKTEVQTGGFSKESILPKRNSDKLIARKKDWDPKKYGGFDSPTVAYSVLVVAKVEKGKSKKLKSVKELLGITIMERSSFEKNPIDFLEAKGYKEVKKDLIIKLPKYSLFELENGRKRMLASAGELQKGNELALPSKYVNFLYLASHYEKLKGSPEDNEQKQLFVEQHKHYLDEIIEQISEFSKRVILADANLDKVLSAYNKHRDKPIREQAENIIHLFTLTNLGAPAAFKYFDTTIDRKRYTSTKEVLDATLIHQSITGLYETRIDLSQLGGDGGGSSPAPEAAAKGGTVSLQDEHRLFDIPVTTSLPDVWLQDFPQAWAETGGLGRAKCQAPIIIDLKPTAVPVSIKQYPMSLEAHMGIRQHIIKFLELGVLRPCRSPWNTPLLPVKKPGTQDYRPVQDLREINKRTVDIHPTVPNPYNLLSTLKPDYSWYTVLDLKDAFFCLPLAPQSQELFAFEWKDPERGISGQLTWTRLPQGFKNSPTLFNEALHRDLTDFRTQHPEVTLLQYVDDLLLAAPTKKACTQGTRHLLQELGEKGYRASAKKAQICQTKVTYLGYILSEGKRWLTPGRIETVARIPPPRNPREVREFLGKAGFCRLFIPGFAELAAPLYALTKPSTPFTWQTEHQLAFEALKKALLSAPALGLPDTSKPFTLFLDERQGIAKGVLTQKLGPWKRPVAYLSKKLDPVAAGWPPCLRIMAATAMLVKDSAKLTLGQPLTVITPHTLEAIVRQPPDRWITNARLTHYQALLLDTDRVQFGPPVTLNPATLLPVPENQPSPHDCRQVLAETHGTREDLKDQELPDADHTWYTDGSSYLDSGTRRAGAAVVDGHNTIWAQSLPPGTSAQKAELIALTKALELSKGKKANIYTDSRYAFATAHTHGSIYERRGWLTSEGKEIKNKAEIIALLKALFLPQEVAIIHCPGHQKGQDPVAVGNRQADRVARQAAMAEVLTLATEPDNTSHITAGKRTADGSEFEKRTADGSEFESPKKKAKVE

SEQ ID NO: 1982 - protein, 2100 aa, synthetic construct
MPAAKRVKLDGGDKKYSIGLDIGTNSVGWAVITDEYKVPSKKFKVLGNTDRHSIKKNLIGALLFDSGETAEATRLKRTARRRYTRRKNRICYLQEIFSNEMAKVDDSFFHRLEESFLVEEDKKHERHPIFGNIVDEVAYHEKYPTIYHLRKKLVDSTDKADLRLIYLALAHMIKFRGHFLIEGDLNPDNSDVDKLFIQLVQTYNQLFEENPINASGVDAKAILSARLSKSRRLENLIAQLPGEKKNGLFGNLIALSLGLTPNFKSNFDLAEDAKLQLSKDTYDDDLDNLLAQIGDQYADLFLAAKNLSDAILLSDILRVNTEITKAPLSASMIKRYDEHHQDLTLLKALVRQQLPEKYKEIFFDQSKNGYAGYIDGGASQEEFYKFIKPILEKMDGTEELLVKLNREDLLRKQRTFDNGSIPHQIHLGELHAILRRQEDFYPFLKDNREKIEKILTFRIPYYVGPLARGNSRFAWMTRKSEETITPWNFEEVVDKGASAQSFIERMTNFDKNLPNEKVLPKHSLLYEYFTVYNELTKVKYVTEGMRKPAFLSGEQKKAIVDLLFKTNRKVTVKQLKEDYFKKIECFDSVEISGVEDRFNASLGTYHDLLKIIKDKDFLDNEENEDILEDIVLTLTLFEDREMIEERLKTYAHLFDDKVMKQLKRRRYTGWGRLSRKLINGIRDKQSGKTILDFLKSDGFANRNFMQLIHDDSLTFKEDIQKAQVSGQGDSLHEHIANLAGSPAIKKGILQTVKVVDELVKVMGRHKPENIVIEMARENQTTQKGQKNSRERMKRIEEGIKELGSQILKEHPVENTQLQNEKLYLYYLQNGRDMYVDQELDINRLSDYDVDHIVPQSFLKDDSIDNKVLTRSDKARGKSDNVPSEEVVKKMKNYWRQLLNAKLITQRKFDNLTKAERGGLSELDKAGFIKRQLVETRQITKHVAQILDSRMNTKYDENDKLIREVKVITLKSKLVSDFRKDFQFYKVREINNYHHAHDAYLNAVVGTALIKKYPKLESEFVYGDYKVYDVRKMIAKSEQEIGKATAKYFFYSNIMNFFKTEITLANGEIRKRPLIETNGETGEIVWDKGRDFATVRKVLSMPQVNIVKKTEVQTGGFSKESILPKRNSDKLIARKKDWDPKKYGGFDSPTVAYSVLVVAKVEKGKSKKLKSVKELLGITIMERSSFEKNPIDFLEAKGYKEVKKDLIIKLPKYSLFELENGRKRMLASAGELQKGNELALPSKYVNFLYLASHYEKLKGSPEDNEQKQLFVEQHKHYLDEIIEQISEFSKRVILADANLDKVLSAYNKHRDKPIREQAENIIHLFTLTNLGAPAAFKYFDTTIDRKRYTSTKEVLDATLIHQSITGLYETRIDLSQLGGDGGGSSGGGGGSGGTVSLQDEHRLFDIPVTTSLPDVWLQDFPQAWAETGGLGRAKCQAPIIIDLKPTAVPVSIKQYPMSLEAHMGIRQHIIKFLELGVLRPCRSPWNTPLLPVKKPGTQDYRPVQDLREINKRTVDIHPTVPNPYNLLSTLKPDYSWYTVLDLKDAFFCLPLAPQSQELFAFEWKDPERGISGQLTWTRLPQGFKNSPTLFNEALHRDLTDFRTQHPEVTLLQYVDDLLLAAPTKKACTQGTRHLLQELGEKGYRASAKKAQICQTKVTYLGYILSEGKRWLTPGRIETVARIPPPRNPREVREFLGKAGFCRLFIPGFAELAAPLYALTKPSTPFTWQTEHQLAFEALKKALLSAPALGLPDTSKPFTLFLDERQGIAKGVLTQKLGPWKRPVAYLSKKLDPVAAGWPPCLRIMAATAMLVKDSAKLTLGQPLTVITPHTLEAIVRQPPDRWITNARLTHYQALLLDTDRVQFGPPVTLNPATLLPVPENQPSPHDCRQVLAETHGTREDLKDQELPDADHTWYTDGSSYLDSGTRRAGAAVVDGHNTIWAQSLPPGTSAQKAELIALTKALELSKGKKANIYTDSRYAFATAHTHGSIYERRGWLTSEGKEIKNKAEIIALLKALFLPQEVAIIHCPGHQKGQDPVAVGNRQADRVARQAAMAEVLTLATEPDNTSHITAGKRTADGSEFEKRTADGSEFESPKKKAKVE

SEQ ID NO: 1983 - protein, 2097 aa, synthetic construct
MPAAKRVKLDGGDKKYSIGLDIGTNSVGWAVITDEYKVPSKKFKVLGNTDRHSIKKNLIGALLFDSGETAEATRLKRTARRRYTRRKNRICYLQEIFSNEMAKVDDSFFHRLEESFLVEEDKKHERHPIFGNIVDEVAYHEKYPTIYHLRKKLVDSTDKADLRLIYLALAHMIKFRGHFLIEGDLNPDNSDVDKLFIQLVQTYNQLFEENPINASGVDAKAILSARLSKSRRLENLIAQLPGEKKNGLFGNLIALSLGLTPNFKSNFDLAEDAKLQLSKDTYDDDLDNLLAQIGDQYADLFLAAKNLSDAILLSDILRVNTEITKAPLSASMIKRYDEHHQDLTLLKALVRQQLPEKYKEIFFDQSKNGYAGYIDGGASQEEFYKFIKPILEKMDGTEELLVKLNREDLLRKQRTFDNGSIPHQIHLGELHAILRRQEDFYPFLKDNREKIEKILTFRIPYYVGPLARGNSRFAWMTRKSEETITPWNFEEVVDKGASAQSFIERMTNFDKNLPNEKVLPKHSLLYEYFTVYNELTKVKYVTEGMRKPAFLSGEQKKAIVDLLFKTNRKVTVKQLKEDYFKKIECFDSVEISGVEDRFNASLGTYHDLLKIIKDKDFLDNEENEDILEDIVLTLTLFEDREMIEERLKTYAHLFDDKVMKQLKRRRYTGWGRLSRKLINGIRDKQSGKTILDFLKSDGFANRNFMQLIHDDSLTFKEDIQKAQVSGQGDSLHEHIANLAGSPAIKKGILQTVKVVDELVKVMGRHKPENIVIEMARENQTTQKGQKNSRERMKRIEEGIKELGSQILKEHPVENTQLQNEKLYLYYLQNGRDMYVDQELDINRLSDYDVDHIVPQSFLKDDSIDNKVLTRSDKARGKSDNVPSEEVVKKMKNYWRQLLNAKLITQRKFDNLTKAERGGLSELDKAGFIKRQLVETRQITKHVAQILDSRMNTKYDENDKLIREVKVITLKSKLVSDFRKDFQFYKVREINNYHHAHDAYLNAVVGTALIKKYPKLESEFVYGDYKVYDVRKMIAKSEQEIGKATAKYFFYSNIMNFFKTEITLANGEIRKRPLIETNGETGEIVWDKGRDFATVRKVLSMPQVNIVKKTEVQTGGFSKESILPKRNSDKLIARKKDWDPKKYGGFDSPTVAYSVLVVAKVEKGKSKKLKSVKELLGITIMERSSFEKNPIDFLEAKGYKEVKKDLIIKLPKYSLFELENGRKRMLASAGELQKGNELALPSKYVNFLYLASHYEKLKGSPEDNEQKQLFVEQHKHYLDEIIEQISEFSKRVILADANLDKVLSAYNKHRDKPIREQAENIIHLFTLTNLGAPAAFKYFDTTIDRKRYTSTKEVLDATLIHQSITGLYETRIDLSQLGGDGGPAPGGGGGTVSLQDEHRLFDIPVTTSLPDVWLQDFPQAWAETGGLGRAKCQAPIIIDLKPTAVPVSIKQYPMSLEAHMGIRQHIIKFLELGVLRPCRSPWNTPLLPVKKPGTQDYRPVQDLREINKRTVDIHPTVPNPYNLLSTLKPDYSWYTVLDLKDAFFCLPLAPQSQELFAFEWKDPERGISGQLTWTRLPQGFKNSPTLFNEALHRDLTDFRTQHPEVTLLQYVDDLLLAAPTKKACTQGTRHLLQELGEKGYRASAKKAQICQTKVTYLGYILSEGKRWLTPGRIETVARIPPPRNPREVREFLGKAGFCRLFIPGFAELAAPLYALTKPSTPFTWQTEHQLAFEALKKALLSAPALGLPDTSKPFTLFLDERQGIAKGVLTQKLGPWKRPVAYLSKKLDPVAAGWPPCLRIMAATAMLVKDSAKLTLGQPLTVITPHTLEAIVRQPPDRWITNARLTHYQALLLDTDRVQFGPPVTLNPATLLPVPENQPSPHDCRQVLAETHGTREDLKDQELPDADHTWYTDGSSYLDSGTRRAGAAVVDGHNTIWAQSLPPGTSAQKAELIALTKALELSKGKKANIYTDSRYAFATAHTHGSIYERRGWLTSEGKEIKNKAEIIALLKALFLPQEVAIIHCPGHQKGQDPVAVGNRQADRVARQAAMAEVLTLATEPDNTSHITAGKRTADGSEFEKRTADGSEFESPKKKAKVE

SEQ ID NO: 1984 - protein, 2102 aa, synthetic construct
MPAAKRVKLDGGDKKYSIGLDIGTNSVGWAVITDEYKVPSKKFKVLGNTDRHSIKKNLIGALLFDSGETAEATRLKRTARRRYTRRKNRICYLQEIFSNEMAKVDDSFFHRLEESFLVEEDKKHERHPIFGNIVDEVAYHEKYPTIYHLRKKLVDSTDKADLRLIYLALAHMIKFRGHFLIEGDLNPDNSDVDKLFIQLVQTYNQLFEENPINASGVDAKAILSARLSKSRRLENLIAQLPGEKKNGLFGNLIALSLGLTPNFKSNFDLAEDAKLQLSKDTYDDDLDNLLAQIGDQYADLFLAAKNLSDAILLSDILRVNTEITKAPLSASMIKRYDEHHQDLTLLKALVRQQLPEKYKEIFFDQSKNGYAGYIDGGASQEEFYKFIKPILEKMDGTEELLVKLNREDLLRKQRTFDNGSIPHQIHLGELHAILRRQEDFYPFLKDNREKIEKILTFRIPYYVGPLARGNSRFAWMTRKSEETITPWNFEEVVDKGASAQSFIERMTNFDKNLPNEKVLPKHSLLYEYFTVYNELTKVKYVTEGMRKPAFLSGEQKKAIVDLLFKTNRKVTVKQLKEDYFKKIECFDSVEISGVEDRFNASLGTYHDLLKIIKDKDFLDNEENEDILEDIVLTLTLFEDREMIEERLKTYAHLFDDKVMKQLKRRRYTGWGRLSRKLINGIRDKQSGKTILDFLKSDGFANRNFMQLIHDDSLTFKEDIQKAQVSGQGDSLHEHIANLAGSPAIKKGILQTVKVVDELVKVMGRHKPENIVIEMARENQTTQKGQKNSRERMKRIEEGIKELGSQILKEHPVENTQLQNEKLYLYYLQNGRDMYVDQELDINRLSDYDVDHIVPQSFLKDDSIDNKVLTRSDKARGKSDNVPSEEVVKKMKNYWRQLLNAKLITQRKFDNLTKAERGGLSELDKAGFIKRQLVETRQITKHVAQILDSRMNTKYDENDKLIREVKVITLKSKLVSDFRKDFQFYKVREINNYHHAHDAYLNAVVGTALIKKYPKLESEFVYGDYKVYDVRKMIAKSEQEIGKATAKYFFYSNIMNFFKTEITLANGEIRKRPLIETNGETGEIVWDKGRDFATVRKVLSMPQVNIVKKTEVQTGGFSKESILPKRNSDKLIARKKDWDPKKYGGFDSPTVAYSVLVVAKVEKGKSKKLKSVKELLGITIMERSSFEKNPIDFLEAKGYKEVKKDLIIKLPKYSLFELENGRKRMLASAGELQKGNELALPSKYVNFLYLASHYEKLKGSPEDNEQKQLFVEQHKHYLDEIIEQISEFSKRVILADANLDKVLSAYNKHRDKPIREQAENIIHLFTLTNLGAPAAFKYFDTTIDRKRYTSTKEVLDATLIHQSITGLYETRIDLSQLGGDGGGGSEAAAKGGGGGTVSLQDEHRLFDIPVTTSLPDVWLQDFPQAWAETGGLGRAKCQAPIIIDLKPTAVPVSIKQYPMSLEAHMGIRQHIIKFLELGVLRPCRSPWNTPLLPVKKPGTQDYRPVQDLREINKRTVDIHPTVPNPYNLLSTLKPDYSWYTVLDLKDAFFCLPLAPQSQELFAFEWKDPERGISGQLTWTRLPQGFKNSPTLFNEALHRDLTDFRTQHPEVTLLQYVDDLLLAAPTKKACTQGTRHLLQELGEKGYRASAKKAQICQTKVTYLGYILSEGKRWLTPGRIETVARIPPPRNPREVREFLGKAGFCRLFIPGFAELAAPLYALTKPSTPFTWQTEHQLAFEALKKALLSAPALGLPDTSKPFTLFLDERQGIAKGVLTQKLGPWKRPVAYLSKKLDPVAAGWPPCLRIMAATAMLVKDSAKLTLGQPLTVITPHTLEAIVRQPPDRWITNARLTHYQALLLDTDRVQFGPPVTLNPATLLPVPENQPSPHDCRQVLAETHGTREDLKDQELPDADHTWYTDGSSYLDSGTRRAGAAVVDGHNTIWAQSLPPGTSAQKAELIALTKALELSKGKKANIYTDSRYAFATAHTHGSIYERRGWLTSEGKEIKNKAEIIALLKALFLPQEVAIIHCPGHQKGQDPVAVGNRQADRVARQAAMAEVLTLATEPDNTSHITAGKRTADGSEFEKRTADGSEFESPKKKAKVE

SEQ ID NO: 1985 - protein, 2100 aa, synthetic construct
MPAAKRVKLDGGDKKYSIGLDIGTNSVGWAVITDEYKVPSKKFKVLGNTDRHSIKKNLIGALLFDSGETAEATRLKRTARRRYTRRKNRICYLQEIFSNEMAKVDDSFFHRLEESFLVEEDKKHERHPIFGNIVDEVAYHEKYPTIYHLRKKLVDSTDKADLRLIYLALAHMIKFRGHFLIEGDLNPDNSDVDKLFIQLVQTYNQLFEENPINASGVDAKAILSARLSKSRRLENLIAQLPGEKKNGLFGNLIALSLGLTPNFKSNFDLAEDAKLQLSKDTYDDDLDNLLAQIGDQYADLFLAAKNLSDAILLSDILRVNTEITKAPLSASMIKRYDEHHQDLTLLKALVRQQLPEKYKEIFFDQSKNGYAGYIDGGASQEEFYKFIKPILEKMDGTEELLVKLNREDLLRKQRTFDNGSIPHQIHLGELHAILRRQEDFYPFLKDNREKIEKILTFRIPYYVGPLARGNSRFAWMTRKSEETITPWNFEEVVDKGASAQSFIERMTNFDKNLPNEKVLPKHSLLYEYFTVYNELTKVKYVTEGMRKPAFLSGEQKKAIVDLLFKTNRKVTVKQLKEDYFKKIECFDSVEISGVEDRFNASLGTYHDLLKIIKDKDFLDNEENEDILEDIVLTLTLFEDREMIEERLKTYAHLFDDKVMKQLKRRRYTGWGRLSRKLINGIRDKQSGKTILDFLKSDGFANRNFMQLIHDDSLTFKEDIQKAQVSGQGDSLHEHIANLAGSPAIKKGILQTVKVVDELVKVMGRHKPENIVIEMARENQTTQKGQKNSRERMKRIEEGIKELGSQILKEHPVENTQLQNEKLYLYYLQNGRDMYVDQELDINRLSDYDVDHIVPQSFLKDDSIDNKVLTRSDKARGKSDNVPSEEVVKKMKNYWRQLLNAKLITQRKFDNLTKAERGGLSELDKAGFIKRQLVETRQITKHVAQILDSRMNTKYDENDKLIREVKVITLKSKLVSDFRKDFQFYKVREINNYHHAHDAYLNAVVGTALIKKYPKLESEFVYGDYKVYDVRKMIAKSEQEIGKATAKYFFYSNIMNFFKTEITLANGEIRKRPLIETNGETGEIVWDKGRDFATVRKVLSMPQVNIVKKTEVQTGGFSKESILPKRNSDKLIARKKDWDPKKYGGFDSPTVAYSVLVVAKVEKGKSKKLKSVKELLGITIMERSSFEKNPIDFLEAKGYKEVKKDLIIKLPKYSLFELENGRKRMLASAGELQKGNELALPSKYVNFLYLASHYEKLKGSPEDNEQKQLFVEQHKHYLDEIIEQISEFSKRVILADANLDKVLSAYNKHRDKPIREQAENIIHLFTLTNLGAPAAFKYFDTTIDRKRYTSTKEVLDATLIHQSITGLYETRIDLSQLGGDGGGSSPAPGGSGGTVSLQDEHRLFDIPVTTSLPDVWLQDFPQAWAETGGLGRAKCQAPIIIDLKPTAVPVSIKQYPMSLEAHMGIRQHIIKFLELGVLRPCRSPWNTPLLPVKKPGTQDYRPVQDLREINKRTVDIHPTVPNPYNLLSTLKPDYSWYTVLDLKDAFFCLPLAPQSQELFAFEWKDPERGISGQLTWTRLPQGFKNSPTLFNEALHRDLTDFRTQHPEVTLLQYVDDLLLAAPTKKACTQGTRHLLQELGEKGYRASAKKAQICQTKVTYLGYILSEGKRWLTPGRIETVARIPPPRNPREVREFLGKAGFCRLFIPGFAELAAPLYALTKPSTPFTWQTEHQLAFEALKKALLSAPALGLPDTSKPFTLFLDERQGIAKGVLTQKLGPWKRPVAYLSKKLDPVAAGWPPCLRIMAATAMLVKDSAKLTLGQPLTVITPHTLEAIVRQPPDRWITNARLTHYQALLLDTDRVQFGPPVTLNPATLLPVPENQPSPHDCRQVLAETHGTREDLKDQELPDADHTWYTDGSSYLDSGTRRAGAAVVDGHNTIWAQSLPPGTSAQKAELIALTKALELSKGKKANIYTDSRYAFATAHTHGSIYERRGWLTSEGKEIKNKAEIIALLKALFLPQEVAIIHCPGHQKGQDPVAVGNRQADRVARQAAMAEVLTLATEPDNTSHITAGKRTADGSEFEKRTADGSEFESPKKKAKVE

SEQ ID NO: 1986 - protein, 2099 aa, synthetic construct
MPAAKRVKLDGGDKKYSIGLDIGTNSVGWAVITDEYKVPSKKFKVLGNTDRHSIKKNLIGALLFDSGETAEATRLKRTARRRYTRRKNRICYLQEIFSNEMAKVDDSFFHRLEESFLVEEDKKHERHPIFGNIVDEVAYHEKYPTIYHLRKKLVDSTDKADLRLIYLALAHMIKFRGHFLIEGDLNPDNSDVDKLFIQLVQTYNQLFEENPINASGVDAKAILSARLSKSRRLENLIAQLPGEKKNGLFGNLIALSLGLTPNFKSNFDLAEDAKLQLSKDTYDDDLDNLLAQIGDQYADLFLAAKNLSDAILLSDILRVNTEITKAPLSASMIKRYDEHHQDLTLLKALVRQQLPEKYKEIFFDQSKNGYAGYIDGGASQEEFYKFIKPILEKMDGTEELLVKLNREDLLRKQRTFDNGSIPHQIHLGELHAILRRQEDFYPFLKDNREKIEKILTFRIPYYVGPLARGNSRFAWMTRKSEETITPWNFEEVVDKGASAQSFIERMTNFDKNLPNEKVLPKHSLLYEYFTVYNELTKVKYVTEGMRKPAFLSGEQKKAIVDLLFKTNRKVTVKQLKEDYFKKIECFDSVEISGVEDRFNASLGTYHDLLKIIKDKDFLDNEENEDILEDIVLTLTLFEDREMIEERLKTYAHLFDDKVMKQLKRRRYTGWGRLSRKLINGIRDKQSGKTILDFLKSDGFANRNFMQLIHDDSLTFKEDIQKAQVSGQGDSLHEHIANLAGSPAIKKGILQTVKVVDELVKVMGRHKPENIVIEMARENQTTQKGQKNSRERMKRIEEGIKELGSQILKEHPVENTQLQNEKLYLYYLQNGRDMYVDQELDINRLSDYDVDHIVPQSFLKDDSIDNKVLTRSDKARGKSDNVPSEEVVKKMKNYWRQLLNAKLITQRKFDNLTKAERGGLSELDKAGFIKRQLVETRQITKHVAQILDSRMNTKYDENDKLIREVKVITLKSKLVSDFRKDFQFYKVREINNYHHAHDAYLNAVVGTALIKKYPKLESEFVYGDYKVYDVRKMIAKSEQEIGKATAKYFFYSNIMNFFKTEITLANGEIRKRPLIETNGETGEIVWDKGRDFATVRKVLSMPQVNIVKKTEVQTGGFSKESILPKRNSDKLIARKKDWDPKKYGGFDSPTVAYSVLVVAKVEKGKSKKLKSVKELLGITIMERSSFEKNPIDFLEAKGYKEVKKDLIIKLPKYSLFELENGRKRMLASAGELQKGNELALPSKYVNFLYLASHYEKLKGSPEDNEQKQLFVEQHKHYLDEIIEQISEFSKRVILADANLDKVLSAYNKHRDKPIREQAENIIHLFTLTNLGAPAAFKYFDTTIDRKRYTSTKEVLDATLIHQSITGLYETRIDLSQLGGDGGEAAAKGGGGGTVSLQDEHRLFDIPVTTSLPDVWLQDFPQAWAETGGLGRAKCQAPIIIDLKPTAVPVSIKQYPMSLEAHMGIRQHIIKFLELGVLRPCRSPWNTPLLPVKKPGTQDYRPVQDLREINKRTVDIHPTVPNPYNLLSTLKPDYSWYTVLDLKDAFFCLPLAPQSQELFAFEWKDPERGISGQLTWTRLPQGFKNSPTLFNEALHRDLTDFRTQHPEVTLLQYVDDLLLAAPTKKACTQGTRHLLQELGEKGYRASAKKAQICQTKVTYLGYILSEGKRWLTPGRIETVARIPPPRNPREVREFLGKAGFCRLFIPGFAELAAPLYALTKPSTPFTWQTEHQLAFEALKKALLSAPALGLPDTSKPFTLFLDERQGIAKGVLTQKLGPWKRPVAYLSKKLDPVAAGWPPCLRIMAATAMLVKDSAKLTLGQPLTVITPHTLEAIVRQPPDRWITNARLTHYQALLLDTDRVQFGPPVTLNPATLLPVPENQPSPHDCRQVLAETHGTREDLKDQELPDADHTWYTDGSSYLDSGTRRAGAAVVDGHNTIWAQSLPPGTSAQKAELIALTKALELSKGKKANIYTDSRYAFATAHTHGSIYERRGWLTSEGKEIKNKAEIIALLKALFLPQEVAIIHCPGHQKGQDPVAVGNRQADRVARQAAMAEVLTLATEPDNTSHITAGKRTADGSEFEKRTADGSEFESPKKKAKVE

SEQ ID NO: 1987 - protein, 2106 aa, synthetic construct
MPAAKRVKLDGGDKKYSIGLDIGTNSVGWAVITDEYKVPSKKFKVLGNTDRHSIKKNLIGALLFDSGETAEATRLKRTARRRYTRRKNRICYLQEIFSNEMAKVDDSFFHRLEESFLVEEDKKHERHPIFGNIVDEVAYHEKYPTIYHLRKKLVDSTDKADLRLIYLALAHMIKFRGHFLIEGDLNPDNSDVDKLFIQLVQTYNQLFEENPINASGVDAKAILSARLSKSRRLENLIAQLPGEKKNGLFGNLIALSLGLTPNFKSNFDLAEDAKLQLSKDTYDDDLDNLLAQIGDQYADLFLAAKNLSDAILLSDILRVNTEITKAPLSASMIKRYDEHHQDLTLLKALVRQQLPEKYKEIFFDQSKNGYAGYIDGGASQEEFYKFIKPILEKMDGTEELLVKLNREDLLRKQRTFDNGSIPHQIHLGELHAILRRQEDFYPFLKDNREKIEKILTFRIPYYVGPLARGNSRFAWMTRKSEETITPWNFEEVVDKGASAQSFIERMTNFDKNLPNEKVLPKHSLLYEYFTVYNELTKVKYVTEGMRKPAFLSGEQKKAIVDLLFKTNRKVTVKQLKEDYFKKIECFDSVEISGVEDRFNASLGTYHDLLKIIKDKDFLDNEENEDILEDIVLTLTLFEDREMIEERLKTYAHLFDDKVMKQLKRRRYTGWGRLSRKLINGIRDKQSGKTILDFLKSDGFANRNFMQLIHDDSLTFKEDIQKAQVSGQGDSLHEHIANLAGSPAIKKGILQTVKVVDELVKVMGRHKPENIVIEMARENQTTQKGQKNSRERMKRIEEGIKELGSQILKEHPVENTQLQNEKLYLYYLQNGRDMYVDQELDINRLSDYDVDHIVPQSFLKDDSIDNKVLTRSDKARGKSDNVPSEEVVKKMKNYWRQLLNAKLITQRKFDNLTKAERGGLSELDKAGFIKRQLVETRQITKHVAQILDSRMNTKYDENDKLIREVKVITLKSKLVSDFRKDFQFYKVREINNYHHAHDAYLNAVVGTALIKKYPKLESEFVYGDYKVYDVRKMIAKSEQEIGKATAKYFFYSNIMNFFKTEITLANGEIRKRPLIETNGETGEIVWDKGRDFATVRKVLSMPQVNIVKKTEVQTGGFSKESILPKRNSDKLIARKKDWDPKKYGGFDSPTVAYSVLVVAKVEKGKSKKLKSVKELLGITIMERSSFEKNPIDFLEAKGYKEVKKDLIIKLPKYSLFELENGRKRMLASAGELQKGNELALPSKYVNFLYLASHYEKLKGSPEDNEQKQLFVEQHKHYLDEIIEQISEFSKRVILADANLDKVLSAYNKHRDKPIREQAENIIHLFTLTNLGAPAAFKYFDTTIDRKRYTSTKEVLDATLIHQSITGLYETRIDLSQLGGDGGGGGGSGGGGSGGGGSGGTVSLQDEHRLFDIPVTTSLPDVWLQDFPQAWAETGGLGRAKCQAPIIIDLKPTAVPVSIKQYPMSLEAHMGIRQHIIKFLELGVLRPCRSPWNTPLLPVKKPGTQDYRPVQDLREINKRTVDIHPTVPNPYNLLSTLKPDYSWYTVLDLKDAFFCLPLAPQSQELFAFEWKDPERGISGQLTWTRLPQGFKNSPTLFNEALHRDLTDFRTQHPEVTLLQYVDDLLLAAPTKKACTQGTRHLLQELGEKGYRASAKKAQICQTKVTYLGYILSEGKRWLTPGRIETVARIPPPRNPREVREFLGKAGFCRLFIPGFAELAAPLYALTKPSTPFTWQTEHQLAFEALKKALLSAPALGLPDTSKPFTLFLDERQGIAKGVLTQKLGPWKRPVAYLSKKLDPVAAGWPPCLRIMAATAMLVKDSAKLTLGQPLTVITPHTLEAIVRQPPDRWITNARLTHYQALLLDTDRVQFGPPVTLNPATLLPVPENQPSPHDCRQVLAETHGTREDLKDQELPDADHTWYTDGSSYLDSGTRRAGAAVVDGHNTIWAQSLPPGTSAQKAELIALTKALELSKGKKANIYTDSRYAFATAHTHGSIYERRGWLTSEGKEIKNKAEIIALLKALFLPQEVAIIHCPGHQKGQDPVAVGNRQADRVARQAAMAEVLTLATEPDNTSHITAGKRTADGSEFEKRTADGSEFESPKKKAKVE

SEQ ID NO: 1988 - protein, 2100 aa, synthetic construct
MPAAKRVKLDGGDKKYSIGLDIGTNSVGWAVITDEYKVPSKKFKVLGNTDRHSIKKNLIGALLFDSGETAEATRLKRTARRRYTRRKNRICYLQEIFSNEMAKVDDSFFHRLEESFLVEEDKKHERHPIFGNIVDEVAYHEKYPTIYHLRKKLVDSTDKADLRLIYLALAHMIKFRGHFLIEGDLNPDNSDVDKLFIQLVQTYNQLFEENPINASGVDAKAILSARLSKSRRLENLIAQLPGEKKNGLFGNLIALSLGLTPNFKSNFDLAEDAKLQLSKDTYDDDLDNLLAQIGDQYADLFLAAKNLSDAILLSDILRVNTEITKAPLSASMIKRYDEHHQDLTLLKALVRQQLPEKYKEIFFDQSKNGYAGYIDGGASQEEFYKFIKPILEKMDGTEELLVKLNREDLLRKQRTFDNGSIPHQIHLGELHAILRRQEDFYPFLKDNREKIEKILTFRIPYYVGPLARGNSRFAWMTRKSEETITPWNFEEVVDKGASAQSFIERMTNFDKNLPNEKVLPKHSLLYEYFTVYNELTKVKYVTEGMRKPAFLSGEQKKAIVDLLFKTNRKVTVKQLKEDYFKKIECFDSVEISGVEDRFNASLGTYHDLLKIIKDKDFLDNEENEDILEDIVLTLTLFEDREMIEERLKTYAHLFDDKVMKQLKRRRYTGWGRLSRKLINGIRDKQSGKTILDFLKSDGFANRNFMQLIHDDSLTFKEDIQKAQVSGQGDSLHEHIANLAGSPAIKKGILQTVKVVDELVKVMGRHKPENIVIEMARENQTTQKGQKNSRERMKRIEEGIKELGSQILKEHPVENTQLQNEKLYLYYLQNGRDMYVDQELDINRLSDYDVDHIVPQSFLKDDSIDNKVLTRSDKARGKSDNVPSEEVVKKMKNYWRQLLNAKLITQRKFDNLTKAERGGLSELDKAGFIKRQLVETRQITKHVAQILDSRMNTKYDENDKLIREVKVITLKSKLVSDFRKDFQFYKVREINNYHHAHDAYLNAVVGTALIKKYPKLESEFVYGDYKVYDVRKMIAKSEQEIGKATAKYFFYSNIMNFFKTEITLANGEIRKRPLIETNGETGEIVWDKGRDFATVRKVLSMPQVNIVKKTEVQTGGFSKESILPKRNSDKLIARKKDWDPKKYGGFDSPTVAYSVLVVAKVEKGKSKKLKSVKELLGITIMERSSFEKNPIDFLEAKGYKEVKKDLIIKLPKYSLFELENGRKRMLASAGELQKGNELALPSKYVNFLYLASHYEKLKGSPEDNEQKQLFVEQHKHYLDEIIEQISEFSKRVILADANLDKVLSAYNKHRDKPIREQAENIIHLFTLTNLGAPAAFKYFDTTIDRKRYTSTKEVLDATLIHQSITGLYETRIDLSQLGGDGGGGGPAPGSSGGTVSLQDEHRLFDIPVTTSLPDVWLQDFPQAWAETGGLGRAKCQAPIIIDLKPTAVPVSIKQYPMSLEAHMGIRQHIIKFLELGVLRPCRSPWNTPLLPVKKPGTQDYRPVQDLREINKRTVDIHPTVPNPYNLLSTLKPDYSWYTVLDLKDAFFCLPLAPQSQELFAFEWKDPERGISGQLTWTRLPQGFKNSPTLFNEALHRDLTDFRTQHPEVTLLQYVDDLLLAAPTKKACTQGTRHLLQELGEKGYRASAKKAQICQTKVTYLGYILSEGKRWLTPGRIETVARIPPPRNPREVREFLGKAGFCRLFIPGFAELAAPLYALTKPSTPFTWQTEHQLAFEALKKALLSAPALGLPDTSKPFTLFLDERQGIAKGVLTQKLGPWKRPVAYLSKKLDPVAAGWPPCLRIMAATAMLVKDSAKLTLGQPLTVITPHTLEAIVRQPPDRWITNARLTHYQALLLDTDRVQFGPPVTLNPATLLPVPENQPSPHDCRQVLAETHGTREDLKDQELPDADHTWYTDGSSYLDSGTRRAGAAVVDGHNTIWAQSLPPGTSAQKAELIALTKALELSKGKKANIYTDSRYAFATAHTHGSIYERRGWLTSEGKEIKNKAEIIALLKALFLPQEVAIIHCPGHQKGQDPVAVGNRQADRVARQAAMAEVLTLATEPDNTSHITAGKRTADGSEFEKRTADGSEFESPKKKAKVE

SEQ ID NO: 1989 - protein, 2102 aa, synthetic construct
MPAAKRVKLDGGDKKYSIGLDIGTNSVGWAVITDEYKVPSKKFKVLGNTDRHSIKKNLIGALLFDSGETAEATRLKRTARRRYTRRKNRICYLQEIFSNEMAKVDDSFFHRLEESFLVEEDKKHERHPIFGNIVDEVAYHEKYPTIYHLRKKLVDSTDKADLRLIYLALAHMIKFRGHFLIEGDLNPDNSDVDKLFIQLVQTYNQLFEENPINASGVDAKAILSARLSKSRRLENLIAQLPGEKKNGLFGNLIALSLGLTPNFKSNFDLAEDAKLQLSKDTYDDDLDNLLAQIGDQYADLFLAAKNLSDAILLSDILRVNTEITKAPLSASMIKRYDEHHQDLTLLKALVRQQLPEKYKEIFFDQSKNGYAGYIDGGASQEEFYKFIKPILEKMDGTEELLVKLNREDLLRKQRTFDNGSIPHQIHLGELHAILRRQEDFYPFLKDNREKIEKILTFRIPYYVGPLARGNSRFAWMTRKSEETITPWNFEEVVDKGASAQSFIERMTNFDKNLPNEKVLPKHSLLYEYFTVYNELTKVKYVTEGMRKPAFLSGEQKKAIVDLLFKTNRKVTVKQLKEDYFKKIECFDSVEISGVEDRFNASLGTYHDLLKIIKDKDFLDNEENEDILEDIVLTLTLFEDREMIEERLKTYAHLFDDKVMKQLKRRRYTGWGRLSRKLINGIRDKQSGKTILDFLKSDGFANRNFMQLIHDDSLTFKEDIQKAQVSGQGDSLHEHIANLAGSPAIKKGILQTVKVVDELVKVMGRHKPENIVIEMARENQTTQKGQKNSRERMKRIEEGIKELGSQILKEHPVENTQLQNEKLYLYYLQNGRDMYVDQELDINRLSDYDVDHIVPQSFLKDDSIDNKVLTRSDKARGKSDNVPSEEVVKKMKNYWRQLLNAKLITQRKFDNLTKAERGGLSELDKAGFIKRQLVETRQITKHVAQILDSRMNTKYDENDKLIREVKVITLKSKLVSDFRKDFQFYKVREINNYHHAHDAYLNAVVGTALIKKYPKLESEFVYGDYKVYDVRKMIAKSEQEIGKATAKYFFYSNIMNFFKTEITLANGEIRKRPLIETNGETGEIVWDKGRDFATVRKVLSMPQVNIVKKTEVQTGGFSKESILPKRNSDKLIARKKDWDPKKYGGFDSPTVAYSVLVVAKVEKGKSKKLKSVKELLGITIMERSSFEKNPIDFLEAKGYKEVKKDLIIKLPKYSLFELENGRKRMLASAGELQKGNELALPSKYVNFLYLASHYEKLKGSPEDNEQKQLFVEQHKHYLDEIIEQISEFSKRVILADANLDKVLSAYNKHRDKPIREQAENIIHLFTLTNLGAPAAFKYFDTTIDRKRYTSTKEVLDATLIHQSITGLYETRIDLSQLGGDGGGGSEAAAKPAPGGTVSLQDEHRLFDIPVTTSLPDVWLQDFPQAWAETGGLGRAKCQAPIIIDLKPTAVPVSIKQYPMSLEAHMGIRQHIIKFLELGVLRPCRSPWNTPLLPVKKPGTQDYRPVQDLREINKRTVDIHPTVPNPYNLLSTLKPDYSWYTVLDLKDAFFCLPLAPQSQELFAFEWKDPERGISGQLTWTRLPQGFKNSPTLFNEALHRDLTDFRTQHPEVTLLQYVDDLLLAAPTKKACTQGTRHLLQELGEKGYRASAKKAQICQTKVTYLGYILSEGKRWLTPGRIETVARIPPPRNPREVREFLGKAGFCRLFIPGFAELAAPLYALTKPSTPFTWQTEHQLAFEALKKALLSAPALGLPDTSKPFTLFLDERQGIAKGVLTQKLGPWKRPVAYLSKKLDPVAAGWPPCLRIMAATAMLVKDSAKLTLGQPLTVITPHTLEAIVRQPPDRWITNARLTHYQALLLDTDRVQFGPPVTLNPATLLPVPENQPSPHDCRQVLAETHGTREDLKDQELPDADHTWYTDGSSYLDSGTRRAGAAVVDGHNTIWAQSLPPGTSAQKAELIALTKALELSKGKKANIYTDSRYAFATAHTHGSIYERRGWLTSEGKEIKNKAEIIALLKALFLPQEVAIIHCPGHQKGQDPVAVGNRQADRVARQAAMAEVLTLATEPDNTSHITAGKRTADGSEFEKRTADGSEFESPKKKAKVE

SEQ ID NO: 1990 - protein, 2100 aa, synthetic construct
MPAAKRVKLDGGDKKYSIGLDIGTNSVGWAVITDEYKVPSKKFKVLGNTDRHSIKKNLIGALLFDSGETAEATRLKRTARRRYTRRKNRICYLQEIFSNEMAKVDDSFFHRLEESFLVEEDKKHERHPIFGNIVDEVAYHEKYPTIYHLRKKLVDSTDKADLRLIYLALAHMIKFRGHFLIEGDLNPDNSDVDKLFIQLVQTYNQLFEENPINASGVDAKAILSARLSKSRRLENLIAQLPGEKKNGLFGNLIALSLGLTPNFKSNFDLAEDAKLQLSKDTYDDDLDNLLAQIGDQYADLFLAAKNLSDAILLSDILRVNTEITKAPLSASMIKRYDEHHQDLTLLKALVRQQLPEKYKEIFFDQSKNGYAGYIDGGASQEEFYKFIKPILEKMDGTEELLVKLNREDLLRKQRTFDNGSIPHQIHLGELHAILRRQEDFYPFLKDNREKIEKILTFRIPYYVGPLARGNSRFAWMTRKSEETITPWNFEEVVDKGASAQSFIERMTNFDKNLPNEKVLPKHSLLYEYFTVYNELTKVKYVTEGMRKPAFLSGEQKKAIVDLLFKTNRKVTVKQLKEDYFKKIECFDSVEISGVEDRFNASLGTYHDLLKIIKDKDFLDNEENEDILEDIVLTLTLFEDREMIEERLKTYAHLFDDKVMKQLKRRRYTGWGRLSRKLINGIRDKQSGKTILDFLKSDGFANRNFMQLIHDDSLTFKEDIQKAQVSGQGDSLHEHIANLAGSPAIKKGILQTVKVVDELVKVMGRHKPENIVIEMARENQTTQKGQKNSRERMKRIEEGIKELGSQILKEHPVENTQLQNEKLYLYYLQNGRDMYVDQELDINRLSDYDVDHIVPQSFLKDDSIDNKVLTRSDKARGKSDNVPSEEVVKKMKNYWRQLLNAKLITQRKFDNLTKAERGGLSELDKAGFIKRQLVETRQITKHVAQILDSRMNTKYDENDKLIREVKVITLKSKLVSDFRKDFQFYKVREINNYHHAHDAYLNAVVGTALIKKYPKLESEFVYGDYKVYDVRKMIAKSEQEIGKATAKYFFYSNIMNFFKTEITLANGEIRKRPLIETNGETGEIVWDKGRDFATVRKVLSMPQVNIVKKTEVQTGGFSKESILPKRNSDKLIARKKDWDPKKYGGFDSPTVAYSVLVVAKVEKGKSKKLKSVKELLGITIMERSSFEKNPIDFLEAKGYKEVKKDLIIKLPKYSLFELENGRKRMLASAGELQKGNELALPSKYVNFLYLASHYEKLKGSPEDNEQKQLFVEQHKHYLDEIIEQISEFSKRVILADANLDKVLSAYNKHRDKPIREQAENIIHLFTLTNLGAPAAFKYFDTTIDRKRYTSTKEVLDATLIHQSITGLYETRIDLSQLGGDGGPAPGGSGSSGGTVSLQDEHRLFDIPVTTSLPDVWLQDFPQAWAETGGLGRAKCQAPIIIDLKPTAVPVSIKQYPMSLEAHMGIRQHIIKFLELGVLRPCRSPWNTPLLPVKKPGTQDYRPVQDLREINKRTVDIHPTVPNPYNLLSTLKPDYSWYTVLDLKDAFFCLPLAPQSQELFAFEWKDPERGISGQLTWTRLPQGFKNSPTLFNEALHRDLTDFRTQHPEVTLLQYVDDLLLAAPTKKACTQGTRHLLQELGEKGYRASAKKAQICQTKVTYLGYILSEGKRWLTPGRIETVARIPPPRNPREVREFLGKAGFCRLFIPGFAELAAPLYALTKPSTPFTWQTEHQLAFEALKKALLSAPALGLPDTSKPFTLFLDERQGIAKGVLTQKLGPWKRPVAYLSKKLDPVAAGWPPCLRIMAATAMLVKDSAKLTLGQPLTVITPHTLEAIVRQPPDRWITNARLTHYQALLLDTDRVQFGPPVTLNPATLLPVPENQPSPHDCRQVLAETHGTREDLKDQELPDADHTWYTDGSSYLDSGTRRAGAAVVDGHNTIWAQSLPPGTSAQKAELIALTKALELSKGKKANIYTDSRYAFATAHTHGSIYERRGWLTSEGKEIKNKAEIIALLKALFLPQEVAIIHCPGHQKGQDPVAVGNRQADRVARQAAMAEVLTLATEPDNTSHITAGKRTADGSEFEKRTADGSEFESPKKKAKVE

SEQ ID NO: 1991 - protein, 2100 aa, synthetic construct
MPAAKRVKLDGGDKKYSIGLDIGTNSVGWAVITDEYKVPSKKFKVLGNTDRHSIKKNLIGALLFDSGETAEATRLKRTARRRYTRRKNRICYLQEIFSNEMAKVDDSFFHRLEESFLVEEDKKHERHPIFGNIVDEVAYHEKYPTIYHLRKKLVDSTDKADLRLIYLALAHMIKFRGHFLIEGDLNPDNSDVDKLFIQLVQTYNQLFEENPINASGVDAKAILSARLSKSRRLENLIAQLPGEKKNGLFGNLIALSLGLTPNFKSNFDLAEDAKLQLSKDTYDDDLDNLLAQIGDQYADLFLAAKNLSDAILLSDILRVNTEITKAPLSASMIKRYDEHHQDLTLLKALVRQQLPEKYKEIFFDQSKNGYAGYIDGGASQEEFYKFIKPILEKMDGTEELLVKLNREDLLRKQRTFDNGSIPHQIHLGELHAILRRQEDFYPFLKDNREKIEKILTFRIPYYVGPLARGNSRFAWMTRKSEETITPWNFEEVVDKGASAQSFIERMTNFDKNLPNEKVLPKHSLLYEYFTVYNELTKVKYVTEGMRKPAFLSGEQKKAIVDLLFKTNRKVTVKQLKEDYFKKIECFDSVEISGVEDRFNASLGTYHDLLKIIKDKDFLDNEENEDILEDIVLTLTLFEDREMIEERLKTYAHLFDDKVMKQLKRRRYTGWGRLSRKLINGIRDKQSGKTILDFLKSDGFANRNFMQLIHDDSLTFKEDIQKAQVSGQGDSLHEHIANLAGSPAIKKGILQTVKVVDELVKVMGRHKPENIVIEMARENQTTQKGQKNSRERMKRIEEGIKELGSQILKEHPVENTQLQNEKLYLYYLQNGRDMYVDQELDINRLSDYDVDHIVPQSFLKDDSIDNKVLTRSDKARGKSDNVPSEEVVKKMKNYWRQLLNAKLITQRKFDNLTKAERGGLSELDKAGFIKRQLVETRQITKHVAQILDSRMNTKYDENDKLIREVKVITLKSKLVSDFRKDFQFYKVREINNYHHAHDAYLNAVVGTALIKKYPKLESEFVYGDYKVYDVRKMIAKSEQEIGKATAKYFFYSNIMNFFKTEITLANGEIRKRPLIETNGETGEIVWDKGRDFATVRKVLSMPQVNIVKKTEVQTGGFSKESILPKRNSDKLIARKKDWDPKKYGGFDSPTVAYSVLVVAKVEKGKSKKLKSVKELLGITIMERSSFEKNPIDFLEAKGYKEVKKDLIIKLPKYSLFELENGRKRMLASAGELQKGNELALPSKYVNFLYLASHYEKLKGSPEDNEQKQLFVEQHKHYLDEIIEQISEFSKRVILADANLDKVLSAYNKHRDKPIREQAENIIHLFTLTNLGAPAAFKYFDTTIDRKRYTSTKEVLDATLIHQSITGLYETRIDLSQLGGDGGGGGGSSGGSGGTVSLQDEHRLFDIPVTTSLPDVWLQDFPQAWAETGGLGRAKCQAPIIIDLKPTAVPVSIKQYPMSLEAHMGIRQHIIKFLELGVLRPCRSPWNTPLLPVKKPGTQDYRPVQDLREINKRTVDIHPTVPNPYNLLSTLKPDYSWYTVLDLKDAFFCLPLAPQSQELFAFEWKDPERGISGQLTWTRLPQGFKNSPTLFNEALHRDLTDFRTQHPEVTLLQYVDDLLLAAPTKKACTQGTRHLLQELGEKGYRASAKKAQICQTKVTYLGYILSEGKRWLTPGRIETVARIPPPRNPREVREFLGKAGFCRLFIPGFAELAAPLYALTKPSTPFTWQTEHQLAFEALKKALLSAPALGLPDTSKPFTLFLDERQGIAKGVLTQKLGPWKRPVAYLSKKLDPVAAGWPPCLRIMAATAMLVKDSAKLTLGQPLTVITPHTLEAIVRQPPDRWITNARLTHYQALLLDTDRVQFGPPVTLNPATLLPVPENQPSPHDCRQVLAETHGTREDLKDQELPDADHTWYTDGSSYLDSGTRRAGAAVVDGHNTIWAQSLPPGTSAQKAELIALTKALELSKGKKANIYTDSRYAFATAHTHGSIYERRGWLTSEGKEIKNKAEIIALLKALFLPQEVAIIHCPGHQKGQDPVAVGNRQADRVARQAAMAEVLTLATEPDNTSHITAGKRTADGSEFEKRTADGSEFESPKKKAKVE

SEQ ID NO: 1992 - protein, 2106 aa, synthetic construct
MPAAKRVKLDGGDKKYSIGLDIGTNSVGWAVITDEYKVPSKKFKVLGNTDRHSIKKNLIGALLFDSGETAEATRLKRTARRRYTRRKNRICYLQEIFSNEMAKVDDSFFHRLEESFLVEEDKKHERHPIFGNIVDEVAYHEKYPTIYHLRKKLVDSTDKADLRLIYLALAHMIKFRGHFLIEGDLNPDNSDVDKLFIQLVQTYNQLFEENPINASGVDAKAILSARLSKSRRLENLIAQLPGEKKNGLFGNLIALSLGLTPNFKSNFDLAEDAKLQLSKDTYDDDLDNLLAQIGDQYADLFLAAKNLSDAILLSDILRVNTEITKAPLSASMIKRYDEHHQDLTLLKALVRQQLPEKYKEIFFDQSKNGYAGYIDGGASQEEFYKFIKPILEKMDGTEELLVKLNREDLLRKQRTFDNGSIPHQIHLGELHAILRRQEDFYPFLKDNREKIEKILTFRIPYYVGPLARGNSRFAWMTRKSEETITPWNFEEVVDKGASAQSFIERMTNFDKNLPNEKVLPKHSLLYEYFTVYNELTKVKYVTEGMRKPAFLSGEQKKAIVDLLFKTNRKVTVKQLKEDYFKKIECFDSVEISGVEDRFNASLGTYHDLLKIIKDKDFLDNEENEDILEDIVLTLTLFEDREMIEERLKTYAHLFDDKVMKQLKRRRYTGWGRLSRKLINGIRDKQSGKTILDFLKSDGFANRNFMQLIHDDSLTFKEDIQKAQVSGQGDSLHEHIANLAGSPAIKKGILQTVKVVDELVKVMGRHKPENIVIEMARENQTTQKGQKNSRERMKRIEEGIKELGSQILKEHPVENTQLQNEKLYLYYLQNGRDMYVDQELDINRLSDYDVDHIVPQSFLKDDSIDNKVLTRSDKARGKSDNVPSEEVVKKMKNYWRQLLNAKLITQRKFDNLTKAERGGLSELDKAGFIKRQLVETRQITKHVAQILDSRMNTKYDENDKLIREVKVITLKSKLVSDFRKDFQFYKVREINNYHHAHDAYLNAVVGTALIKKYPKLESEFVYGDYKVYDVRKMIAKSEQEIGKATAKYFFYSNIMNFFKTEITLANGEIRKRPLIETNGETGEIVWDKGRDFATVRKVLSMPQVNIVKKTEVQTGGFSKESILPKRNSDKLIARKKDWDPKKYGGFDSPTVAYSVLVVAKVEKGKSKKLKSVKELLGITIMERSSFEKNPIDFLEAKGYKEVKKDLIIKLPKYSLFELENGRKRMLASAGELQKGNELALPSKYVNFLYLASHYEKLKGSPEDNEQKQLFVEQHKHYLDEIIEQISEFSKRVILADANLDKVLSAYNKHRDKPIREQAENIIHLFTLTNLGAPAAFKYFDTTIDRKRYTSTKEVLDATLIHQSITGLYETRIDLSQLGGDGGGGSGGSGGSGGSGGSGGTVSLQDEHRLFDIPVTTSLPDVWLQDFPQAWAETGGLGRAKCQAPIIIDLKPTAVPVSIKQYPMSLEAHMGIRQHIIKFLELGVLRPCRSPWNTPLLPVKKPGTQDYRPVQDLREINKRTVDIHPTVPNPYNLLSTLKPDYSWYTVLDLKDAFFCLPLAPQSQELFAFEWKDPERGISGQLTWTRLPQGFKNSPTLFNEALHRDLTDFRTQHPEVTLLQYVDDLLLAAPTKKACTQGTRHLLQELGEKGYRASAKKAQICQTKVTYLGYILSEGKRWLTPGRIETVARIPPPRNPREVREFLGKAGFCRLFIPGFAELAAPLYALTKPSTPFTWQTEHQLAFEALKKALLSAPALGLPDTSKPFTLFLDERQGIAKGVLTQKLGPWKRPVAYLSKKLDPVAAGWPPCLRIMAATAMLVKDSAKLTLGQPLTVITPHTLEAIVRQPPDRWITNARLTHYQALLLDTDRVQFGPPVTLNPATLLPVPENQPSPHDCRQVLAETHGTREDLKDQELPDADHTWYTDGSSYLDSGTRRAGAAVVDGHNTIWAQSLPPGTSAQKAELIALTKALELSKGKKANIYTDSRYAFATAHTHGSIYERRGWLTSEGKEIKNKAEIIALLKALFLPQEVAIIHCPGHQKGQDPVAVGNRQADRVARQAAMAEVLTLATEPDNTSHITAGKRTADGSEFEKRTADGSEFESPKKKAKVE

SEQ ID NO: 1993 - protein, 2100 aa, synthetic construct
MPAAKRVKLDGGDKKYSIGLDIGTNSVGWAVITDEYKVPSKKFKVLGNTDRHSIKKNLIGALLFDSGETAEATRLKRTARRRYTRRKNRICYLQEIFSNEMAKVDDSFFHRLEESFLVEEDKKHERHPIFGNIVDEVAYHEKYPTIYHLRKKLVDSTDKADLRLIYLALAHMIKFRGHFLIEGDLNPDNSDVDKLFIQLVQTYNQLFEENPINASGVDAKAILSARLSKSRRLENLIAQLPGEKKNGLFGNLIALSLGLTPNFKSNFDLAEDAKLQLSKDTYDDDLDNLLAQIGDQYADLFLAAKNLSDAILLSDILRVNTEITKAPLSASMIKRYDEHHQDLTLLKALVRQQLPEKYKEIFFDQSKNGYAGYIDGGASQEEFYKFIKPILEKMDGTEELLVKLNREDLLRKQRTFDNGSIPHQIHLGELHAILRRQEDFYPFLKDNREKIEKILTFRIPYYVGPLARGNSRFAWMTRKSEETITPWNFEEVVDKGASAQSFIERMTNFDKNLPNEKVLPKHSLLYEYFTVYNELTKVKYVTEGMRKPAFLSGEQKKAIVDLLFKTNRKVTVKQLKEDYFKKIECFDSVEISGVEDRFNASLGTYHDLLKIIKDKDFLDNEENEDILEDIVLTLTLFEDREMIEERLKTYAHLFDDKVMKQLKRRRYTGWGRLSRKLINGIRDKQSGKTILDFLKSDGFANRNFMQLIHDDSLTFKEDIQKAQVSGQGDSLHEHIANLAGSPAIKKGILQTVKVVDELVKVMGRHKPENIVIEMARENQTTQKGQKNSRERMKRIEEGIKELGSQILKEHPVENTQLQNEKLYLYYLQNGRDMYVDQELDINRLSDYDVDHIVPQSFLKDDSIDNKVLTRSDKARGKSDNVPSEEVVKKMKNYWRQLLNAKLITQRKFDNLTKAERGGLSELDKAGFIKRQLVETRQITKHVAQILDSRMNTKYDENDKLIREVKVITLKSKLVSDFRKDFQFYKVREINNYHHAHDAYLNAVVGTALIKKYPKLESEFVYGDYKVYDVRKMIAKSEQEIGKATAKYFFYSNIMNFFKTEITLANGEIRKRPLIETNGETGEIVWDKGRDFATVRKVLSMPQVNIVKKTEVQTGGFSKESILPKRNSDKLIARKKDWDPKKYGGFDSPTVAYSVLVVAKVEKGKSKKLKSVKELLGITIMERSSFEKNPIDFLEAKGYKEVKKDLIIKLPKYSLFELENGRKRMLASAGELQKGNELALPSKYVNFLYLASHYEKLKGSPEDNEQKQLFVEQHKHYLDEIIEQISEFSKRVILADANLDKVLSAYNKHRDKPIREQAENIIHLFTLTNLGAPAAFKYFDTTIDRKRYTSTKEVLDATLIHQSITGLYETRIDLSQLGGDGGGSSGGSGGGGGTVSLQDEHRLFDIPVTTSLPDVWLQDFPQAWAETGGLGRAKCQAPIIIDLKPTAVPVSIKQYPMSLEAHMGIRQHIIKFLELGVLRPCRSPWNTPLLPVKKPGTQDYRPVQDLREINKRTVDIHPTVPNPYNLLSTLKPDYSWYTVLDLKDAFFCLPLAPQSQELFAFEWKDPERGISGQLTWTRLPQGFKNSPTLFNEALHRDLTDFRTQHPEVTLLQYVDDLLLAAPTKKACTQGTRHLLQELGEKGYRASAKKAQICQTKVTYLGYILSEGKRWLTPGRIETVARIPPPRNPREVREFLGKAGFCRLFIPGFAELAAPLYALTKPSTPFTWQTEHQLAFEALKKALLSAPALGLPDTSKPFTLFLDERQGIAKGVLTQKLGPWKRPVAYLSKKLDPVAAGWPPCLRIMAATAMLVKDSAKLTLGQPLTVITPHTLEAIVRQPPDRWITNARLTHYQALLLDTDRVQFGPPVTLNPATLLPVPENQPSPHDCRQVLAETHGTREDLKDQELPDADHTWYTDGSSYLDSGTRRAGAAVVDGHNTIWAQSLPPGTSAQKAELIALTKALELSKGKKANIYTDSRYAFATAHTHGSIYERRGWLTSEGKEIKNKAEIIALLKALFLPQEVAIIHCPGHQKGQDPVAVGNRQADRVARQAAMAEVLTLATEPDNTSHITAGKRTADGSEFEKRTADGSEFESPKKKAKVE

SEQ ID NO: 1994 - protein, 2103 aa, synthetic construct
MPAAKRVKLDGGDKKYSIGLDIGTNSVGWAVITDEYKVPSKKFKVLGNTDRHSIKKNLIGALLFDSGETAEATRLKRTARRRYTRRKNRICYLQEIFSNEMAKVDDSFFHRLEESFLVEEDKKHERHPIFGNIVDEVAYHEKYPTIYHLRKKLVDSTDKADLRLIYLALAHMIKFRGHFLIEGDLNPDNSDVDKLFIQLVQTYNQLFEENPINASGVDAKAILSARLSKSRRLENLIAQLPGEKKNGLFGNLIALSLGLTPNFKSNFDLAEDAKLQLSKDTYDDDLDNLLAQIGDQYADLFLAAKNLSDAILLSDILRVNTEITKAPLSASMIKRYDEHHQDLTLLKALVRQQLPEKYKEIFFDQSKNGYAGYIDGGASQEEFYKFIKPILEKMDGTEELLVKLNREDLLRKQRTFDNGSIPHQIHLGELHAILRRQEDFYPFLKDNREKIEKILTFRIPYYVGPLARGNSRFAWMTRKSEETITPWNFEEVVDKGASAQSFIERMTNFDKNLPNEKVLPKHSLLYEYFTVYNELTKVKYVTEGMRKPAFLSGEQKKAIVDLLFKTNRKVTVKQLKEDYFKKIECFDSVEISGVEDRFNASLGTYHDLLKIIKDKDFLDNEENEDILEDIVLTLTLFEDREMIEERLKTYAHLFDDKVMKQLKRRRYTGWGRLSRKLINGIRDKQSGKTILDFLKSDGFANRNFMQLIHDDSLTFKEDIQKAQVSGQGDSLHEHIANLAGSPAIKKGILQTVKVVDELVKVMGRHKPENIVIEMARENQTTQKGQKNSRERMKRIEEGIKELGSQILKEHPVENTQLQNEKLYLYYLQNGRDMYVDQELDINRLSDYDVDHIVPQSFLKDDSIDNKVLTRSDKARGKSDNVPSEEVVKKMKNYWRQLLNAKLITQRKFDNLTKAERGGLSELDKAGFIKRQLVETRQITKHVAQILDSRMNTKYDENDKLIREVKVITLKSKLVSDFRKDFQFYKVREINNYHHAHDAYLNAVVGTALIKKYPKLESEFVYGDYKVYDVRKMIAKSEQEIGKATAKYFFYSNIMNFFKTEITLANGEIRKRPLIETNGETGEIVWDKGRDFATVRKVLSMPQVNIVKKTEVQTGGFSKESILPKRNSDKLIARKKDWDPKKYGGFDSPTVAYSVLVVAKVEKGKSKKLKSVKELLGITIMERSSFEKNPIDFLEAKGYKEVKKDLIIKLPKYSLFELENGRKRMLASAGELQKGNELALPSKYVNFLYLASHYEKLKGSPEDNEQKQLFVEQHKHYLDEIIEQISEFSKRVILADANLDKVLSAYNKHRDKPIREQAENIIHLFTLTNLGAPAAFKYFDTTIDRKRYTSTKEVLDATLIHQSITGLYETRIDLSQLGGDGGGSSGSSGSSGSSGGTVSLQDEHRLFDIPVTTSLPDVWLQDFPQAWAETGGLGRAKCQAPIIIDLKPTAVPVSIKQYPMSLEAHMGIRQHIIKFLELGVLRPCRSPWNTPLLPVKKPGTQDYRPVQDLREINKRTVDIHPTVPNPYNLLSTLKPDYSWYTVLDLKDAFFCLPLAPQSQELFAFEWKDPERGISGQLTWTRLPQGFKNSPTLFNEALHRDLTDFRTQHPEVTLLQYVDDLLLAAPTKKACTQGTRHLLQELGEKGYRASAKKAQICQTKVTYLGYILSEGKRWLTPGRIETVARIPPPRNPREVREFLGKAGFCRLFIPGFAELAAPLYALTKPSTPFTWQTEHQLAFEALKKALLSAPALGLPDTSKPFTLFLDERQGIAKGVLTQKLGPWKRPVAYLSKKLDPVAAGWPPCLRIMAATAMLVKDSAKLTLGQPLTVITPHTLEAIVRQPPDRWITNARLTHYQALLLDTDRVQFGPPVTLNPATLLPVPENQPSPHDCRQVLAETHGTREDLKDQELPDADHTWYTDGSSYLDSGTRRAGAAVVDGHNTIWAQSLPPGTSAQKAELIALTKALELSKGKKANIYTDSRYAFATAHTHGSIYERRGWLTSEGKEIKNKAEIIALLKALFLPQEVAIIHCPGHQKGQDPVAVGNRQADRVARQAAMAEVLTLATEPDNTSHITAGKRTADGSEFEKRTADGSEFESPKKKAKVE

SEQ ID NO: 1995 - protein, 2099 aa, synthetic construct
MPAAKRVKLDGGDKKYSIGLDIGTNSVGWAVITDEYKVPSKKFKVLGNTDRHSIKKNLIGALLFDSGETAEATRLKRTARRRYTRRKNRICYLQEIFSNEMAKVDDSFFHRLEESFLVEEDKKHERHPIFGNIVDEVAYHEKYPTIYHLRKKLVDSTDKADLRLIYLALAHMIKFRGHFLIEGDLNPDNSDVDKLFIQLVQTYNQLFEENPINASGVDAKAILSARLSKSRRLENLIAQLPGEKKNGLFGNLIALSLGLTPNFKSNFDLAEDAKLQLSKDTYDDDLDNLLAQIGDQYADLFLAAKNLSDAILLSDILRVNTEITKAPLSASMIKRYDEHHQDLTLLKALVRQQLPEKYKEIFFDQSKNGYAGYIDGGASQEEFYKFIKPILEKMDGTEELLVKLNREDLLRKQRTFDNGSIPHQIHLGELHAILRRQEDFYPFLKDNREKIEKILTFRIPYYVGPLARGNSRFAWMTRKSEETITPWNFEEVVDKGASAQSFIERMTNFDKNLPNEKVLPKHSLLYEYFTVYNELTKVKYVTEGMRKPAFLSGEQKKAIVDLLFKTNRKVTVKQLKEDYFKKIECFDSVEISGVEDRFNASLGTYHDLLKIIKDKDFLDNEENEDILEDIVLTLTLFEDREMIEERLKTYAHLFDDKVMKQLKRRRYTGWGRLSRKLINGIRDKQSGKTILDFLKSDGFANRNFMQLIHDDSLTFKEDIQKAQVSGQGDSLHEHIANLAGSPAIKKGILQTVKVVDELVKVMGRHKPENIVIEMARENQTTQKGQKNSRERMKRIEEGIKELGSQILKEHPVENTQLQNEKLYLYYLQNGRDMYVDQELDINRLSDYDVDHIVPQSFLKDDSIDNKVLTRSDKARGKSDNVPSEEVVKKMKNYWRQLLNAKLITQRKFDNLTKAERGGLSELDKAGFIKRQLVETRQITKHVAQILDSRMNTKYDENDKLIREVKVITLKSKLVSDFRKDFQFYKVREINNYHHAHDAYLNAVVGTALIKKYPKLESEFVYGDYKVYDVRKMIAKSEQEIGKATAKYFFYSNIMNFFKTEITLANGEIRKRPLIETNGETGEIVWDKGRDFATVRKVLSMPQVNIVKKTEVQTGGFSKESILPKRNSDKLIARKKDWDPKKYGGFDSPTVAYSVLVVAKVEKGKSKKLKSVKELLGITIMERSSFEKNPIDFLEAKGYKEVKKDLIIKLPKYSLFELENGRKRMLASAGELQKGNELALPSKYVNFLYLASHYEKLKGSPEDNEQKQLFVEQHKHYLDEIIEQISEFSKRVILADANLDKVLSAYNKHRDKPIREQAENIIHLFTLTNLGAPAAFKYFDTTIDRKRYTSTKEVLDATLIHQSITGLYETRIDLSQLGGDGGPAPEAAAKGGTVSLQDEHRLFDIPVTTSLPDVWLQDFPQAWAETGGLGRAKCQAPIIIDLKPTAVPVSIKQYPMSLEAHMGIRQHIIKFLELGVLRPCRSPWNTPLLPVKKPGTQDYRPVQDLREINKRTVDIHPTVPNPYNLLSTLKPDYSWYTVLDLKDAFFCLPLAPQSQELFAFEWKDPERGISGQLTWTRLPQGFKNSPTLFNEALHRDLTDFRTQHPEVTLLQYVDDLLLAAPTKKACTQGTRHLLQELGEKGYRASAKKAQICQTKVTYLGYILSEGKRWLTPGRIETVARIPPPRNPREVREFLGKAGFCRLFIPGFAELAAPLYALTKPSTPFTWQTEHQLAFEALKKALLSAPALGLPDTSKPFTLFLDERQGIAKGVLTQKLGPWKRPVAYLSKKLDPVAAGWPPCLRIMAATAMLVKDSAKLTLGQPLTVITPHTLEAIVRQPPDRWITNARLTHYQALLLDTDRVQFGPPVTLNPATLLPVPENQPSPHDCRQVLAETHGTREDLKDQELPDADHTWYTDGSSYLDSGTRRAGAAVVDGHNTIWAQSLPPGTSAQKAELIALTKALELSKGKKANIYTDSRYAFATAHTHGSIYERRGWLTSEGKEIKNKAEIIALLKALFLPQEVAIIHCPGHQKGQDPVAVGNRQADRVARQAAMAEVLTLATEPDNTSHITAGKRTADGSEFEKRTADGSEFESPKKKAKVE

SEQ ID NO: 1996 - protein, 2097 aa, synthetic construct
MPAAKRVKLDGGDKKYSIGLDIGTNSVGWAVITDEYKVPSKKFKVLGNTDRHSIKKNLIGALLFDSGETAEATRLKRTARRRYTRRKNRICYLQEIFSNEMAKVDDSFFHRLEESFLVEEDKKHERHPIFGNIVDEVAYHEKYPTIYHLRKKLVDSTDKADLRLIYLALAHMIKFRGHFLIEGDLNPDNSDVDKLFIQLVQTYNQLFEENPINASGVDAKAILSARLSKSRRLENLIAQLPGEKKNGLFGNLIALSLGLTPNFKSNFDLAEDAKLQLSKDTYDDDLDNLLAQIGDQYADLFLAAKNLSDAILLSDILRVNTEITKAPLSASMIKRYDEHHQDLTLLKALVRQQLPEKYKEIFFDQSKNGYAGYIDGGASQEEFYKFIKPILEKMDGTEELLVKLNREDLLRKQRTFDNGSIPHQIHLGELHAILRRQEDFYPFLKDNREKIEKILTFRIPYYVGPLARGNSRFAWMTRKSEETITPWNFEEVVDKGASAQSFIERMTNFDKNLPNEKVLPKHSLLYEYFTVYNELTKVKYVTEGMRKPAFLSGEQKKAIVDLLFKTNRKVTVKQLKEDYFKKIECFDSVEISGVEDRFNASLGTYHDLLKIIKDKDFLDNEENEDILEDIVLTLTLFEDREMIEERLKTYAHLFDDKVMKQLKRRRYTGWGRLSRKLINGIRDKQSGKTILDFLKSDGFANRNFMQLIHDDSLTFKEDIQKAQVSGQGDSLHEHIANLAGSPAIKKGILQTVKVVDELVKVMGRHKPENIVIEMARENQTTQKGQKNSRERMKRIEEGIKELGSQILKEHPVENTQLQNEKLYLYYLQNGRDMYVDQELDINRLSDYDVDHIVPQSFLKDDSIDNKVLTRSDKARGKSDNVPSEEVVKKMKNYWRQLLNAKLITQRKFDNLTKAERGGLSELDKAGFIKRQLVETRQITKHVAQILDSRMNTKYDENDKLIREVKVITLKSKLVSDFRKDFQFYKVREINNYHHAHDAYLNAVVGTALIKKYPKLESEFVYGDYKVYDVRKMIAKSEQEIGKATAKYFFYSNIMNFFKTEITLANGEIRKRPLIETNGETGEIVWDKGRDFATVRKVLSMPQVNIVKKTEVQTGGFSKESILPKRNSDKLIARKKDWDPKKYGGFDSPTVAYSVLVVAKVEKGKSKKLKSVKELLGITIMERSSFEKNPIDFLEAKGYKEVKKDLIIKLPKYSLFELENGRKRMLASAGELQKGNELALPSKYVNFLYLASHYEKLKGSPEDNEQKQLFVEQHKHYLDEIIEQISEFSKRVILADANLDKVLSAYNKHRDKPIREQAENIIHLFTLTNLGAPAAFKYFDTTIDRKRYTSTKEVLDATLIHQSITGLYETRIDLSQLGGDGGGGGPAPGGTVSLQDEHRLFDIPVTTSLPDVWLQDFPQAWAETGGLGRAKCQAPIIIDLKPTAVPVSIKQYPMSLEAHMGIRQHIIKFLELGVLRPCRSPWNTPLLPVKKPGTQDYRPVQDLREINKRTVDIHPTVPNPYNLLSTLKPDYSWYTVLDLKDAFFCLPLAPQSQELFAFEWKDPERGISGQLTWTRLPQGFKNSPTLFNEALHRDLTDFRTQHPEVTLLQYVDDLLLAAPTKKACTQGTRHLLQELGEKGYRASAKKAQICQTKVTYLGYILSEGKRWLTPGRIETVARIPPPRNPREVREFLGKAGFCRLFIPGFAELAAPLYALTKPSTPFTWQTEHQLAFEALKKALLSAPALGLPDTSKPFTLFLDERQGIAKGVLTQKLGPWKRPVAYLSKKLDPVAAGWPPCLRIMAATAMLVKDSAKLTLGQPLTVITPHTLEAIVRQPPDRWITNARLTHYQALLLDTDRVQFGPPVTLNPATLLPVPENQPSPHDCRQVLAETHGTREDLKDQELPDADHTWYTDGSSYLDSGTRRAGAAVVDGHNTIWAQSLPPGTSAQKAELIALTKALELSKGKKANIYTDSRYAFATAHTHGSIYERRGWLTSEGKEIKNKAEIIALLKALFLPQEVAIIHCPGHQKGQDPVAVGNRQADRVARQAAMAEVLTLATEPDNTSHITAGKRTADGSEFEKRTADGSEFESPKKKAKVE

SEQ ID NO: 1997 - protein, 2099 aa, synthetic construct
MPAAKRVKLDGGDKKYSIGLDIGTNSVGWAVITDEYKVPSKKFKVLGNTDRHSIKKNLIGALLFDSGETAEATRLKRTARRRYTRRKNRICYLQEIFSNEMAKVDDSFFHRLEESFLVEEDKKHERHPIFGNIVDEVAYHEKYPTIYHLRKKLVDSTDKADLRLIYLALAHMIKFRGHFLIEGDLNPDNSDVDKLFIQLVQTYNQLFEENPINASGVDAKAILSARLSKSRRLENLIAQLPGEKKNGLFGNLIALSLGLTPNFKSNFDLAEDAKLQLSKDTYDDDLDNLLAQIGDQYADLFLAAKNLSDAILLSDILRVNTEITKAPLSASMIKRYDEHHQDLTLLKALVRQQLPEKYKEIFFDQSKNGYAGYIDGGASQEEFYKFIKPILEKMDGTEELLVKLNREDLLRKQRTFDNGSIPHQIHLGELHAILRRQEDFYPFLKDNREKIEKILTFRIPYYVGPLARGNSRFAWMTRKSEETITPWNFEEVVDKGASAQSFIERMTNFDKNLPNEKVLPKHSLLYEYFTVYNELTKVKYVTEGMRKPAFLSGEQKKAIVDLLFKTNRKVTVKQLKEDYFKKIECFDSVEISGVEDRFNASLGTYHDLLKIIKDKDFLDNEENEDILEDIVLTLTLFEDREMIEERLKTYAHLFDDKVMKQLKRRRYTGWGRLSRKLINGIRDKQSGKTILDFLKSDGFANRNFMQLIHDDSLTFKEDIQKAQVSGQGDSLHEHIANLAGSPAIKKGILQTVKVVDELVKVMGRHKPENIVIEMARENQTTQKGQKNSRERMKRIEEGIKELGSQILKEHPVENTQLQNEKLYLYYLQNGRDMYVDQELDINRLSDYDVDHIVPQSFLKDDSIDNKVLTRSDKARGKSDNVPSEEVVKKMKNYWRQLLNAKLITQRKFDNLTKAERGGLSELDKAGFIKRQLVETRQITKHVAQILDSRMNTKYDENDKLIREVKVITLKSKLVSDFRKDFQFYKVREINNYHHAHDAYLNAVVGTALIKKYPKLESEFVYGDYKVYDVRKMIAKSEQEIGKATAKYFFYSNIMNFFKTEITLANGEIRKRPLIETNGETGEIVWDKGRDFATVRKVLSMPQVNIVKKTEVQTGGFSKESILPKRNSDKLIARKKDWDPKKYGGFDSPTVAYSVLVVAKVEKGKSKKLKSVKELLGITIMERSSFEKNPIDFLEAKGYKEVKKDLIIKLPKYSLFELENGRKRMLASAGELQKGNELALPSKYVNFLYLASHYEKLKGSPEDNEQKQLFVEQHKHYLDEIIEQISEFSKRVILADANLDKVLSAYNKHRDKPIREQAENIIHLFTLTNLGAPAAFKYFDTTIDRKRYTSTKEVLDATLIHQSITGLYETRIDLSQLGGDGGGGSEAAAKGGTVSLQDEHRLFDIPVTTSLPDVWLQDFPQAWAETGGLGRAKCQAPIIIDLKPTAVPVSIKQYPMSLEAHMGIRQHIIKFLELGVLRPCRSPWNTPLLPVKKPGTQDYRPVQDLREINKRTVDIHPTVPNPYNLLSTLKPDYSWYTVLDLKDAFFCLPLAPQSQELFAFEWKDPERGISGQLTWTRLPQGFKNSPTLFNEALHRDLTDFRTQHPEVTLLQYVDDLLLAAPTKKACTQGTRHLLQELGEKGYRASAKKAQICQTKVTYLGYILSEGKRWLTPGRIETVARIPPPRNPREVREFLGKAGFCRLFIPGFAELAAPLYALTKPSTPFTWQTEHQLAFEALKKALLSAPALGLPDTSKPFTLFLDERQGIAKGVLTQKLGPWKRPVAYLSKKLDPVAAGWPPCLRIMAATAMLVKDSAKLTLGQPLTVITPHTLEAIVRQPPDRWITNARLTHYQALLLDTDRVQFGPPVTLNPATLLPVPENQPSPHDCRQVLAETHGTREDLKDQELPDADHTWYTDGSSYLDSGTRRAGAAVVDGHNTIWAQSLPPGTSAQKAELIALTKALELSKGKKANIYTDSRYAFATAHTHGSIYERRGWLTSEGKEIKNKAEIIALLKALFLPQEVAIIHCPGHQKGQDPVAVGNRQADRVARQAAMAEVLTLATEPDNTSHITAGKRTADGSEFEKRTADGSEFESPKKKAKVE

SEQ ID NO: 1998 - protein, 2096 aa, synthetic construct
MPAAKRVKLDGGDKKYSIGLDIGTNSVGWAVITDEYKVPSKKFKVLGNTDRHSIKKNLIGALLFDSGETAEATRLKRTARRRYTRRKNRICYLQEIFSNEMAKVDDSFFHRLEESFLVEEDKKHERHPIFGNIVDEVAYHEKYPTIYHLRKKLVDSTDKADLRLIYLALAHMIKFRGHFLIEGDLNPDNSDVDKLFIQLVQTYNQLFEENPINASGVDAKAILSARLSKSRRLENLIAQLPGEKKNGLFGNLIALSLGLTPNFKSNFDLAEDAKLQLSKDTYDDDLDNLLAQIGDQYADLFLAAKNLSDAILLSDILRVNTEITKAPLSASMIKRYDEHHQDLTLLKALVRQQLPEKYKEIFFDQSKNGYAGYIDGGASQEEFYKFIKPILEKMDGTEELLVKLNREDLLRKQRTFDNGSIPHQIHLGELHAILRRQEDFYPFLKDNREKIEKILTFRIPYYVGPLARGNSRFAWMTRKSEETITPWNFEEVVDKGASAQSFIERMTNFDKNLPNEKVLPKHSLLYEYFTVYNELTKVKYVTEGMRKPAFLSGEQKKAIVDLLFKTNRKVTVKQLKEDYFKKIECFDSVEISGVEDRFNASLGTYHDLLKIIKDKDFLDNEENEDILEDIVLTLTLFEDREMIEERLKTYAHLFDDKVMKQLKRRRYTGWGRLSRKLINGIRDKQSGKTILDFLKSDGFANRNFMQLIHDDSLTFKEDIQKAQVSGQGDSLHEHIANLAGSPAIKKGILQTVKVVDELVKVMGRHKPENIVIEMARENQTTQKGQKNSRERMKRIEEGIKELGSQILKEHPVENTQLQNEKLYLYYLQNGRDMYVDQELDINRLSDYDVDHIVPQSFLKDDSIDNKVLTRSDKARGKSDNVPSEEVVKKMKNYWRQLLNAKLITQRKFDNLTKAERGGLSELDKAGFIKRQLVETRQITKHVAQILDSRMNTKYDENDKLIREVKVITLKSKLVSDFRKDFQFYKVREINNYHHAHDAYLNAVVGTALIKKYPKLESEFVYGDYKVYDVRKMIAKSEQEIGKATAKYFFYSNIMNFFKTEITLANGEIRKRPLIETNGETGEIVWDKGRDFATVRKVLSMPQVNIVKKTEVQTGGFSKESILPKRNSDKLIARKKDWDPKKYGGFDSPTVAYSVLVVAKVEKGKSKKLKSVKELLGITIMERSSFEKNPIDFLEAKGYKEVKKDLIIKLPKYSLFELENGRKRMLASAGELQKGNELALPSKYVNFLYLASHYEKLKGSPEDNEQKQLFVEQHKHYLDEIIEQISEFSKRVILADANLDKVLSAYNKHRDKPIREQAENIIHLFTLTNLGAPAAFKYFDTTIDRKRYTSTKEVLDATLIHQSITGLYETRIDLSQLGGDGGGGGGGGGTVSLQDEHRLFDIPVTTSLPDVWLQDFPQAWAETGGLGRAKCQAPIIIDLKPTAVPVSIKQYPMSLEAHMGIRQHIIKFLELGVLRPCRSPWNTPLLPVKKPGTQDYRPVQDLREINKRTVDIHPTVPNPYNLLSTLKPDYSWYTVLDLKDAFFCLPLAPQSQELFAFEWKDPERGISGQLTWTRLPQGFKNSPTLFNEALHRDLTDFRTQHPEVTLLQYVDDLLLAAPTKKACTQGTRHLLQELGEKGYRASAKKAQICQTKVTYLGYILSEGKRWLTPGRIETVARIPPPRNPREVREFLGKAGFCRLFIPGFAELAAPLYALTKPSTPFTWQTEHQLAFEALKKALLSAPALGLPDTSKPFTLFLDERQGIAKGVLTQKLGPWKRPVAYLSKKLDPVAAGWPPCLRIMAATAMLVKDSAKLTLGQPLTVITPHTLEAIVRQPPDRWITNARLTHYQALLLDTDRVQFGPPVTLNPATLLPVPENQPSPHDCRQVLAETHGTREDLKDQELPDADHTWYTDGSSYLDSGTRRAGAAVVDGHNTIWAQSLPPGTSAQKAELIALTKALELSKGKKANIYTDSRYAFATAHTHGSIYERRGWLTSEGKEIKNKAEIIALLKALFLPQEVAIIHCPGHQKGQDPVAVGNRQADRVARQAAMAEVLTLATEPDNTSHITAGKRTADGSEFEKRTADGSEFESPKKKAKVE

SEQ ID NO: 1999 - protein, 2094 aa, synthetic construct
MPAAKRVKLDGGDKKYSIGLDIGTNSVGWAVITDEYKVPSKKFKVLGNTDRHSIKKNLIGALLFDSGETAEATRLKRTARRRYTRRKNRICYLQEIFSNEMAKVDDSFFHRLEESFLVEEDKKHERHPIFGNIVDEVAYHEKYPTIYHLRKKLVDSTDKADLRLIYLALAHMIKFRGHFLIEGDLNPDNSDVDKLFIQLVQTYNQLFEENPINASGVDAKAILSARLSKSRRLENLIAQLPGEKKNGLFGNLIALSLGLTPNFKSNFDLAEDAKLQLSKDTYDDDLDNLLAQIGDQYADLFLAAKNLSDAILLSDILRVNTEITKAPLSASMIKRYDEHHQDLTLLKALVRQQLPEKYKEIFFDQSKNGYAGYIDGGASQEEFYKFIKPILEKMDGTEELLVKLNREDLLRKQRTFDNGSIPHQIHLGELHAILRRQEDFYPFLKDNREKIEKILTFRIPYYVGPLARGNSRFAWMTRKSEETITPWNFEEVVDKGASAQSFIERMTNFDKNLPNEKVLPKHSLLYEYFTVYNELTKVKYVTEGMRKPAFLSGEQKKAIVDLLFKTNRKVTVKQLKEDYFKKIECFDSVEISGVEDRFNASLGTYHDLLKIIKDKDFLDNEENEDILEDIVLTLTLFEDREMIEERLKTYAHLFDDKVMKQLKRRRYTGWGRLSRKLINGIRDKQSGKTILDFLKSDGFANRNFMQLIHDDSLTFKEDIQKAQVSGQGDSLHEHIANLAGSPAIKKGILQTVKVVDELVKVMGRHKPENIVIEMARENQTTQKGQKNSRERMKRIEEGIKELGSQILKEHPVENTQLQNEKLYLYYLQNGRDMYVDQELDINRLSDYDVDHIVPQSFLKDDSIDNKVLTRSDKARGKSDNVPSEEVVKKMKNYWRQLLNAKLITQRKFDNLTKAERGGLSELDKAGFIKRQLVETRQITKHVAQILDSRMNTKYDENDKLIREVKVITLKSKLVSDFRKDFQFYKVREINNYHHAHDAYLNAVVGTALIKKYPKLESEFVYGDYKVYDVRKMIAKSEQEIGKATAKYFFYSNIMNFFKTEITLANGEIRKRPLIETNGETGEIVWDKGRDFATVRKVLSMPQVNIVKKTEVQTGGFSKESILPKRNSDKLIARKKDWDPKKYGGFDSPTVAYSVLVVAKVEKGKSKKLKSVKELLGITIMERSSFEKNPIDFLEAKGYKEVKKDLIIKLPKYSLFELENGRKRMLASAGELQKGNELALPSKYVNFLYLASHYEKLKGSPEDNEQKQLFVEQHKHYLDEIIEQISEFSKRVILADANLDKVLSAYNKHRDKPIREQAENIIHLFTLTNLGAPAAFKYFDTTIDRKRYTSTKEVLDATLIHQSITGLYETRIDLSQLGGDGGGGSGGTVSLQDEHRLFDIPVTTSLPDVWLQDFPQAWAETGGLGRAKCQAPIIIDLKPTAVPVSIKQYPMSLEAHMGIRQHIIKFLELGVLRPCRSPWNTPLLPVKKPGTQDYRPVQDLREINKRTVDIHPTVPNPYNLLSTLKPDYSWYTVLDLKDAFFCLPLAPQSQELFAFEWKDPERGISGQLTWTRLPQGFKNSPTLFNEALHRDLTDFRTQHPEVTLLQYVDDLLLAAPTKKACTQGTRHLLQELGEKGYRASAKKAQICQTKVTYLGYILSEGKRWLTPGRIETVARIPPPRNPREVREFLGKAGFCRLFIPGFAELAAPLYALTKPSTPFTWQTEHQLAFEALKKALLSAPALGLPDTSKPFTLFLDERQGIAKGVLTQKLGPWKRPVAYLSKKLDPVAAGWPPCLRIMAATAMLVKDSAKLTLGQPLTVITPHTLEAIVRQPPDRWITNARLTHYQALLLDTDRVQFGPPVTLNPATLLPVPENQPSPHDCRQVLAETHGTREDLKDQELPDADHTWYTDGSSYLDSGTRRAGAAVVDGHNTIWAQSLPPGTSAQKAELIALTKALELSKGKKANIYTDSRYAFATAHTHGSIYERRGWLTSEGKEIKNKAEIIALLKALFLPQEVAIIHCPGHQKGQDPVAVGNRQADRVARQAAMAEVLTLATEPDNTSHITAGKRTADGSEFEKRTADGSEFESPKKKAKVE

SEQ ID NO: 2000 - protein, 2121 aa, synthetic construct
MPAAKRVKLDGGDKKYSIGLDIGTNSVGWAVITDEYKVPSKKFKVLGNTDRHSIKKNLIGALLFDSGETAEATRLKRTARRRYTRRKNRICYLQEIFSNEMAKVDDSFFHRLEESFLVEEDKKHERHPIFGNIVDEVAYHEKYPTIYHLRKKLVDSTDKADLRLIYLALAHMIKFRGHFLIEGDLNPDNSDVDKLFIQLVQTYNQLFEENPINASGVDAKAILSARLSKSRRLENLIAQLPGEKKNGLFGNLIALSLGLTPNFKSNFDLAEDAKLQLSKDTYDDDLDNLLAQIGDQYADLFLAAKNLSDAILLSDILRVNTEITKAPLSASMIKRYDEHHQDLTLLKALVRQQLPEKYKEIFFDQSKNGYAGYIDGGASQEEFYKFIKPILEKMDGTEELLVKLNREDLLRKQRTFDNGSIPHQIHLGELHAILRRQEDFYPFLKDNREKIEKILTFRIPYYVGPLARGNSRFAWMTRKSEETITPWNFEEVVDKGASAQSFIERMTNFDKNLPNEKVLPKHSLLYEYFTVYNELTKVKYVTEGMRKPAFLSGEQKKAIVDLLFKTNRKVTVKQLKEDYFKKIECFDSVEISGVEDRFNASLGTYHDLLKIIKDKDFLDNEENEDILEDIVLTLTLFEDREMIEERLKTYAHLFDDKVMKQLKRRRYTGWGRLSRKLINGIRDKQSGKTILDFLKSDGFANRNFMQLIHDDSLTFKEDIQKAQVSGQGDSLHEHIANLAGSPAIKKGILQTVKVVDELVKVMGRHKPENIVIEMARENQTTQKGQKNSRERMKRIEEGIKELGSQILKEHPVENTQLQNEKLYLYYLQNGRDMYVDQELDINRLSDYDVDHIVPQSFLKDDSIDNKVLTRSDKARGKSDNVPSEEVVKKMKNYWRQLLNAKLITQRKFDNLTKAERGGLSELDKAGFIKRQLVETRQITKHVAQILDSRMNTKYDENDKLIREVKVITLKSKLVSDFRKDFQFYKVREINNYHHAHDAYLNAVVGTALIKKYPKLESEFVYGDYKVYDVRKMIAKSEQEIGKATAKYFFYSNIMNFFKTEITLANGEIRKRPLIETNGETGEIVWDKGRDFATVRKVLSMPQVNIVKKTEVQTGGFSKESILPKRNSDKLIARKKDWDPKKYGGFDSPTVAYSVLVVAKVEKGKSKKLKSVKELLGITIMERSSFEKNPIDFLEAKGYKEVKKDLIIKLPKYSLFELENGRKRMLASAGELQKGNELALPSKYVNFLYLASHYEKLKGSPEDNEQKQLFVEQHKHYLDEIIEQISEFSKRVILADANLDKVLSAYNKHRDKPIREQAENIIHLFTLTNLGAPAAFKYFDTTIDRKRYTSTKEVLDATLIHQSITGLYETRIDLSQLGGDGGEAAAKEAAAKEAAAKEAAAKEAAAKEAAAKGGTVSLQDEHRLFDIPVTTSLPDVWLQDFPQAWAETGGLGRAKCQAPIIIDLKPTAVPVSIKQYPMSLEAHMGIRQHIIKFLELGVLRPCRSPWNTPLLPVKKPGTQDYRPVQDLREINKRTVDIHPTVPNPYNLLSTLKPDYSWYTVLDLKDAFFCLPLAPQSQELFAFEWKDPERGISGQLTWTRLPQGFKNSPTLFNEALHRDLTDFRTQHPEVTLLQYVDDLLLAAPTKKACTQGTRHLLQELGEKGYRASAKKAQICQTKVTYLGYILSEGKRWLTPGRIETVARIPPPRNPREVREFLGKAGFCRLFIPGFAELAAPLYALTKPSTPFTWQTEHQLAFEALKKALLSAPALGLPDTSKPFTLFLDERQGIAKGVLTQKLGPWKRPVAYLSKKLDPVAAGWPPCLRIMAATAMLVKDSAKLTLGQPLTVITPHTLEAIVRQPPDRWITNARLTHYQALLLDTDRVQFGPPVTLNPATLLPVPENQPSPHDCRQVLAETHGTREDLKDQELPDADHTWYTDGSSYLDSGTRRAGAAVVDGHNTIWAQSLPPGTSAQKAELIALTKALELSKGKKANIYTDSRYAFATAHTHGSIYERRGWLTSEGKEIKNKAEIIALLKALFLPQEVAIIHCPGHQKGQDPVAVGNRQADRVARQAAMAEVLTLATEPDNTSHITAGKRTADGSEFEKRTADGSEFESPKKKAKVE

SEQ ID NO: 2001 - protein, 2102 aa, synthetic construct
MPAAKRVKLDGGDKKYSIGLDIGTNSVGWAVITDEYKVPSKKFKVLGNTDRHSIKKNLIGALLFDSGETAEATRLKRTARRRYTRRKNRICYLQEIFSNEMAKVDDSFFHRLEESFLVEEDKKHERHPIFGNIVDEVAYHEKYPTIYHLRKKLVDSTDKADLRLIYLALAHMIKFRGHFLIEGDLNPDNSDVDKLFIQLVQTYNQLFEENPINASGVDAKAILSARLSKSRRLENLIAQLPGEKKNGLFGNLIALSLGLTPNFKSNFDLAEDAKLQLSKDTYDDDLDNLLAQIGDQYADLFLAAKNLSDAILLSDILRVNTEITKAPLSASMIKRYDEHHQDLTLLKALVRQQLPEKYKEIFFDQSKNGYAGYIDGGASQEEFYKFIKPILEKMDGTEELLVKLNREDLLRKQRTFDNGSIPHQIHLGELHAILRRQEDFYPFLKDNREKIEKILTFRIPYYVGPLARGNSRFAWMTRKSEETITPWNFEEVVDKGASAQSFIERMTNFDKNLPNEKVLPKHSLLYEYFTVYNELTKVKYVTEGMRKPAFLSGEQKKAIVDLLFKTNRKVTVKQLKEDYFKKIECFDSVEISGVEDRFNASLGTYHDLLKIIKDKDFLDNEENEDILEDIVLTLTLFEDREMIEERLKTYAHLFDDKVMKQLKRRRYTGWGRLSRKLINGIRDKQSGKTILDFLKSDGFANRNFMQLIHDDSLTFKEDIQKAQVSGQGDSLHEHIANLAGSPAIKKGILQTVKVVDELVKVMGRHKPENIVIEMARENQTTQKGQKNSRERMKRIEEGIKELGSQILKEHPVENTQLQNEKLYLYYLQNGRDMYVDQELDINRLSDYDVDHIVPQSFLKDDSIDNKVLTRSDKARGKSDNVPSEEVVKKMKNYWRQLLNAKLITQRKFDNLTKAERGGLSELDKAGFIKRQLVETRQITKHVAQILDSRMNTKYDENDKLIREVKVITLKSKLVSDFRKDFQFYKVREINNYHHAHDAYLNAVVGTALIKKYPKLESEFVYGDYKVYDVRKMIAKSEQEIGKATAKYFFYSNIMNFFKTEITLANGEIRKRPLIETNGETGEIVWDKGRDFATVRKVLSMPQVNIVKKTEVQTGGFSKESILPKRNSDKLIARKKDWDPKKYGGFDSPTVAYSVLVVAKVEKGKSKKLKSVKELLGITIMERSSFEKNPIDFLEAKGYKEVKKDLIIKLPKYSLFELENGRKRMLASAGELQKGNELALPSKYVNFLYLASHYEKLKGSPEDNEQKQLFVEQHKHYLDEIIEQISEFSKRVILADANLDKVLSAYNKHRDKPIREQAENIIHLFTLTNLGAPAAFKYFDTTIDRKRYTSTKEVLDATLIHQSITGLYETRIDLSQLGGDGGEAAAKGGSGSSGGTVSLQDEHRLFDIPVTTSLPDVWLQDFPQAWAETGGLGRAKCQAPIIIDLKPTAVPVSIKQYPMSLEAHMGIRQHIIKFLELGVLRPCRSPWNTPLLPVKKPGTQDYRPVQDLREINKRTVDIHPTVPNPYNLLSTLKPDYSWYTVLDLKDAFFCLPLAPQSQELFAFEWKDPERGISGQLTWTRLPQGFKNSPTLFNEALHRDLTDFRTQHPEVTLLQYVDDLLLAAPTKKACTQGTRHLLQELGEKGYRASAKKAQICQTKVTYLGYILSEGKRWLTPGRIETVARIPPPRNPREVREFLGKAGFCRLFIPGFAELAAPLYALTKPSTPFTWQTEHQLAFEALKKALLSAPALGLPDTSKPFTLFLDERQGIAKGVLTQKLGPWKRPVAYLSKKLDPVAAGWPPCLRIMAATAMLVKDSAKLTLGQPLTVITPHTLEAIVRQPPDRWITNARLTHYQALLLDTDRVQFGPPVTLNPATLLPVPENQPSPHDCRQVLAETHGTREDLKDQELPDADHTWYTDGSSYLDSGTRRAGAAVVDGHNTIWAQSLPPGTSAQKAELIALTKALELSKGKKANIYTDSRYAFATAHTHGSIYERRGWLTSEGKEIKNKAEIIALLKALFLPQEVAIIHCPGHQKGQDPVAVGNRQADRVARQAAMAEVLTLATEPDNTSHITAGKRTADGSEFEKRTADGSEFESPKKKAKVE

SEQ ID NO: 2002 - protein, 2100 aa, synthetic construct
MPAAKRVKLDGGDKKYSIGLDIGTNSVGWAVITDEYKVPSKKFKVLGNTDRHSIKKNLIGALLFDSGETAEATRLKRTARRRYTRRKNRICYLQEIFSNEMAKVDDSFFHRLEESFLVEEDKKHERHPIFGNIVDEVAYHEKYPTIYHLRKKLVDSTDKADLRLIYLALAHMIKFRGHFLIEGDLNPDNSDVDKLFIQLVQTYNQLFEENPINASGVDAKAILSARLSKSRRLENLIAQLPGEKKNGLFGNLIALSLGLTPNFKSNFDLAEDAKLQLSKDTYDDDLDNLLAQIGDQYADLFLAAKNLSDAILLSDILRVNTEITKAPLSASMIKRYDEHHQDLTLLKALVRQQLPEKYKEIFFDQSKNGYAGYIDGGASQEEFYKFIKPILEKMDGTEELLVKLNREDLLRKQRTFDNGSIPHQIHLGELHAILRRQEDFYPFLKDNREKIEKILTFRIPYYVGPLARGNSRFAWMTRKSEETITPWNFEEVVDKGASAQSFIERMTNFDKNLPNEKVLPKHSLLYEYFTVYNELTKVKYVTEGMRKPAFLSGEQKKAIVDLLFKTNRKVTVKQLKEDYFKKIECFDSVEISGVEDRFNASLGTYHDLLKIIKDKDFLDNEENEDILEDIVLTLTLFEDREMIEERLKTYAHLFDDKVMKQLKRRRYTGWGRLSRKLINGIRDKQSGKTILDFLKSDGFANRNFMQLIHDDSLTFKEDIQKAQVSGQGDSLHEHIANLAGSPAIKKGILQTVKVVDELVKVMGRHKPENIVIEMARENQTTQKGQKNSRERMKRIEEGIKELGSQILKEHPVENTQLQNEKLYLYYLQNGRDMYVDQELDINRLSDYDVDHIVPQSFLKDDSIDNKVLTRSDKARGKSDNVPSEEVVKKMKNYWRQLLNAKLITQRKFDNLTKAERGGLSELDKAGFIKRQLVETRQITKHVAQILDSRMNTKYDENDKLIREVKVITLKSKLVSDFRKDFQFYKVREINNYHHAHDAYLNAVVGTALIKKYPKLESEFVYGDYKVYDVRKMIAKSEQEIGKATAKYFFYSNIMNFFKTEITLANGEIRKRPLIETNGETGEIVWDKGRDFATVRKVLSMPQVNIVKKTEVQTGGFSKESILPKRNSDKLIARKKDWDPKKYGGFDSPTVAYSVLVVAKVEKGKSKKLKSVKELLGITIMERSSFEKNPIDFLEAKGYKEVKKDLIIKLPKYSLFELENGRKRMLASAGELQKGNELALPSKYVNFLYLASHYEKLKGSPEDNEQKQLFVEQHKHYLDEIIEQISEFSKRVILADANLDKVLSAYNKHRDKPIREQAENIIHLFTLTNLGAPAAFKYFDTTIDRKRYTSTKEVLDATLIHQSITGLYETRIDLSQLGGDGGGGGGSSPAPGGTVSLQDEHRLFDIPVTTSLPDVWLQDFPQAWAETGGLGRAKCQAPIIIDLKPTAVPVSIKQYPMSLEAHMGIRQHIIKFLELGVLRPCRSPWNTPLLPVKKPGTQDYRPVQDLREINKRTVDIHPTVPNPYNLLSTLKPDYSWYTVLDLKDAFFCLPLAPQSQELFAFEWKDPERGISGQLTWTRLPQGFKNSPTLFNEALHRDLTDFRTQHPEVTLLQYVDDLLLAAPTKKACTQGTRHLLQELGEKGYRASAKKAQICQTKVTYLGYILSEGKRWLTPGRIETVARIPPPRNPREVREFLGKAGFCRLFIPGFAELAAPLYALTKPSTPFTWQTEHQLAFEALKKALLSAPALGLPDTSKPFTLFLDERQGIAKGVLTQKLGPWKRPVAYLSKKLDPVAAGWPPCLRIMAATAMLVKDSAKLTLGQPLTVITPHTLEAIVRQPPDRWITNARLTHYQALLLDTDRVQFGPPVTLNPATLLPVPENQPSPHDCRQVLAETHGTREDLKDQELPDADHTWYTDGSSYLDSGTRRAGAAVVDGHNTIWAQSLPPGTSAQKAELIALTKALELSKGKKANIYTDSRYAFATAHTHGSIYERRGWLTSEGKEIKNKAEIIALLKALFLPQEVAIIHCPGHQKGQDPVAVGNRQADRVARQAAMAEVLTLATEPDNTSHITAGKRTADGSEFEKRTADGSEFESPKKKAKVE

SEQ ID NO: 2003 - protein, 2102 aa, synthetic construct
MPAAKRVKLDGGDKKYSIGLDIGTNSVGWAVITDEYKVPSKKFKVLGNTDRHSIKKNLIGALLFDSGETAEATRLKRTARRRYTRRKNRICYLQEIFSNEMAKVDDSFFHRLEESFLVEEDKKHERHPIFGNIVDEVAYHEKYPTIYHLRKKLVDSTDKADLRLIYLALAHMIKFRGHFLIEGDLNPDNSDVDKLFIQLVQTYNQLFEENPINASGVDAKAILSARLSKSRRLENLIAQLPGEKKNGLFGNLIALSLGLTPNFKSNFDLAEDAKLQLSKDTYDDDLDNLLAQIGDQYADLFLAAKNLSDAILLSDILRVNTEITKAPLSASMIKRYDEHHQDLTLLKALVRQQLPEKYKEIFFDQSKNGYAGYIDGGASQEEFYKFIKPILEKMDGTEELLVKLNREDLLRKQRTFDNGSIPHQIHLGELHAILRRQEDFYPFLKDNREKIEKILTFRIPYYVGPLARGNSRFAWMTRKSEETITPWNFEEVVDKGASAQSFIERMTNFDKNLPNEKVLPKHSLLYEYFTVYNELTKVKYVTEGMRKPAFLSGEQKKAIVDLLFKTNRKVTVKQLKEDYFKKIECFDSVEISGVEDRFNASLGTYHDLLKIIKDKDFLDNEENEDILEDIVLTLTLFEDREMIEERLKTYAHLFDDKVMKQLKRRRYTGWGRLSRKLINGIRDKQSGKTILDFLKSDGFANRNFMQLIHDDSLTFKEDIQKAQVSGQGDSLHEHIANLAGSPAIKKGILQTVKVVDELVKVMGRHKPENIVIEMARENQTTQKGQKNSRERMKRIEEGIKELGSQILKEHPVENTQLQNEKLYLYYLQNGRDMYVDQELDINRLSDYDVDHIVPQSFLKDDSIDNKVLTRSDKARGKSDNVPSEEVVKKMKNYWRQLLNAKLITQRKFDNLTKAERGGLSELDKAGFIKRQLVETRQITKHVAQILDSRMNTKYDENDKLIREVKVITLKSKLVSDFRKDFQFYKVREINNYHHAHDAYLNAVVGTALIKKYPKLESEFVYGDYKVYDVRKMIAKSEQEIGKATAKYFFYSNIMNFFKTEITLANGEIRKRPLIETNGETGEIVWDKGRDFATVRKVLSMPQVNIVKKTEVQTGGFSKESILPKRNSDKLIARKKDWDPKKYGGFDSPTVAYSVLVVAKVEKGKSKKLKSVKELLGITIMERSSFEKNPIDFLEAKGYKEVKKDLIIKLPKYSLFELENGRKRMLASAGELQKGNELALPSKYVNFLYLASHYEKLKGSPEDNEQKQLFVEQHKHYLDEIIEQISEFSKRVILADANLDKVLSAYNKHRDKPIREQAENIIHLFTLTNLGAPAAFKYFDTTIDRKRYTSTKEVLDATLIHQSITGLYETRIDLSQLGGDGGGGSGGGEAAAKGGTVSLQDEHRLFDIPVTTSLPDVWLQDFPQAWAETGGLGRAKCQAPIIIDLKPTAVPVSIKQYPMSLEAHMGIRQHIIKFLELGVLRPCRSPWNTPLLPVKKPGTQDYRPVQDLREINKRTVDIHPTVPNPYNLLSTLKPDYSWYTVLDLKDAFFCLPLAPQSQELFAFEWKDPERGISGQLTWTRLPQGFKNSPTLFNEALHRDLTDFRTQHPEVTLLQYVDDLLLAAPTKKACTQGTRHLLQELGEKGYRASAKKAQICQTKVTYLGYILSEGKRWLTPGRIETVARIPPPRNPREVREFLGKAGFCRLFIPGFAELAAPLYALTKPSTPFTWQTEHQLAFEALKKALLSAPALGLPDTSKPFTLFLDERQGIAKGVLTQKLGPWKRPVAYLSKKLDPVAAGWPPCLRIMAATAMLVKDSAKLTLGQPLTVITPHTLEAIVRQPPDRWITNARLTHYQALLLDTDRVQFGPPVTLNPATLLPVPENQPSPHDCRQVLAETHGTREDLKDQELPDADHTWYTDGSSYLDSGTRRAGAAVVDGHNTIWAQSLPPGTSAQKAELIALTKALELSKGKKANIYTDSRYAFATAHTHGSIYERRGWLTSEGKEIKNKAEIIALLKALFLPQEVAIIHCPGHQKGQDPVAVGNRQADRVARQAAMAEVLTLATEPDNTSHITAGKRTADGSEFEKRTADGSEFESPKKKAKVE

SEQ ID NO: 2004 - protein, 2099 aa, synthetic construct
MPAAKRVKLDGGDKKYSIGLDIGTNSVGWAVITDEYKVPSKKFKVLGNTDRHSIKKNLIGALLFDSGETAEATRLKRTARRRYTRRKNRICYLQEIFSNEMAKVDDSFFHRLEESFLVEEDKKHERHPIFGNIVDEVAYHEKYPTIYHLRKKLVDSTDKADLRLIYLALAHMIKFRGHFLIEGDLNPDNSDVDKLFIQLVQTYNQLFEENPINASGVDAKAILSARLSKSRRLENLIAQLPGEKKNGLFGNLIALSLGLTPNFKSNFDLAEDAKLQLSKDTYDDDLDNLLAQIGDQYADLFLAAKNLSDAILLSDILRVNTEITKAPLSASMIKRYDEHHQDLTLLKALVRQQLPEKYKEIFFDQSKNGYAGYIDGGASQEEFYKFIKPILEKMDGTEELLVKLNREDLLRKQRTFDNGSIPHQIHLGELHAILRRQEDFYPFLKDNREKIEKILTFRIPYYVGPLARGNSRFAWMTRKSEETITPWNFEEVVDKGASAQSFIERMTNFDKNLPNEKVLPKHSLLYEYFTVYNELTKVKYVTEGMRKPAFLSGEQKKAIVDLLFKTNRKVTVKQLKEDYFKKIECFDSVEISGVEDRFNASLGTYHDLLKIIKDKDFLDNEENEDILEDIVLTLTLFEDREMIEERLKTYAHLFDDKVMKQLKRRRYTGWGRLSRKLINGIRDKQSGKTILDFLKSDGFANRNFMQLIHDDSLTFKEDIQKAQVSGQGDSLHEHIANLAGSPAIKKGILQTVKVVDELVKVMGRHKPENIVIEMARENQTTQKGQKNSRERMKRIEEGIKELGSQILKEHPVENTQLQNEKLYLYYLQNGRDMYVDQELDINRLSDYDVDHIVPQSFLKDDSIDNKVLTRSDKARGKSDNVPSEEVVKKMKNYWRQLLNAKLITQRKFDNLTKAERGGLSELDKAGFIKRQLVETRQITKHVAQILDSRMNTKYDENDKLIREVKVITLKSKLVSDFRKDFQFYKVREINNYHHAHDAYLNAVVGTALIKKYPKLESEFVYGDYKVYDVRKMIAKSEQEIGKATAKYFFYSNIMNFFKTEITLANGEIRKRPLIETNGETGEIVWDKGRDFATVRKVLSMPQVNIVKKTEVQTGGFSKESILPKRNSDKLIARKKDWDPKKYGGFDSPTVAYSVLVVAKVEKGKSKKLKSVKELLGITIMERSSFEKNPIDFLEAKGYKEVKKDLIIKLPKYSLFELENGRKRMLASAGELQKGNELALPSKYVNFLYLASHYEKLKGSPEDNEQKQLFVEQHKHYLDEIIEQISEFSKRVILADANLDKVLSAYNKHRDKPIREQAENIIHLFTLTNLGAPAAFKYFDTTIDRKRYTSTKEVLDATLIHQSITGLYETRIDLSQLGGDGGGGGEAAAKGGTVSLQDEHRLFDIPVTTSLPDVWLQDFPQAWAETGGLGRAKCQAPIIIDLKPTAVPVSIKQYPMSLEAHMGIRQHIIKFLELGVLRPCRSPWNTPLLPVKKPGTQDYRPVQDLREINKRTVDIHPTVPNPYNLLSTLKPDYSWYTVLDLKDAFFCLPLAPQSQELFAFEWKDPERGISGQLTWTRLPQGFKNSPTLFNEALHRDLTDFRTQHPEVTLLQYVDDLLLAAPTKKACTQGTRHLLQELGEKGYRASAKKAQICQTKVTYLGYILSEGKRWLTPGRIETVARIPPPRNPREVREFLGKAGFCRLFIPGFAELAAPLYALTKPSTPFTWQTEHQLAFEALKKALLSAPALGLPDTSKPFTLFLDERQGIAKGVLTQKLGPWKRPVAYLSKKLDPVAAGWPPCLRIMAATAMLVKDSAKLTLGQPLTVITPHTLEAIVRQPPDRWITNARLTHYQALLLDTDRVQFGPPVTLNPATLLPVPENQPSPHDCRQVLAETHGTREDLKDQELPDADHTWYTDGSSYLDSGTRRAGAAVVDGHNTIWAQSLPPGTSAQKAELIALTKALELSKGKKANIYTDSRYAFATAHTHGSIYERRGWLTSEGKEIKNKAEIIALLKALFLPQEVAIIHCPGHQKGQDPVAVGNRQADRVARQAAMAEVLTLATEPDNTSHITAGKRTADGSEFEKRTADGSEFESPKKKAKVE

SEQ ID NO: 2005 - protein, 2103 aa, synthetic construct
MPAAKRVKLDGGDKKYSIGLDIGTNSVGWAVITDEYKVPSKKFKVLGNTDRHSIKKNLIGALLFDSGETAEATRLKRTARRRYTRRKNRICYLQEIFSNEMAKVDDSFFHRLEESFLVEEDKKHERHPIFGNIVDEVAYHEKYPTIYHLRKKLVDSTDKADLRLIYLALAHMIKFRGHFLIEGDLNPDNSDVDKLFIQLVQTYNQLFEENPINASGVDAKAILSARLSKSRRLENLIAQLPGEKKNGLFGNLIALSLGLTPNFKSNFDLAEDAKLQLSKDTYDDDLDNLLAQIGDQYADLFLAAKNLSDAILLSDILRVNTEITKAPLSASMIKRYDEHHQDLTLLKALVRQQLPEKYKEIFFDQSKNGYAGYIDGGASQEEFYKFIKPILEKMDGTEELLVKLNREDLLRKQRTFDNGSIPHQIHLGELHAILRRQEDFYPFLKDNREKIEKILTFRIPYYVGPLARGNSRFAWMTRKSEETITPWNFEEVVDKGASAQSFIERMTNFDKNLPNEKVLPKHSLLYEYFTVYNELTKVKYVTEGMRKPAFLSGEQKKAIVDLLFKTNRKVTVKQLKEDYFKKIECFDSVEISGVEDRFNASLGTYHDLLKIIKDKDFLDNEENEDILEDIVLTLTLFEDREMIEERLKTYAHLFDDKVMKQLKRRRYTGWGRLSRKLINGIRDKQSGKTILDFLKSDGFANRNFMQLIHDDSLTFKEDIQKAQVSGQGDSLHEHIANLAGSPAIKKGILQTVKVVDELVKVMGRHKPENIVIEMARENQTTQKGQKNSRERMKRIEEGIKELGSQILKEHPVENTQLQNEKLYLYYLQNGRDMYVDQELDINRLSDYDVDHIVPQSFLKDDSIDNKVLTRSDKARGKSDNVPSEEVVKKMKNYWRQLLNAKLITQRKFDNLTKAERGGLSELDKAGFIKRQLVETRQITKHVAQILDSRMNTKYDENDKLIREVKVITLKSKLVSDFRKDFQFYKVREINNYHHAHDAYLNAVVGTALIKKYPKLESEFVYGDYKVYDVRKMIAKSEQEIGKATAKYFFYSNIMNFFKTEITLANGEIRKRPLIETNGETGEIVWDKGRDFATVRKVLSMPQVNIVKKTEVQTGGFSKESILPKRNSDKLIARKKDWDPKKYGGFDSPTVAYSVLVVAKVEKGKSKKLKSVKELLGITIMERSSFEKNPIDFLEAKGYKEVKKDLIIKLPKYSLFELENGRKRMLASAGELQKGNELALPSKYVNFLYLASHYEKLKGSPEDNEQKQLFVEQHKHYLDEIIEQISEFSKRVILADANLDKVLSAYNKHRDKPIREQAENIIHLFTLTNLGAPAAFKYFDTTIDRKRYTSTKEVLDATLIHQSITGLYETRIDLSQLGGDGGGSAGSAAGSGEFGGTVSLQDEHRLFDIPVTTSLPDVWLQDFPQAWAETGGLGRAKCQAPIIIDLKPTAVPVSIKQYPMSLEAHMGIRQHIIKFLELGVLRPCRSPWNTPLLPVKKPGTQDYRPVQDLREINKRTVDIHPTVPNPYNLLSTLKPDYSWYTVLDLKDAFFCLPLAPQSQELFAFEWKDPERGISGQLTWTRLPQGFKNSPTLFNEALHRDLTDFRTQHPEVTLLQYVDDLLLAAPTKKACTQGTRHLLQELGEKGYRASAKKAQICQTKVTYLGYILSEGKRWLTPGRIETVARIPPPRNPREVREFLGKAGFCRLFIPGFAELAAPLYALTKPSTPFTWQTEHQLAFEALKKALLSAPALGLPDTSKPFTLFLDERQGIAKGVLTQKLGPWKRPVAYLSKKLDPVAAGWPPCLRIMAATAMLVKDSAKLTLGQPLTVITPHTLEAIVRQPPDRWITNARLTHYQALLLDTDRVQFGPPVTLNPATLLPVPENQPSPHDCRQVLAETHGTREDLKDQELPDADHTWYTDGSSYLDSGTRRAGAAVVDGHNTIWAQSLPPGTSAQKAELIALTKALELSKGKKANIYTDSRYAFATAHTHGSIYERRGWLTSEGKEIKNKAEIIALLKALFLPQEVAIIHCPGHQKGQDPVAVGNRQADRVARQAAMAEVLTLATEPDNTSHITAGKRTADGSEFEKRTADGSEFESPKKKAKVE

SEQ ID NO: 2006 - protein, 2096 aa, synthetic construct
MPAAKRVKLDGGDKKYSIGLDIGTNSVGWAVITDEYKVPSKKFKVLGNTDRHSIKKNLIGALLFDSGETAEATRLKRTARRRYTRRKNRICYLQEIFSNEMAKVDDSFFHRLEESFLVEEDKKHERHPIFGNIVDEVAYHEKYPTIYHLRKKLVDSTDKADLRLIYLALAHMIKFRGHFLIEGDLNPDNSDVDKLFIQLVQTYNQLFEENPINASGVDAKAILSARLSKSRRLENLIAQLPGEKKNGLFGNLIALSLGLTPNFKSNFDLAEDAKLQLSKDTYDDDLDNLLAQIGDQYADLFLAAKNLSDAILLSDILRVNTEITKAPLSASMIKRYDEHHQDLTLLKALVRQQLPEKYKEIFFDQSKNGYAGYIDGGASQEEFYKFIKPILEKMDGTEELLVKLNREDLLRKQRTFDNGSIPHQIHLGELHAILRRQEDFYPFLKDNREKIEKILTFRIPYYVGPLARGNSRFAWMTRKSEETITPWNFEEVVDKGASAQSFIERMTNFDKNLPNEKVLPKHSLLYEYFTVYNELTKVKYVTEGMRKPAFLSGEQKKAIVDLLFKTNRKVTVKQLKEDYFKKIECFDSVEISGVEDRFNASLGTYHDLLKIIKDKDFLDNEENEDILEDIVLTLTLFEDREMIEERLKTYAHLFDDKVMKQLKRRRYTGWGRLSRKLINGIRDKQSGKTILDFLKSDGFANRNFMQLIHDDSLTFKEDIQKAQVSGQGDSLHEHIANLAGSPAIKKGILQTVKVVDELVKVMGRHKPENIVIEMARENQTTQKGQKNSRERMKRIEEGIKELGSQILKEHPVENTQLQNEKLYLYYLQNGRDMYVDQELDINRLSDYDVDHIVPQSFLKDDSIDNKVLTRSDKARGKSDNVPSEEVVKKMKNYWRQLLNAKLITQRKFDNLTKAERGGLSELDKAGFIKRQLVETRQITKHVAQILDSRMNTKYDENDKLIREVKVITLKSKLVSDFRKDFQFYKVREINNYHHAHDAYLNAVVGTALIKKYPKLESEFVYGDYKVYDVRKMIAKSEQEIGKATAKYFFYSNIMNFFKTEITLANGEIRKRPLIETNGETGEIVWDKGRDFATVRKVLSMPQVNIVKKTEVQTGGFSKESILPKRNSDKLIARKKDWDPKKYGGFDSPTVAYSVLVVAKVEKGKSKKLKSVKELLGITIMERSSFEKNPIDFLEAKGYKEVKKDLIIKLPKYSLFELENGRKRMLASAGELQKGNELALPSKYVNFLYLASHYEKLKGSPEDNEQKQLFVEQHKHYLDEIIEQISEFSKRVILADANLDKVLSAYNKHRDKPIREQAENIIHLFTLTNLGAPAAFKYFDTTIDRKRYTSTKEVLDATLIHQSITGLYETRIDLSQLGGDGGGGGGSGGTVSLQDEHRLFDIPVTTSLPDVWLQDFPQAWAETGGLGRAKCQAPIIIDLKPTAVPVSIKQYPMSLEAHMGIRQHIIKFLELGVLRPCRSPWNTPLLPVKKPGTQDYRPVQDLREINKRTVDIHPTVPNPYNLLSTLKPDYSWYTVLDLKDAFFCLPLAPQSQELFAFEWKDPERGISGQLTWTRLPQGFKNSPTLFNEALHRDLTDFRTQHPEVTLLQYVDDLLLAAPTKKACTQGTRHLLQELGEKGYRASAKKAQICQTKVTYLGYILSEGKRWLTPGRIETVARIPPPRNPREVREFLGKAGFCRLFIPGFAELAAPLYALTKPSTPFTWQTEHQLAFEALKKALLSAPALGLPDTSKPFTLFLDERQGIAKGVLTQKLGPWKRPVAYLSKKLDPVAAGWPPCLRIMAATAMLVKDSAKLTLGQPLTVITPHTLEAIVRQPPDRWITNARLTHYQALLLDTDRVQFGPPVTLNPATLLPVPENQPSPHDCRQVLAETHGTREDLKDQELPDADHTWYTDGSSYLDSGTRRAGAAVVDGHNTIWAQSLPPGTSAQKAELIALTKALELSKGKKANIYTDSRYAFATAHTHGSIYERRGWLTSEGKEIKNKAEIIALLKALFLPQEVAIIHCPGHQKGQDPVAVGNRQADRVARQAAMAEVLTLATEPDNTSHITAGKRTADGSEFEKRTADGSEFESPKKKAKVE

SEQ ID NO: 2007 - protein, 2100 aa, synthetic construct
MPAAKRVKLDGGDKKYSIGLDIGTNSVGWAVITDEYKVPSKKFKVLGNTDRHSIKKNLIGALLFDSGETAEATRLKRTARRRYTRRKNRICYLQEIFSNEMAKVDDSFFHRLEESFLVEEDKKHERHPIFGNIVDEVAYHEKYPTIYHLRKKLVDSTDKADLRLIYLALAHMIKFRGHFLIEGDLNPDNSDVDKLFIQLVQTYNQLFEENPINASGVDAKAILSARLSKSRRLENLIAQLPGEKKNGLFGNLIALSLGLTPNFKSNFDLAEDAKLQLSKDTYDDDLDNLLAQIGDQYADLFLAAKNLSDAILLSDILRVNTEITKAPLSASMIKRYDEHHQDLTLLKALVRQQLPEKYKEIFFDQSKNGYAGYIDGGASQEEFYKFIKPILEKMDGTEELLVKLNREDLLRKQRTFDNGSIPHQIHLGELHAILRRQEDFYPFLKDNREKIEKILTFRIPYYVGPLARGNSRFAWMTRKSEETITPWNFEEVVDKGASAQSFIERMTNFDKNLPNEKVLPKHSLLYEYFTVYNELTKVKYVTEGMRKPAFLSGEQKKAIVDLLFKTNRKVTVKQLKEDYFKKIECFDSVEISGVEDRFNASLGTYHDLLKIIKDKDFLDNEENEDILEDIVLTLTLFEDREMIEERLKTYAHLFDDKVMKQLKRRRYTGWGRLSRKLINGIRDKQSGKTILDFLKSDGFANRNFMQLIHDDSLTFKEDIQKAQVSGQGDSLHEHIANLAGSPAIKKGILQTVKVVDELVKVMGRHKPENIVIEMARENQTTQKGQKNSRERMKRIEEGIKELGSQILKEHPVENTQLQNEKLYLYYLQNGRDMYVDQELDINRLSDYDVDHIVPQSFLKDDSIDNKVLTRSDKARGKSDNVPSEEVVKKMKNYWRQLLNAKLITQRKFDNLTKAERGGLSELDKAGFIKRQLVETRQITKHVAQILDSRMNTKYDENDKLIREVKVITLKSKLVSDFRKDFQFYKVREINNYHHAHDAYLNAVVGTALIKKYPKLESEFVYGDYKVYDVRKMIAKSEQEIGKATAKYFFYSNIMNFFKTEITLANGEIRKRPLIETNGETGEIVWDKGRDFATVRKVLSMPQVNIVKKTEVQTGGFSKESILPKRNSDKLIARKKDWDPKKYGGFDSPTVAYSVLVVAKVEKGKSKKLKSVKELLGITIMERSSFEKNPIDFLEAKGYKEVKKDLIIKLPKYSLFELENGRKRMLASAGELQKGNELALPSKYVNFLYLASHYEKLKGSPEDNEQKQLFVEQHKHYLDEIIEQISEFSKRVILADANLDKVLSAYNKHRDKPIREQAENIIHLFTLTNLGAPAAFKYFDTTIDRKRYTSTKEVLDATLIHQSITGLYETRIDLSQLGGDGGGSSGGGPAPGGTVSLQDEHRLFDIPVTTSLPDVWLQDFPQAWAETGGLGRAKCQAPIIIDLKPTAVPVSIKQYPMSLEAHMGIRQHIIKFLELGVLRPCRSPWNTPLLPVKKPGTQDYRPVQDLREINKRTVDIHPTVPNPYNLLSTLKPDYSWYTVLDLKDAFFCLPLAPQSQELFAFEWKDPERGISGQLTWTRLPQGFKNSPTLFNEALHRDLTDFRTQHPEVTLLQYVDDLLLAAPTKKACTQGTRHLLQELGEKGYRASAKKAQICQTKVTYLGYILSEGKRWLTPGRIETVARIPPPRNPREVREFLGKAGFCRLFIPGFAELAAPLYALTKPSTPFTWQTEHQLAFEALKKALLSAPALGLPDTSKPFTLFLDERQGIAKGVLTQKLGPWKRPVAYLSKKLDPVAAGWPPCLRIMAATAMLVKDSAKLTLGQPLTVITPHTLEAIVRQPPDRWITNARLTHYQALLLDTDRVQFGPPVTLNPATLLPVPENQPSPHDCRQVLAETHGTREDLKDQELPDADHTWYTDGSSYLDSGTRRAGAAVVDGHNTIWAQSLPPGTSAQKAELIALTKALELSKGKKANIYTDSRYAFATAHTHGSIYERRGWLTSEGKEIKNKAEIIALLKALFLPQEVAIIHCPGHQKGQDPVAVGNRQADRVARQAAMAEVLTLATEPDNTSHITAGKRTADGSEFEKRTADGSEFESPKKKAKVE

SEQ ID NO: 2008 - protein, 2096 aa, synthetic construct
MPAAKRVKLDGGDKKYSIGLDIGTNSVGWAVITDEYKVPSKKFKVLGNTDRHSIKKNLIGALLFDSGETAEATRLKRTARRRYTRRKNRICYLQEIFSNEMAKVDDSFFHRLEESFLVEEDKKHERHPIFGNIVDEVAYHEKYPTIYHLRKKLVDSTDKADLRLIYLALAHMIKFRGHFLIEGDLNPDNSDVDKLFIQLVQTYNQLFEENPINASGVDAKAILSARLSKSRRLENLIAQLPGEKKNGLFGNLIALSLGLTPNFKSNFDLAEDAKLQLSKDTYDDDLDNLLAQIGDQYADLFLAAKNLSDAILLSDILRVNTEITKAPLSASMIKRYDEHHQDLTLLKALVRQQLPEKYKEIFFDQSKNGYAGYIDGGASQEEFYKFIKPILEKMDGTEELLVKLNREDLLRKQRTFDNGSIPHQIHLGELHAILRRQEDFYPFLKDNREKIEKILTFRIPYYVGPLARGNSRFAWMTRKSEETITPWNFEEVVDKGASAQSFIERMTNFDKNLPNEKVLPKHSLLYEYFTVYNELTKVKYVTEGMRKPAFLSGEQKKAIVDLLFKTNRKVTVKQLKEDYFKKIECFDSVEISGVEDRFNASLGTYHDLLKIIKDKDFLDNEENEDILEDIVLTLTLFEDREMIEERLKTYAHLFDDKVMKQLKRRRYTGWGRLSRKLINGIRDKQSGKTILDFLKSDGFANRNFMQLIHDDSLTFKEDIQKAQVSGQGDSLHEHIANLAGSPAIKKGILQTVKVVDELVKVMGRHKPENIVIEMARENQTTQKGQKNSRERMKRIEEGIKELGSQILKEHPVENTQLQNEKLYLYYLQNGRDMYVDQELDINRLSDYDVDHIVPQSFLKDDSIDNKVLTRSDKARGKSDNVPSEEVVKKMKNYWRQLLNAKLITQRKFDNLTKAERGGLSELDKAGFIKRQLVETRQITKHVAQILDSRMNTKYDENDKLIREVKVITLKSKLVSDFRKDFQFYKVREINNYHHAHDAYLNAVVGTALIKKYPKLESEFVYGDYKVYDVRKMIAKSEQEIGKATAKYFFYSNIMNFFKTEITLANGEIRKRPLIETNGETGEIVWDKGRDFATVRKVLSMPQVNIVKKTEVQTGGFSKESILPKRNSDKLIARKKDWDPKKYGGFDSPTVAYSVLVVAKVEKGKSKKLKSVKELLGITIMERSSFEKNPIDFLEAKGYKEVKKDLIIKLPKYSLFELENGRKRMLASAGELQKGNELALPSKYVNFLYLASHYEKLKGSPEDNEQKQLFVEQHKHYLDEIIEQISEFSKRVILADANLDKVLSAYNKHRDKPIREQAENIIHLFTLTNLGAPAAFKYFDTTIDRKRYTSTKEVLDATLIHQSITGLYETRIDLSQLGGDGGEAAAKGGTVSLQDEHRLFDIPVTTSLPDVWLQDFPQAWAETGGLGRAKCQAPIIIDLKPTAVPVSIKQYPMSLEAHMGIRQHIIKFLELGVLRPCRSPWNTPLLPVKKPGTQDYRPVQDLREINKRTVDIHPTVPNPYNLLSTLKPDYSWYTVLDLKDAFFCLPLAPQSQELFAFEWKDPERGISGQLTWTRLPQGFKNSPTLFNEALHRDLTDFRTQHPEVTLLQYVDDLLLAAPTKKACTQGTRHLLQELGEKGYRASAKKAQICQTKVTYLGYILSEGKRWLTPGRIETVARIPPPRNPREVREFLGKAGFCRLFIPGFAELAAPLYALTKPSTPFTWQTEHQLAFEALKKALLSAPALGLPDTSKPFTLFLDERQGIAKGVLTQKLGPWKRPVAYLSKKLDPVAAGWPPCLRIMAATAMLVKDSAKLTLGQPLTVITPHTLEAIVRQPPDRWITNARLTHYQALLLDTDRVQFGPPVTLNPATLLPVPENQPSPHDCRQVLAETHGTREDLKDQELPDADHTWYTDGSSYLDSGTRRAGAAVVDGHNTIWAQSLPPGTSAQKAELIALTKALELSKGKKANIYTDSRYAFATAHTHGSIYERRGWLTSEGKEIKNKAEIIALLKALFLPQEVAIIHCPGHQKGQDPVAVGNRQADRVARQAAMAEVLTLATEPDNTSHITAGKRTADGSEFEKRTADGSEFESPKKKAKVE

SEQ ID NO: 2009 - protein, 2102 aa, synthetic construct
MPAAKRVKLDGGDKKYSIGLDIGTNSVGWAVITDEYKVPSKKFKVLGNTDRHSIKKNLIGALLFDSGETAEATRLKRTARRRYTRRKNRICYLQEIFSNEMAKVDDSFFHRLEESFLVEEDKKHERHPIFGNIVDEVAYHEKYPTIYHLRKKLVDSTDKADLRLIYLALAHMIKFRGHFLIEGDLNPDNSDVDKLFIQLVQTYNQLFEENPINASGVDAKAILSARLSKSRRLENLIAQLPGEKKNGLFGNLIALSLGLTPNFKSNFDLAEDAKLQLSKDTYDDDLDNLLAQIGDQYADLFLAAKNLSDAILLSDILRVNTEITKAPLSASMIKRYDEHHQDLTLLKALVRQQLPEKYKEIFFDQSKNGYAGYIDGGASQEEFYKFIKPILEKMDGTEELLVKLNREDLLRKQRTFDNGSIPHQIHLGELHAILRRQEDFYPFLKDNREKIEKILTFRIPYYVGPLARGNSRFAWMTRKSEETITPWNFEEVVDKGASAQSFIERMTNFDKNLPNEKVLPKHSLLYEYFTVYNELTKVKYVTEGMRKPAFLSGEQKKAIVDLLFKTNRKVTVKQLKEDYFKKIECFDSVEISGVEDRFNASLGTYHDLLKIIKDKDFLDNEENEDILEDIVLTLTLFEDREMIEERLKTYAHLFDDKVMKQLKRRRYTGWGRLSRKLINGIRDKQSGKTILDFLKSDGFANRNFMQLIHDDSLTFKEDIQKAQVSGQGDSLHEHIANLAGSPAIKKGILQTVKVVDELVKVMGRHKPENIVIEMARENQTTQKGQKNSRERMKRIEEGIKELGSQILKEHPVENTQLQNEKLYLYYLQNGRDMYVDQELDINRLSDYDVDHIVPQSFLKDDSIDNKVLTRSDKARGKSDNVPSEEVVKKMKNYWRQLLNAKLITQRKFDNLTKAERGGLSELDKAGFIKRQLVETRQITKHVAQILDSRMNTKYDENDKLIREVKVITLKSKLVSDFRKDFQFYKVREINNYHHAHDAYLNAVVGTALIKKYPKLESEFVYGDYKVYDVRKMIAKSEQEIGKATAKYFFYSNIMNFFKTEITLANGEIRKRPLIETNGETGEIVWDKGRDFATVRKVLSMPQVNIVKKTEVQTGGFSKESILPKRNSDKLIARKKDWDPKKYGGFDSPTVAYSVLVVAKVEKGKSKKLKSVKELLGITIMERSSFEKNPIDFLEAKGYKEVKKDLIIKLPKYSLFELENGRKRMLASAGELQKGNELALPSKYVNFLYLASHYEKLKGSPEDNEQKQLFVEQHKHYLDEIIEQISEFSKRVILADANLDKVLSAYNKHRDKPIREQAENIIHLFTLTNLGAPAAFKYFDTTIDRKRYTSTKEVLDATLIHQSITGLYETRIDLSQLGGDGGEAAAKGGGGSSGGTVSLQDEHRLFDIPVTTSLPDVWLQDFPQAWAETGGLGRAKCQAPIIIDLKPTAVPVSIKQYPMSLEAHMGIRQHIIKFLELGVLRPCRSPWNTPLLPVKKPGTQDYRPVQDLREINKRTVDIHPTVPNPYNLLSTLKPDYSWYTVLDLKDAFFCLPLAPQSQELFAFEWKDPERGISGQLTWTRLPQGFKNSPTLFNEALHRDLTDFRTQHPEVTLLQYVDDLLLAAPTKKACTQGTRHLLQELGEKGYRASAKKAQICQTKVTYLGYILSEGKRWLTPGRIETVARIPPPRNPREVREFLGKAGFCRLFIPGFAELAAPLYALTKPSTPFTWQTEHQLAFEALKKALLSAPALGLPDTSKPFTLFLDERQGIAKGVLTQKLGPWKRPVAYLSKKLDPVAAGWPPCLRIMAATAMLVKDSAKLTLGQPLTVITPHTLEAIVRQPPDRWITNARLTHYQALLLDTDRVQFGPPVTLNPATLLPVPENQPSPHDCRQVLAETHGTREDLKDQELPDADHTWYTDGSSYLDSGTRRAGAAVVDGHNTIWAQSLPPGTSAQKAELIALTKALELSKGKKANIYTDSRYAFATAHTHGSIYERRGWLTSEGKEIKNKAEIIALLKALFLPQEVAIIHCPGHQKGQDPVAVGNRQADRVARQAAMAEVLTLATEPDNTSHITAGKRTADGSEFEKRTADGSEFESPKKKAKVE

SEQ ID NO: 2010 - protein, 2100 aa, synthetic construct
MPAAKRVKLDGGDKKYSIGLDIGTNSVGWAVITDEYKVPSKKFKVLGNTDRHSIKKNLIGALLFDSGETAEATRLKRTARRRYTRRKNRICYLQEIFSNEMAKVDDSFFHRLEESFLVEEDKKHERHPIFGNIVDEVAYHEKYPTIYHLRKKLVDSTDKADLRLIYLALAHMIKFRGHFLIEGDLNPDNSDVDKLFIQLVQTYNQLFEENPINASGVDAKAILSARLSKSRRLENLIAQLPGEKKNGLFGNLIALSLGLTPNFKSNFDLAEDAKLQLSKDTYDDDLDNLLAQIGDQYADLFLAAKNLSDAILLSDILRVNTEITKAPLSASMIKRYDEHHQDLTLLKALVRQQLPEKYKEIFFDQSKNGYAGYIDGGASQEEFYKFIKPILEKMDGTEELLVKLNREDLLRKQRTFDNGSIPHQIHLGELHAILRRQEDFYPFLKDNREKIEKILTFRIPYYVGPLARGNSRFAWMTRKSEETITPWNFEEVVDKGASAQSFIERMTNFDKNLPNEKVLPKHSLLYEYFTVYNELTKVKYVTEGMRKPAFLSGEQKKAIVDLLFKTNRKVTVKQLKEDYFKKIECFDSVEISGVEDRFNASLGTYHDLLKIIKDKDFLDNEENEDILEDIVLTLTLFEDREMIEERLKTYAHLFDDKVMKQLKRRRYTGWGRLSRKLINGIRDKQSGKTILDFLKSDGFANRNFMQLIHDDSLTFKEDIQKAQVSGQGDSLHEHIANLAGSPAIKKGILQTVKVVDELVKVMGRHKPENIVIEMARENQTTQKGQKNSRERMKRIEEGIKELGSQILKEHPVENTQLQNEKLYLYYLQNGRDMYVDQELDINRLSDYDVDHIVPQSFLKDDSIDNKVLTRSDKARGKSDNVPSEEVVKKMKNYWRQLLNAKLITQRKFDNLTKAERGGLSELDKAGFIKRQLVETRQITKHVAQILDSRMNTKYDENDKLIREVKVITLKSKLVSDFRKDFQFYKVREINNYHHAHDAYLNAVVGTALIKKYPKLESEFVYGDYKVYDVRKMIAKSEQEIGKATAKYFFYSNIMNFFKTEITLANGEIRKRPLIETNGETGEIVWDKGRDFATVRKVLSMPQVNIVKKTEVQTGGFSKESILPKRNSDKLIARKKDWDPKKYGGFDSPTVAYSVLVVAKVEKGKSKKLKSVKELLGITIMERSSFEKNPIDFLEAKGYKEVKKDLIIKLPKYSLFELENGRKRMLASAGELQKGNELALPSKYVNFLYLASHYEKLKGSPEDNEQKQLFVEQHKHYLDEIIEQISEFSKRVILADANLDKVLSAYNKHRDKPIREQAENIIHLFTLTNLGAPAAFKYFDTTIDRKRYTSTKEVLDATLIHQSITGLYETRIDLSQLGGDGGPAPGGSGGGGGTVSLQDEHRLFDIPVTTSLPDVWLQDFPQAWAETGGLGRAKCQAPIIIDLKPTAVPVSIKQYPMSLEAHMGIRQHIIKFLELGVLRPCRSPWNTPLLPVKKPGTQDYRPVQDLREINKRTVDIHPTVPNPYNLLSTLKPDYSWYTVLDLKDAFFCLPLAPQSQELFAFEWKDPERGISGQLTWTRLPQGFKNSPTLFNEALHRDLTDFRTQHPEVTLLQYVDDLLLAAPTKKACTQGTRHLLQELGEKGYRASAKKAQICQTKVTYLGYILSEGKRWLTPGRIETVARIPPPRNPREVREFLGKAGFCRLFIPGFAELAAPLYALTKPSTPFTWQTEHQLAFEALKKALLSAPALGLPDTSKPFTLFLDERQGIAKGVLTQKLGPWKRPVAYLSKKLDPVAAGWPPCLRIMAATAMLVKDSAKLTLGQPLTVITPHTLEAIVRQPPDRWITNARLTHYQALLLDTDRVQFGPPVTLNPATLLPVPENQPSPHDCRQVLAETHGTREDLKDQELPDADHTWYTDGSSYLDSGTRRAGAAVVDGHNTIWAQSLPPGTSAQKAELIALTKALELSKGKKANIYTDSRYAFATAHTHGSIYERRGWLTSEGKEIKNKAEIIALLKALFLPQEVAIIHCPGHQKGQDPVAVGNRQADRVARQAAMAEVLTLATEPDNTSHITAGKRTADGSEFEKRTADGSEFESPKKKAKVE

SEQ ID NO: 2011 - protein, 2100 aa, synthetic construct
MPAAKRVKLDGGDKKYSIGLDIGTNSVGWAVITDEYKVPSKKFKVLGNTDRHSIKKNLIGALLFDSGETAEATRLKRTARRRYTRRKNRICYLQEIFSNEMAKVDDSFFHRLEESFLVEEDKKHERHPIFGNIVDEVAYHEKYPTIYHLRKKLVDSTDKADLRLIYLALAHMIKFRGHFLIEGDLNPDNSDVDKLFIQLVQTYNQLFEENPINASGVDAKAILSARLSKSRRLENLIAQLPGEKKNGLFGNLIALSLGLTPNFKSNFDLAEDAKLQLSKDTYDDDLDNLLAQIGDQYADLFLAAKNLSDAILLSDILRVNTEITKAPLSASMIKRYDEHHQDLTLLKALVRQQLPEKYKEIFFDQSKNGYAGYIDGGASQEEFYKFIKPILEKMDGTEELLVKLNREDLLRKQRTFDNGSIPHQIHLGELHAILRRQEDFYPFLKDNREKIEKILTFRIPYYVGPLARGNSRFAWMTRKSEETITPWNFEEVVDKGASAQSFIERMTNFDKNLPNEKVLPKHSLLYEYFTVYNELTKVKYVTEGMRKPAFLSGEQKKAIVDLLFKTNRKVTVKQLKEDYFKKIECFDSVEISGVEDRFNASLGTYHDLLKIIKDKDFLDNEENEDILEDIVLTLTLFEDREMIEERLKTYAHLFDDKVMKQLKRRRYTGWGRLSRKLINGIRDKQSGKTILDFLKSDGFANRNFMQLIHDDSLTFKEDIQKAQVSGQGDSLHEHIANLAGSPAIKKGILQTVKVVDELVKVMGRHKPENIVIEMARENQTTQKGQKNSRERMKRIEEGIKELGSQILKEHPVENTQLQNEKLYLYYLQNGRDMYVDQELDINRLSDYDVDHIVPQSFLKDDSIDNKVLTRSDKARGKSDNVPSEEVVKKMKNYWRQLLNAKLITQRKFDNLTKAERGGLSELDKAGFIKRQLVETRQITKHVAQILDSRMNTKYDENDKLIREVKVITLKSKLVSDFRKDFQFYKVREINNYHHAHDAYLNAVVGTALIKKYPKLESEFVYGDYKVYDVRKMIAKSEQEIGKATAKYFFYSNIMNFFKTEITLANGEIRKRPLIETNGETGEIVWDKGRDFATVRKVLSMPQVNIVKKTEVQTGGFSKESILPKRNSDKLIARKKDWDPKKYGGFDSPTVAYSVLVVAKVEKGKSKKLKSVKELLGITIMERSSFEKNPIDFLEAKGYKEVKKDLIIKLPKYSLFELENGRKRMLASAGELQKGNELALPSKYVNFLYLASHYEKLKGSPEDNEQKQLFVEQHKHYLDEIIEQISEFSKRVILADANLDKVLSAYNKHRDKPIREQAENIIHLFTLTNLGAPAAFKYFDTTIDRKRYTSTKEVLDATLIHQSITGLYETRIDLSQLGGDGGGGGPAPGGSGGTVSLQDEHRLFDIPVTTSLPDVWLQDFPQAWAETGGLGRAKCQAPIIIDLKPTAVPVSIKQYPMSLEAHMGIRQHIIKFLELGVLRPCRSPWNTPLLPVKKPGTQDYRPVQDLREINKRTVDIHPTVPNPYNLLSTLKPDYSWYTVLDLKDAFFCLPLAPQSQELFAFEWKDPERGISGQLTWTRLPQGFKNSPTLFNEALHRDLTDFRTQHPEVTLLQYVDDLLLAAPTKKACTQGTRHLLQELGEKGYRASAKKAQICQTKVTYLGYILSEGKRWLTPGRIETVARIPPPRNPREVREFLGKAGFCRLFIPGFAELAAPLYALTKPSTPFTWQTEHQLAFEALKKALLSAPALGLPDTSKPFTLFLDERQGIAKGVLTQKLGPWKRPVAYLSKKLDPVAAGWPPCLRIMAATAMLVKDSAKLTLGQPLTVITPHTLEAIVRQPPDRWITNARLTHYQALLLDTDRVQFGPPVTLNPATLLPVPENQPSPHDCRQVLAETHGTREDLKDQELPDADHTWYTDGSSYLDSGTRRAGAAVVDGHNTIWAQSLPPGTSAQKAELIALTKALELSKGKKANIYTDSRYAFATAHTHGSIYERRGWLTSEGKEIKNKAEIIALLKALFLPQEVAIIHCPGHQKGQDPVAVGNRQADRVARQAAMAEVLTLATEPDNTSHITAGKRTADGSEFEKRTADGSEFESPKKKAKVE

SEQ ID NO: 2012 - protein, 2099 aa, synthetic construct
MPAAKRVKLDGGDKKYSIGLDIGTNSVGWAVITDEYKVPSKKFKVLGNTDRHSIKKNLIGALLFDSGETAEATRLKRTARRRYTRRKNRICYLQEIFSNEMAKVDDSFFHRLEESFLVEEDKKHERHPIFGNIVDEVAYHEKYPTIYHLRKKLVDSTDKADLRLIYLALAHMIKFRGHFLIEGDLNPDNSDVDKLFIQLVQTYNQLFEENPINASGVDAKAILSARLSKSRRLENLIAQLPGEKKNGLFGNLIALSLGLTPNFKSNFDLAEDAKLQLSKDTYDDDLDNLLAQIGDQYADLFLAAKNLSDAILLSDILRVNTEITKAPLSASMIKRYDEHHQDLTLLKALVRQQLPEKYKEIFFDQSKNGYAGYIDGGASQEEFYKFIKPILEKMDGTEELLVKLNREDLLRKQRTFDNGSIPHQIHLGELHAILRRQEDFYPFLKDNREKIEKILTFRIPYYVGPLARGNSRFAWMTRKSEETITPWNFEEVVDKGASAQSFIERMTNFDKNLPNEKVLPKHSLLYEYFTVYNELTKVKYVTEGMRKPAFLSGEQKKAIVDLLFKTNRKVTVKQLKEDYFKKIECFDSVEISGVEDRFNASLGTYHDLLKIIKDKDFLDNEENEDILEDIVLTLTLFEDREMIEERLKTYAHLFDDKVMKQLKRRRYTGWGRLSRKLINGIRDKQSGKTILDFLKSDGFANRNFMQLIHDDSLTFKEDIQKAQVSGQGDSLHEHIANLAGSPAIKKGILQTVKVVDELVKVMGRHKPENIVIEMARENQTTQKGQKNSRERMKRIEEGIKELGSQILKEHPVENTQLQNEKLYLYYLQNGRDMYVDQELDINRLSDYDVDHIVPQSFLKDDSIDNKVLTRSDKARGKSDNVPSEEVVKKMKNYWRQLLNAKLITQRKFDNLTKAERGGLSELDKAGFIKRQLVETRQITKHVAQILDSRMNTKYDENDKLIREVKVITLKSKLVSDFRKDFQFYKVREINNYHHAHDAYLNAVVGTALIKKYPKLESEFVYGDYKVYDVRKMIAKSEQEIGKATAKYFFYSNIMNFFKTEITLANGEIRKRPLIETNGETGEIVWDKGRDFATVRKVLSMPQVNIVKKTEVQTGGFSKESILPKRNSDKLIARKKDWDPKKYGGFDSPTVAYSVLVVAKVEKGKSKKLKSVKELLGITIMERSSFEKNPIDFLEAKGYKEVKKDLIIKLPKYSLFELENGRKRMLASAGELQKGNELALPSKYVNFLYLASHYEKLKGSPEDNEQKQLFVEQHKHYLDEIIEQISEFSKRVILADANLDKVLSAYNKHRDKPIREQAENIIHLFTLTNLGAPAAFKYFDTTIDRKRYTSTKEVLDATLIHQSITGLYETRIDLSQLGGDGGEAAAKGGSGGTVSLQDEHRLFDIPVTTSLPDVWLQDFPQAWAETGGLGRAKCQAPIIIDLKPTAVPVSIKQYPMSLEAHMGIRQHIIKFLELGVLRPCRSPWNTPLLPVKKPGTQDYRPVQDLREINKRTVDIHPTVPNPYNLLSTLKPDYSWYTVLDLKDAFFCLPLAPQSQELFAFEWKDPERGISGQLTWTRLPQGFKNSPTLFNEALHRDLTDFRTQHPEVTLLQYVDDLLLAAPTKKACTQGTRHLLQELGEKGYRASAKKAQICQTKVTYLGYILSEGKRWLTPGRIETVARIPPPRNPREVREFLGKAGFCRLFIPGFAELAAPLYALTKPSTPFTWQTEHQLAFEALKKALLSAPALGLPDTSKPFTLFLDERQGIAKGVLTQKLGPWKRPVAYLSKKLDPVAAGWPPCLRIMAATAMLVKDSAKLTLGQPLTVITPHTLEAIVRQPPDRWITNARLTHYQALLLDTDRVQFGPPVTLNPATLLPVPENQPSPHDCRQVLAETHGTREDLKDQELPDADHTWYTDGSSYLDSGTRRAGAAVVDGHNTIWAQSLPPGTSAQKAELIALTKALELSKGKKANIYTDSRYAFATAHTHGSIYERRGWLTSEGKEIKNKAEIIALLKALFLPQEVAIIHCPGHQKGQDPVAVGNRQADRVARQAAMAEVLTLATEPDNTSHITAGKRTADGSEFEKRTADGSEFESPKKKAKVE

SEQ ID NO: 2013 - protein, 2100 aa, synthetic construct
MPAAKRVKLDGGDKKYSIGLDIGTNSVGWAVITDEYKVPSKKFKVLGNTDRHSIKKNLIGALLFDSGETAEATRLKRTARRRYTRRKNRICYLQEIFSNEMAKVDDSFFHRLEESFLVEEDKKHERHPIFGNIVDEVAYHEKYPTIYHLRKKLVDSTDKADLRLIYLALAHMIKFRGHFLIEGDLNPDNSDVDKLFIQLVQTYNQLFEENPINASGVDAKAILSARLSKSRRLENLIAQLPGEKKNGLFGNLIALSLGLTPNFKSNFDLAEDAKLQLSKDTYDDDLDNLLAQIGDQYADLFLAAKNLSDAILLSDILRVNTEITKAPLSASMIKRYDEHHQDLTLLKALVRQQLPEKYKEIFFDQSKNGYAGYIDGGASQEEFYKFIKPILEKMDGTEELLVKLNREDLLRKQRTFDNGSIPHQIHLGELHAILRRQEDFYPFLKDNREKIEKILTFRIPYYVGPLARGNSRFAWMTRKSEETITPWNFEEVVDKGASAQSFIERMTNFDKNLPNEKVLPKHSLLYEYFTVYNELTKVKYVTEGMRKPAFLSGEQKKAIVDLLFKTNRKVTVKQLKEDYFKKIECFDSVEISGVEDRFNASLGTYHDLLKIIKDKDFLDNEENEDILEDIVLTLTLFEDREMIEERLKTYAHLFDDKVMKQLKRRRYTGWGRLSRKLINGIRDKQSGKTILDFLKSDGFANRNFMQLIHDDSLTFKEDIQKAQVSGQGDSLHEHIANLAGSPAIKKGILQTVKVVDELVKVMGRHKPENIVIEMARENQTTQKGQKNSRERMKRIEEGIKELGSQILKEHPVENTQLQNEKLYLYYLQNGRDMYVDQELDINRLSDYDVDHIVPQSFLKDDSIDNKVLTRSDKARGKSDNVPSEEVVKKMKNYWRQLLNAKLITQRKFDNLTKAERGGLSELDKAGFIKRQLVETRQITKHVAQILDSRMNTKYDENDKLIREVKVITLKSKLVSDFRKDFQFYKVREINNYHHAHDAYLNAVVGTALIKKYPKLESEFVYGDYKVYDVRKMIAKSEQEIGKATAKYFFYSNIMNFFKTEITLANGEIRKRPLIETNGETGEIVWDKGRDFATVRKVLSMPQVNIVKKTEVQTGGFSKESILPKRNSDKLIARKKDWDPKKYGGFDSPTVAYSVLVVAKVEKGKSKKLKSVKELLGITIMERSSFEKNPIDFLEAKGYKEVKKDLIIKLPKYSLFELENGRKRMLASAGELQKGNELALPSKYVNFLYLASHYEKLKGSPEDNEQKQLFVEQHKHYLDEIIEQISEFSKRVILADANLDKVLSAYNKHRDKPIREQAENIIHLFTLTNLGAPAAFKYFDTTIDRKRYTSTKEVLDATLIHQSITGLYETRIDLSQLGGDGGPAPGGGGSSGGTVSLQDEHRLFDIPVTTSLPDVWLQDFPQAWAETGGLGRAKCQAPIIIDLKPTAVPVSIKQYPMSLEAHMGIRQHIIKFLELGVLRPCRSPWNTPLLPVKKPGTQDYRPVQDLREINKRTVDIHPTVPNPYNLLSTLKPDYSWYTVLDLKDAFFCLPLAPQSQELFAFEWKDPERGISGQLTWTRLPQGFKNSPTLFNEALHRDLTDFRTQHPEVTLLQYVDDLLLAAPTKKACTQGTRHLLQELGEKGYRASAKKAQICQTKVTYLGYILSEGKRWLTPGRIETVARIPPPRNPREVREFLGKAGFCRLFIPGFAELAAPLYALTKPSTPFTWQTEHQLAFEALKKALLSAPALGLPDTSKPFTLFLDERQGIAKGVLTQKLGPWKRPVAYLSKKLDPVAAGWPPCLRIMAATAMLVKDSAKLTLGQPLTVITPHTLEAIVRQPPDRWITNARLTHYQALLLDTDRVQFGPPVTLNPATLLPVPENQPSPHDCRQVLAETHGTREDLKDQELPDADHTWYTDGSSYLDSGTRRAGAAVVDGHNTIWAQSLPPGTSAQKAELIALTKALELSKGKKANIYTDSRYAFATAHTHGSIYERRGWLTSEGKEIKNKAEIIALLKALFLPQEVAIIHCPGHQKGQDPVAVGNRQADRVARQAAMAEVLTLATEPDNTSHITAGKRTADGSEFEKRTADGSEFESPKKKAKVE

SEQ ID NO: 2014 - protein, 2102 aa, synthetic construct
MPAAKRVKLDGGDKKYSIGLDIGTNSVGWAVITDEYKVPSKKFKVLGNTDRHSIKKNLIGALLFDSGETAEATRLKRTARRRYTRRKNRICYLQEIFSNEMAKVDDSFFHRLEESFLVEEDKKHERHPIFGNIVDEVAYHEKYPTIYHLRKKLVDSTDKADLRLIYLALAHMIKFRGHFLIEGDLNPDNSDVDKLFIQLVQTYNQLFEENPINASGVDAKAILSARLSKSRRLENLIAQLPGEKKNGLFGNLIALSLGLTPNFKSNFDLAEDAKLQLSKDTYDDDLDNLLAQIGDQYADLFLAAKNLSDAILLSDILRVNTEITKAPLSASMIKRYDEHHQDLTLLKALVRQQLPEKYKEIFFDQSKNGYAGYIDGGASQEEFYKFIKPILEKMDGTEELLVKLNREDLLRKQRTFDNGSIPHQIHLGELHAILRRQEDFYPFLKDNREKIEKILTFRIPYYVGPLARGNSRFAWMTRKSEETITPWNFEEVVDKGASAQSFIERMTNFDKNLPNEKVLPKHSLLYEYFTVYNELTKVKYVTEGMRKPAFLSGEQKKAIVDLLFKTNRKVTVKQLKEDYFKKIECFDSVEISGVEDRFNASLGTYHDLLKIIKDKDFLDNEENEDILEDIVLTLTLFEDREMIEERLKTYAHLFDDKVMKQLKRRRYTGWGRLSRKLINGIRDKQSGKTILDFLKSDGFANRNFMQLIHDDSLTFKEDIQKAQVSGQGDSLHEHIANLAGSPAIKKGILQTVKVVDELVKVMGRHKPENIVIEMARENQTTQKGQKNSRERMKRIEEGIKELGSQILKEHPVENTQLQNEKLYLYYLQNGRDMYVDQELDINRLSDYDVDHIVPQSFLKDDSIDNKVLTRSDKARGKSDNVPSEEVVKKMKNYWRQLLNAKLITQRKFDNLTKAERGGLSELDKAGFIKRQLVETRQITKHVAQILDSRMNTKYDENDKLIREVKVITLKSKLVSDFRKDFQFYKVREINNYHHAHDAYLNAVVGTALIKKYPKLESEFVYGDYKVYDVRKMIAKSEQEIGKATAKYFFYSNIMNFFKTEITLANGEIRKRPLIETNGETGEIVWDKGRDFATVRKVLSMPQVNIVKKTEVQTGGFSKESILPKRNSDKLIARKKDWDPKKYGGFDSPTVAYSVLVVAKVEKGKSKKLKSVKELLGITIMERSSFEKNPIDFLEAKGYKEVKKDLIIKLPKYSLFELENGRKRMLASAGELQKGNELALPSKYVNFLYLASHYEKLKGSPEDNEQKQLFVEQHKHYLDEIIEQISEFSKRVILADANLDKVLSAYNKHRDKPIREQAENIIHLFTLTNLGAPAAFKYFDTTIDRKRYTSTKEVLDATLIHQSITGLYETRIDLSQLGGDGGEAAAKGSSGGGGGTVSLQDEHRLFDIPVTTSLPDVWLQDFPQAWAETGGLGRAKCQAPIIIDLKPTAVPVSIKQYPMSLEAHMGIRQHIIKFLELGVLRPCRSPWNTPLLPVKKPGTQDYRPVQDLREINKRTVDIHPTVPNPYNLLSTLKPDYSWYTVLDLKDAFFCLPLAPQSQELFAFEWKDPERGISGQLTWTRLPQGFKNSPTLFNEALHRDLTDFRTQHPEVTLLQYVDDLLLAAPTKKACTQGTRHLLQELGEKGYRASAKKAQICQTKVTYLGYILSEGKRWLTPGRIETVARIPPPRNPREVREFLGKAGFCRLFIPGFAELAAPLYALTKPSTPFTWQTEHQLAFEALKKALLSAPALGLPDTSKPFTLFLDERQGIAKGVLTQKLGPWKRPVAYLSKKLDPVAAGWPPCLRIMAATAMLVKDSAKLTLGQPLTVITPHTLEAIVRQPPDRWITNARLTHYQALLLDTDRVQFGPPVTLNPATLLPVPENQPSPHDCRQVLAETHGTREDLKDQELPDADHTWYTDGSSYLDSGTRRAGAAVVDGHNTIWAQSLPPGTSAQKAELIALTKALELSKGKKANIYTDSRYAFATAHTHGSIYERRGWLTSEGKEIKNKAEIIALLKALFLPQEVAIIHCPGHQKGQDPVAVGNRQADRVARQAAMAEVLTLATEPDNTSHITAGKRTADGSEFEKRTADGSEFESPKKKAKVE

SEQ ID NO: 2015 - protein, 2100 aa, synthetic construct
MPAAKRVKLDGGDKKYSIGLDIGTNSVGWAVITDEYKVPSKKFKVLGNTDRHSIKKNLIGALLFDSGETAEATRLKRTARRRYTRRKNRICYLQEIFSNEMAKVDDSFFHRLEESFLVEEDKKHERHPIFGNIVDEVAYHEKYPTIYHLRKKLVDSTDKADLRLIYLALAHMIKFRGHFLIEGDLNPDNSDVDKLFIQLVQTYNQLFEENPINASGVDAKAILSARLSKSRRLENLIAQLPGEKKNGLFGNLIALSLGLTPNFKSNFDLAEDAKLQLSKDTYDDDLDNLLAQIGDQYADLFLAAKNLSDAILLSDILRVNTEITKAPLSASMIKRYDEHHQDLTLLKALVRQQLPEKYKEIFFDQSKNGYAGYIDGGASQEEFYKFIKPILEKMDGTEELLVKLNREDLLRKQRTFDNGSIPHQIHLGELHAILRRQEDFYPFLKDNREKIEKILTFRIPYYVGPLARGNSRFAWMTRKSEETITPWNFEEVVDKGASAQSFIERMTNFDKNLPNEKVLPKHSLLYEYFTVYNELTKVKYVTEGMRKPAFLSGEQKKAIVDLLFKTNRKVTVKQLKEDYFKKIECFDSVEISGVEDRFNASLGTYHDLLKIIKDKDFLDNEENEDILEDIVLTLTLFEDREMIEERLKTYAHLFDDKVMKQLKRRRYTGWGRLSRKLINGIRDKQSGKTILDFLKSDGFANRNFMQLIHDDSLTFKEDIQKAQVSGQGDSLHEHIANLAGSPAIKKGILQTVKVVDELVKVMGRHKPENIVIEMARENQTTQKGQKNSRERMKRIEEGIKELGSQILKEHPVENTQLQNEKLYLYYLQNGRDMYVDQELDINRLSDYDVDHIVPQSFLKDDSIDNKVLTRSDKARGKSDNVPSEEVVKKMKNYWRQLLNAKLITQRKFDNLTKAERGGLSELDKAGFIKRQLVETRQITKHVAQILDSRMNTKYDENDKLIREVKVITLKSKLVSDFRKDFQFYKVREINNYHHAHDAYLNAVVGTALIKKYPKLESEFVYGDYKVYDVRKMIAKSEQEIGKATAKYFFYSNIMNFFKTEITLANGEIRKRPLIETNGETGEIVWDKGRDFATVRKVLSMPQVNIVKKTEVQTGGFSKESILPKRNSDKLIARKKDWDPKKYGGFDSPTVAYSVLVVAKVEKGKSKKLKSVKELLGITIMERSSFEKNPIDFLEAKGYKEVKKDLIIKLPKYSLFELENGRKRMLASAGELQKGNELALPSKYVNFLYLASHYEKLKGSPEDNEQKQLFVEQHKHYLDEIIEQISEFSKRVILADANLDKVLSAYNKHRDKPIREQAENIIHLFTLTNLGAPAAFKYFDTTIDRKRYTSTKEVLDATLIHQSITGLYETRIDLSQLGGDGGPAPGGGGGSGGTVSLQDEHRLFDIPVTTSLPDVWLQDFPQAWAETGGLGRAKCQAPIIIDLKPTAVPVSIKQYPMSLEAHMGIRQHIIKFLELGVLRPCRSPWNTPLLPVKKPGTQDYRPVQDLREINKRTVDIHPTVPNPYNLLSTLKPDYSWYTVLDLKDAFFCLPLAPQSQELFAFEWKDPERGISGQLTWTRLPQGFKNSPTLFNEALHRDLTDFRTQHPEVTLLQYVDDLLLAAPTKKACTQGTRHLLQELGEKGYRASAKKAQICQTKVTYLGYILSEGKRWLTPGRIETVARIPPPRNPREVREFLGKAGFCRLFIPGFAELAAPLYALTKPSTPFTWQTEHQLAFEALKKALLSAPALGLPDTSKPFTLFLDERQGIAKGVLTQKLGPWKRPVAYLSKKLDPVAAGWPPCLRIMAATAMLVKDSAKLTLGQPLTVITPHTLEAIVRQPPDRWITNARLTHYQALLLDTDRVQFGPPVTLNPATLLPVPENQPSPHDCRQVLAETHGTREDLKDQELPDADHTWYTDGSSYLDSGTRRAGAAVVDGHNTIWAQSLPPGTSAQKAELIALTKALELSKGKKANIYTDSRYAFATAHTHGSIYERRGWLTSEGKEIKNKAEIIALLKALFLPQEVAIIHCPGHQKGQDPVAVGNRQADRVARQAAMAEVLTLATEPDNTSHITAGKRTADGSEFEKRTADGSEFESPKKKAKVE

SEQ ID NO: 2016 - protein, 2095 aa, synthetic construct
MPAAKRVKLDGGDKKYSIGLDIGTNSVGWAVITDEYKVPSKKFKVLGNTDRHSIKKNLIGALLFDSGETAEATRLKRTARRRYTRRKNRICYLQEIFSNEMAKVDDSFFHRLEESFLVEEDKKHERHPIFGNIVDEVAYHEKYPTIYHLRKKLVDSTDKADLRLIYLALAHMIKFRGHFLIEGDLNPDNSDVDKLFIQLVQTYNQLFEENPINASGVDAKAILSARLSKSRRLENLIAQLPGEKKNGLFGNLIALSLGLTPNFKSNFDLAEDAKLQLSKDTYDDDLDNLLAQIGDQYADLFLAAKNLSDAILLSDILRVNTEITKAPLSASMIKRYDEHHQDLTLLKALVRQQLPEKYKEIFFDQSKNGYAGYIDGGASQEEFYKFIKPILEKMDGTEELLVKLNREDLLRKQRTFDNGSIPHQIHLGELHAILRRQEDFYPFLKDNREKIEKILTFRIPYYVGPLARGNSRFAWMTRKSEETITPWNFEEVVDKGASAQSFIERMTNFDKNLPNEKVLPKHSLLYEYFTVYNELTKVKYVTEGMRKPAFLSGEQKKAIVDLLFKTNRKVTVKQLKEDYFKKIECFDSVEISGVEDRFNASLGTYHDLLKIIKDKDFLDNEENEDILEDIVLTLTLFEDREMIEERLKTYAHLFDDKVMKQLKRRRYTGWGRLSRKLINGIRDKQSGKTILDFLKSDGFANRNFMQLIHDDSLTFKEDIQKAQVSGQGDSLHEHIANLAGSPAIKKGILQTVKVVDELVKVMGRHKPENIVIEMARENQTTQKGQKNSRERMKRIEEGIKELGSQILKEHPVENTQLQNEKLYLYYLQNGRDMYVDQELDINRLSDYDVDHIVPQSFLKDDSIDNKVLTRSDKARGKSDNVPSEEVVKKMKNYWRQLLNAKLITQRKFDNLTKAERGGLSELDKAGFIKRQLVETRQITKHVAQILDSRMNTKYDENDKLIREVKVITLKSKLVSDFRKDFQFYKVREINNYHHAHDAYLNAVVGTALIKKYPKLESEFVYGDYKVYDVRKMIAKSEQEIGKATAKYFFYSNIMNFFKTEITLANGEIRKRPLIETNGETGEIVWDKGRDFATVRKVLSMPQVNIVKKTEVQTGGFSKESILPKRNSDKLIARKKDWDPKKYGGFDSPTVAYSVLVVAKVEKGKSKKLKSVKELLGITIMERSSFEKNPIDFLEAKGYKEVKKDLIIKLPKYSLFELENGRKRMLASAGELQKGNELALPSKYVNFLYLASHYEKLKGSPEDNEQKQLFVEQHKHYLDEIIEQISEFSKRVILADANLDKVLSAYNKHRDKPIREQAENIIHLFTLTNLGAPAAFKYFDTTIDRKRYTSTKEVLDATLIHQSITGLYETRIDLSQLGGDGGGGGGGGTVSLQDEHRLFDIPVTTSLPDVWLQDFPQAWAETGGLGRAKCQAPIIIDLKPTAVPVSIKQYPMSLEAHMGIRQHIIKFLELGVLRPCRSPWNTPLLPVKKPGTQDYRPVQDLREINKRTVDIHPTVPNPYNLLSTLKPDYSWYTVLDLKDAFFCLPLAPQSQELFAFEWKDPERGISGQLTWTRLPQGFKNSPTLFNEALHRDLTDFRTQHPEVTLLQYVDDLLLAAPTKKACTQGTRHLLQELGEKGYRASAKKAQICQTKVTYLGYILSEGKRWLTPGRIETVARIPPPRNPREVREFLGKAGFCRLFIPGFAELAAPLYALTKPSTPFTWQTEHQLAFEALKKALLSAPALGLPDTSKPFTLFLDERQGIAKGVLTQKLGPWKRPVAYLSKKLDPVAAGWPPCLRIMAATAMLVKDSAKLTLGQPLTVITPHTLEAIVRQPPDRWITNARLTHYQALLLDTDRVQFGPPVTLNPATLLPVPENQPSPHDCRQVLAETHGTREDLKDQELPDADHTWYTDGSSYLDSGTRRAGAAVVDGHNTIWAQSLPPGTSAQKAELIALTKALELSKGKKANIYTDSRYAFATAHTHGSIYERRGWLTSEGKEIKNKAEIIALLKALFLPQEVAIIHCPGHQKGQDPVAVGNRQADRVARQAAMAEVLTLATEPDNTSHITAGKRTADGSEFEKRTADGSEFESPKKKAKVE

SEQ ID NO: 2017 - protein, 2102 aa, synthetic construct
MPAAKRVKLDGGDKKYSIGLDIGTNSVGWAVITDEYKVPSKKFKVLGNTDRHSIKKNLIGALLFDSGETAEATRLKRTARRRYTRRKNRICYLQEIFSNEMAKVDDSFFHRLEESFLVEEDKKHERHPIFGNIVDEVAYHEKYPTIYHLRKKLVDSTDKADLRLIYLALAHMIKFRGHFLIEGDLNPDNSDVDKLFIQLVQTYNQLFEENPINASGVDAKAILSARLSKSRRLENLIAQLPGEKKNGLFGNLIALSLGLTPNFKSNFDLAEDAKLQLSKDTYDDDLDNLLAQIGDQYADLFLAAKNLSDAILLSDILRVNTEITKAPLSASMIKRYDEHHQDLTLLKALVRQQLPEKYKEIFFDQSKNGYAGYIDGGASQEEFYKFIKPILEKMDGTEELLVKLNREDLLRKQRTFDNGSIPHQIHLGELHAILRRQEDFYPFLKDNREKIEKILTFRIPYYVGPLARGNSRFAWMTRKSEETITPWNFEEVVDKGASAQSFIERMTNFDKNLPNEKVLPKHSLLYEYFTVYNELTKVKYVTEGMRKPAFLSGEQKKAIVDLLFKTNRKVTVKQLKEDYFKKIECFDSVEISGVEDRFNASLGTYHDLLKIIKDKDFLDNEENEDILEDIVLTLTLFEDREMIEERLKTYAHLFDDKVMKQLKRRRYTGWGRLSRKLINGIRDKQSGKTILDFLKSDGFANRNFMQLIHDDSLTFKEDIQKAQVSGQGDSLHEHIANLAGSPAIKKGILQTVKVVDELVKVMGRHKPENIVIEMARENQTTQKGQKNSRERMKRIEEGIKELGSQILKEHPVENTQLQNEKLYLYYLQNGRDMYVDQELDINRLSDYDVDHIVPQSFLKDDSIDNKVLTRSDKARGKSDNVPSEEVVKKMKNYWRQLLNAKLITQRKFDNLTKAERGGLSELDKAGFIKRQLVETRQITKHVAQILDSRMNTKYDENDKLIREVKVITLKSKLVSDFRKDFQFYKVREINNYHHAHDAYLNAVVGTALIKKYPKLESEFVYGDYKVYDVRKMIAKSEQEIGKATAKYFFYSNIMNFFKTEITLANGEIRKRPLIETNGETGEIVWDKGRDFATVRKVLSMPQVNIVKKTEVQTGGFSKESILPKRNSDKLIARKKDWDPKKYGGFDSPTVAYSVLVVAKVEKGKSKKLKSVKELLGITIMERSSFEKNPIDFLEAKGYKEVKKDLIIKLPKYSLFELENGRKRMLASAGELQKGNELALPSKYVNFLYLASHYEKLKGSPEDNEQKQLFVEQHKHYLDEIIEQISEFSKRVILADANLDKVLSAYNKHRDKPIREQAENIIHLFTLTNLGAPAAFKYFDTTIDRKRYTSTKEVLDATLIHQSITGLYETRIDLSQLGGDGGGGGEAAAKGSSGGTVSLQDEHRLFDIPVTTSLPDVWLQDFPQAWAETGGLGRAKCQAPIIIDLKPTAVPVSIKQYPMSLEAHMGIRQHIIKFLELGVLRPCRSPWNTPLLPVKKPGTQDYRPVQDLREINKRTVDIHPTVPNPYNLLSTLKPDYSWYTVLDLKDAFFCLPLAPQSQELFAFEWKDPERGISGQLTWTRLPQGFKNSPTLFNEALHRDLTDFRTQHPEVTLLQYVDDLLLAAPTKKACTQGTRHLLQELGEKGYRASAKKAQICQTKVTYLGYILSEGKRWLTPGRIETVARIPPPRNPREVREFLGKAGFCRLFIPGFAELAAPLYALTKPSTPFTWQTEHQLAFEALKKALLSAPALGLPDTSKPFTLFLDERQGIAKGVLTQKLGPWKRPVAYLSKKLDPVAAGWPPCLRIMAATAMLVKDSAKLTLGQPLTVITPHTLEAIVRQPPDRWITNARLTHYQALLLDTDRVQFGPPVTLNPATLLPVPENQPSPHDCRQVLAETHGTREDLKDQELPDADHTWYTDGSSYLDSGTRRAGAAVVDGHNTIWAQSLPPGTSAQKAELIALTKALELSKGKKANIYTDSRYAFATAHTHGSIYERRGWLTSEGKEIKNKAEIIALLKALFLPQEVAIIHCPGHQKGQDPVAVGNRQADRVARQAAMAEVLTLATEPDNTSHITAGKRTADGSEFEKRTADGSEFESPKKKAKVE

SEQ ID NO: 2018 - protein, 2104 aa, synthetic construct
MPAAKRVKLDGGDKKYSIGLDIGTNSVGWAVITDEYKVPSKKFKVLGNTDRHSIKKNLIGALLFDSGETAEATRLKRTARRRYTRRKNRICYLQEIFSNEMAKVDDSFFHRLEESFLVEEDKKHERHPIFGNIVDEVAYHEKYPTIYHLRKKLVDSTDKADLRLIYLALAHMIKFRGHFLIEGDLNPDNSDVDKLFIQLVQTYNQLFEENPINASGVDAKAILSARLSKSRRLENLIAQLPGEKKNGLFGNLIALSLGLTPNFKSNFDLAEDAKLQLSKDTYDDDLDNLLAQIGDQYADLFLAAKNLSDAILLSDILRVNTEITKAPLSASMIKRYDEHHQDLTLLKALVRQQLPEKYKEIFFDQSKNGYAGYIDGGASQEEFYKFIKPILEKMDGTEELLVKLNREDLLRKQRTFDNGSIPHQIHLGELHAILRRQEDFYPFLKDNREKIEKILTFRIPYYVGPLARGNSRFAWMTRKSEETITPWNFEEVVDKGASAQSFIERMTNFDKNLPNEKVLPKHSLLYEYFTVYNELTKVKYVTEGMRKPAFLSGEQKKAIVDLLFKTNRKVTVKQLKEDYFKKIECFDSVEISGVEDRFNASLGTYHDLLKIIKDKDFLDNEENEDILEDIVLTLTLFEDREMIEERLKTYAHLFDDKVMKQLKRRRYTGWGRLSRKLINGIRDKQSGKTILDFLKSDGFANRNFMQLIHDDSLTFKEDIQKAQVSGQGDSLHEHIANLAGSPAIKKGILQTVKVVDELVKVMGRHKPENIVIEMARENQTTQKGQKNSRERMKRIEEGIKELGSQILKEHPVENTQLQNEKLYLYYLQNGRDMYVDQELDINRLSDYDVDHIVPQSFLKDDSIDNKVLTRSDKARGKSDNVPSEEVVKKMKNYWRQLLNAKLITQRKFDNLTKAERGGLSELDKAGFIKRQLVETRQITKHVAQILDSRMNTKYDENDKLIREVKVITLKSKLVSDFRKDFQFYKVREINNYHHAHDAYLNAVVGTALIKKYPKLESEFVYGDYKVYDVRKMIAKSEQEIGKATAKYFFYSNIMNFFKTEITLANGEIRKRPLIETNGETGEIVWDKGRDFATVRKVLSMPQVNIVKKTEVQTGGFSKESILPKRNSDKLIARKKDWDPKKYGGFDSPTVAYSVLVVAKVEKGKSKKLKSVKELLGITIMERSSFEKNPIDFLEAKGYKEVKKDLIIKLPKYSLFELENGRKRMLASAGELQKGNELALPSKYVNFLYLASHYEKLKGSPEDNEQKQLFVEQHKHYLDEIIEQISEFSKRVILADANLDKVLSAYNKHRDKPIREQAENIIHLFTLTNLGAPAAFKYFDTTIDRKRYTSTKEVLDATLIHQSITGLYETRIDLSQLGGDGGPAPAPAPAPAPAPGGTVSLQDEHRLFDIPVTTSLPDVWLQDFPQAWAETGGLGRAKCQAPIIIDLKPTAVPVSIKQYPMSLEAHMGIRQHIIKFLELGVLRPCRSPWNTPLLPVKKPGTQDYRPVQDLREINKRTVDIHPTVPNPYNLLSTLKPDYSWYTVLDLKDAFFCLPLAPQSQELFAFEWKDPERGISGQLTWTRLPQGFKNSPTLFNEALHRDLTDFRTQHPEVTLLQYVDDLLLAAPTKKACTQGTRHLLQELGEKGYRASAKKAQICQTKVTYLGYILSEGKRWLTPGRIETVARIPPPRNPREVREFLGKAGFCRLFIPGFAELAAPLYALTKPSTPFTWQTEHQLAFEALKKALLSAPALGLPDTSKPFTLFLDERQGIAKGVLTQKLGPWKRPVAYLSKKLDPVAAGWPPCLRIMAATAMLVKDSAKLTLGQPLTVITPHTLEAIVRQPPDRWITNARLTHYQALLLDTDRVQFGPPVTLNPATLLPVPENQPSPHDCRQVLAETHGTREDLKDQELPDADHTWYTDGSSYLDSGTRRAGAAVVDGHNTIWAQSLPPGTSAQKAELIALTKALELSKGKKANIYTDSRYAFATAHTHGSIYERRGWLTSEGKEIKNKAEIIALLKALFLPQEVAIIHCPGHQKGQDPVAVGNRQADRVARQAAMAEVLTLATEPDNTSHITAGKRTADGSEFEKRTADGSEFESPKKKAKVE

SEQ ID NO: 2019 - protein, 2100 aa, synthetic construct
MPAAKRVKLDGGDKKYSIGLDIGTNSVGWAVITDEYKVPSKKFKVLGNTDRHSIKKNLIGALLFDSGETAEATRLKRTARRRYTRRKNRICYLQEIFSNEMAKVDDSFFHRLEESFLVEEDKKHERHPIFGNIVDEVAYHEKYPTIYHLRKKLVDSTDKADLRLIYLALAHMIKFRGHFLIEGDLNPDNSDVDKLFIQLVQTYNQLFEENPINASGVDAKAILSARLSKSRRLENLIAQLPGEKKNGLFGNLIALSLGLTPNFKSNFDLAEDAKLQLSKDTYDDDLDNLLAQIGDQYADLFLAAKNLSDAILLSDILRVNTEITKAPLSASMIKRYDEHHQDLTLLKALVRQQLPEKYKEIFFDQSKNGYAGYIDGGASQEEFYKFIKPILEKMDGTEELLVKLNREDLLRKQRTFDNGSIPHQIHLGELHAILRRQEDFYPFLKDNREKIEKILTFRIPYYVGPLARGNSRFAWMTRKSEETITPWNFEEVVDKGASAQSFIERMTNFDKNLPNEKVLPKHSLLYEYFTVYNELTKVKYVTEGMRKPAFLSGEQKKAIVDLLFKTNRKVTVKQLKEDYFKKIECFDSVEISGVEDRFNASLGTYHDLLKIIKDKDFLDNEENEDILEDIVLTLTLFEDREMIEERLKTYAHLFDDKVMKQLKRRRYTGWGRLSRKLINGIRDKQSGKTILDFLKSDGFANRNFMQLIHDDSLTFKEDIQKAQVSGQGDSLHEHIANLAGSPAIKKGILQTVKVVDELVKVMGRHKPENIVIEMARENQTTQKGQKNSRERMKRIEEGIKELGSQILKEHPVENTQLQNEKLYLYYLQNGRDMYVDQELDINRLSDYDVDHIVPQSFLKDDSIDNKVLTRSDKARGKSDNVPSEEVVKKMKNYWRQLLNAKLITQRKFDNLTKAERGGLSELDKAGFIKRQLVETRQITKHVAQILDSRMNTKYDENDKLIREVKVITLKSKLVSDFRKDFQFYKVREINNYHHAHDAYLNAVVGTALIKKYPKLESEFVYGDYKVYDVRKMIAKSEQEIGKATAKYFFYSNIMNFFKTEITLANGEIRKRPLIETNGETGEIVWDKGRDFATVRKVLSMPQVNIVKKTEVQTGGFSKESILPKRNSDKLIARKKDWDPKKYGGFDSPTVAYSVLVVAKVEKGKSKKLKSVKELLGITIMERSSFEKNPIDFLEAKGYKEVKKDLIIKLPKYSLFELENGRKRMLASAGELQKGNELALPSKYVNFLYLASHYEKLKGSPEDNEQKQLFVEQHKHYLDEIIEQISEFSKRVILADANLDKVLSAYNKHRDKPIREQAENIIHLFTLTNLGAPAAFKYFDTTIDRKRYTSTKEVLDATLIHQSITGLYETRIDLSQLGGDGGPAPGSSGGGGGTVSLQDEHRLFDIPVTTSLPDVWLQDFPQAWAETGGLGRAKCQAPIIIDLKPTAVPVSIKQYPMSLEAHMGIRQHIIKFLELGVLRPCRSPWNTPLLPVKKPGTQDYRPVQDLREINKRTVDIHPTVPNPYNLLSTLKPDYSWYTVLDLKDAFFCLPLAPQSQELFAFEWKDPERGISGQLTWTRLPQGFKNSPTLFNEALHRDLTDFRTQHPEVTLLQYVDDLLLAAPTKKACTQGTRHLLQELGEKGYRASAKKAQICQTKVTYLGYILSEGKRWLTPGRIETVARIPPPRNPREVREFLGKAGFCRLFIPGFAELAAPLYALTKPSTPFTWQTEHQLAFEALKKALLSAPALGLPDTSKPFTLFLDERQGIAKGVLTQKLGPWKRPVAYLSKKLDPVAAGWPPCLRIMAATAMLVKDSAKLTLGQPLTVITPHTLEAIVRQPPDRWITNARLTHYQALLLDTDRVQFGPPVTLNPATLLPVPENQPSPHDCRQVLAETHGTREDLKDQELPDADHTWYTDGSSYLDSGTRRAGAAVVDGHNTIWAQSLPPGTSAQKAELIALTKALELSKGKKANIYTDSRYAFATAHTHGSIYERRGWLTSEGKEIKNKAEIIALLKALFLPQEVAIIHCPGHQKGQDPVAVGNRQADRVARQAAMAEVLTLATEPDNTSHITAGKRTADGSEFEKRTADGSEFESPKKKAKVE

SEQ ID NO: 2020 - protein, 2100 aa, synthetic construct
MPAAKRVKLDGGDKKYSIGLDIGTNSVGWAVITDEYKVPSKKFKVLGNTDRHSIKKNLIGALLFDSGETAEATRLKRTARRRYTRRKNRICYLQEIFSNEMAKVDDSFFHRLEESFLVEEDKKHERHPIFGNIVDEVAYHEKYPTIYHLRKKLVDSTDKADLRLIYLALAHMIKFRGHFLIEGDLNPDNSDVDKLFIQLVQTYNQLFEENPINASGVDAKAILSARLSKSRRLENLIAQLPGEKKNGLFGNLIALSLGLTPNFKSNFDLAEDAKLQLSKDTYDDDLDNLLAQIGDQYADLFLAAKNLSDAILLSDILRVNTEITKAPLSASMIKRYDEHHQDLTLLKALVRQQLPEKYKEIFFDQSKNGYAGYIDGGASQEEFYKFIKPILEKMDGTEELLVKLNREDLLRKQRTFDNGSIPHQIHLGELHAILRRQEDFYPFLKDNREKIEKILTFRIPYYVGPLARGNSRFAWMTRKSEETITPWNFEEVVDKGASAQSFIERMTNFDKNLPNEKVLPKHSLLYEYFTVYNELTKVKYVTEGMRKPAFLSGEQKKAIVDLLFKTNRKVTVKQLKEDYFKKIECFDSVEISGVEDRFNASLGTYHDLLKIIKDKDFLDNEENEDILEDIVLTLTLFEDREMIEERLKTYAHLFDDKVMKQLKRRRYTGWGRLSRKLINGIRDKQSGKTILDFLKSDGFANRNFMQLIHDDSLTFKEDIQKAQVSGQGDSLHEHIANLAGSPAIKKGILQTVKVVDELVKVMGRHKPENIVIEMARENQTTQKGQKNSRERMKRIEEGIKELGSQILKEHPVENTQLQNEKLYLYYLQNGRDMYVDQELDINRLSDYDVDHIVPQSFLKDDSIDNKVLTRSDKARGKSDNVPSEEVVKKMKNYWRQLLNAKLITQRKFDNLTKAERGGLSELDKAGFIKRQLVETRQITKHVAQILDSRMNTKYDENDKLIREVKVITLKSKLVSDFRKDFQFYKVREINNYHHAHDAYLNAVVGTALIKKYPKLESEFVYGDYKVYDVRKMIAKSEQEIGKATAKYFFYSNIMNFFKTEITLANGEIRKRPLIETNGETGEIVWDKGRDFATVRKVLSMPQVNIVKKTEVQTGGFSKESILPKRNSDKLIARKKDWDPKKYGGFDSPTVAYSVLVVAKVEKGKSKKLKSVKELLGITIMERSSFEKNPIDFLEAKGYKEVKKDLIIKLPKYSLFELENGRKRMLASAGELQKGNELALPSKYVNFLYLASHYEKLKGSPEDNEQKQLFVEQHKHYLDEIIEQISEFSKRVILADANLDKVLSAYNKHRDKPIREQAENIIHLFTLTNLGAPAAFKYFDTTIDRKRYTSTKEVLDATLIHQSITGLYETRIDLSQLGGDGGGSSGGSPAPGGTVSLQDEHRLFDIPVTTSLPDVWLQDFPQAWAETGGLGRAKCQAPIIIDLKPTAVPVSIKQYPMSLEAHMGIRQHIIKFLELGVLRPCRSPWNTPLLPVKKPGTQDYRPVQDLREINKRTVDIHPTVPNPYNLLSTLKPDYSWYTVLDLKDAFFCLPLAPQSQELFAFEWKDPERGISGQLTWTRLPQGFKNSPTLFNEALHRDLTDFRTQHPEVTLLQYVDDLLLAAPTKKACTQGTRHLLQELGEKGYRASAKKAQICQTKVTYLGYILSEGKRWLTPGRIETVARIPPPRNPREVREFLGKAGFCRLFIPGFAELAAPLYALTKPSTPFTWQTEHQLAFEALKKALLSAPALGLPDTSKPFTLFLDERQGIAKGVLTQKLGPWKRPVAYLSKKLDPVAAGWPPCLRIMAATAMLVKDSAKLTLGQPLTVITPHTLEAIVRQPPDRWITNARLTHYQALLLDTDRVQFGPPVTLNPATLLPVPENQPSPHDCRQVLAETHGTREDLKDQELPDADHTWYTDGSSYLDSGTRRAGAAVVDGHNTIWAQSLPPGTSAQKAELIALTKALELSKGKKANIYTDSRYAFATAHTHGSIYERRGWLTSEGKEIKNKAEIIALLKALFLPQEVAIIHCPGHQKGQDPVAVGNRQADRVARQAAMAEVLTLATEPDNTSHITAGKRTADGSEFEKRTADGSEFESPKKKAKVE

SEQ ID NO: 2021 - protein, 2097 aa, synthetic construct
MPAAKRVKLDGGDKKYSIGLDIGTNSVGWAVITDEYKVPSKKFKVLGNTDRHSIKKNLIGALLFDSGETAEATRLKRTARRRYTRRKNRICYLQEIFSNEMAKVDDSFFHRLEESFLVEEDKKHERHPIFGNIVDEVAYHEKYPTIYHLRKKLVDSTDKADLRLIYLALAHMIKFRGHFLIEGDLNPDNSDVDKLFIQLVQTYNQLFEENPINASGVDAKAILSARLSKSRRLENLIAQLPGEKKNGLFGNLIALSLGLTPNFKSNFDLAEDAKLQLSKDTYDDDLDNLLAQIGDQYADLFLAAKNLSDAILLSDILRVNTEITKAPLSASMIKRYDEHHQDLTLLKALVRQQLPEKYKEIFFDQSKNGYAGYIDGGASQEEFYKFIKPILEKMDGTEELLVKLNREDLLRKQRTFDNGSIPHQIHLGELHAILRRQEDFYPFLKDNREKIEKILTFRIPYYVGPLARGNSRFAWMTRKSEETITPWNFEEVVDKGASAQSFIERMTNFDKNLPNEKVLPKHSLLYEYFTVYNELTKVKYVTEGMRKPAFLSGEQKKAIVDLLFKTNRKVTVKQLKEDYFKKIECFDSVEISGVEDRFNASLGTYHDLLKIIKDKDFLDNEENEDILEDIVLTLTLFEDREMIEERLKTYAHLFDDKVMKQLKRRRYTGWGRLSRKLINGIRDKQSGKTILDFLKSDGFANRNFMQLIHDDSLTFKEDIQKAQVSGQGDSLHEHIANLAGSPAIKKGILQTVKVVDELVKVMGRHKPENIVIEMARENQTTQKGQKNSRERMKRIEEGIKELGSQILKEHPVENTQLQNEKLYLYYLQNGRDMYVDQELDINRLSDYDVDHIVPQSFLKDDSIDNKVLTRSDKARGKSDNVPSEEVVKKMKNYWRQLLNAKLITQRKFDNLTKAERGGLSELDKAGFIKRQLVETRQITKHVAQILDSRMNTKYDENDKLIREVKVITLKSKLVSDFRKDFQFYKVREINNYHHAHDAYLNAVVGTALIKKYPKLESEFVYGDYKVYDVRKMIAKSEQEIGKATAKYFFYSNIMNFFKTEITLANGEIRKRPLIETNGETGEIVWDKGRDFATVRKVLSMPQVNIVKKTEVQTGGFSKESILPKRNSDKLIARKKDWDPKKYGGFDSPTVAYSVLVVAKVEKGKSKKLKSVKELLGITIMERSSFEKNPIDFLEAKGYKEVKKDLIIKLPKYSLFELENGRKRMLASAGELQKGNELALPSKYVNFLYLASHYEKLKGSPEDNEQKQLFVEQHKHYLDEIIEQISEFSKRVILADANLDKVLSAYNKHRDKPIREQAENIIHLFTLTNLGAPAAFKYFDTTIDRKRYTSTKEVLDATLIHQSITGLYETRIDLSQLGGDGGGGSPAPGGTVSLQDEHRLFDIPVTTSLPDVWLQDFPQAWAETGGLGRAKCQAPIIIDLKPTAVPVSIKQYPMSLEAHMGIRQHIIKFLELGVLRPCRSPWNTPLLPVKKPGTQDYRPVQDLREINKRTVDIHPTVPNPYNLLSTLKPDYSWYTVLDLKDAFFCLPLAPQSQELFAFEWKDPERGISGQLTWTRLPQGFKNSPTLFNEALHRDLTDFRTQHPEVTLLQYVDDLLLAAPTKKACTQGTRHLLQELGEKGYRASAKKAQICQTKVTYLGYILSEGKRWLTPGRIETVARIPPPRNPREVREFLGKAGFCRLFIPGFAELAAPLYALTKPSTPFTWQTEHQLAFEALKKALLSAPALGLPDTSKPFTLFLDERQGIAKGVLTQKLGPWKRPVAYLSKKLDPVAAGWPPCLRIMAATAMLVKDSAKLTLGQPLTVITPHTLEAIVRQPPDRWITNARLTHYQALLLDTDRVQFGPPVTLNPATLLPVPENQPSPHDCRQVLAETHGTREDLKDQELPDADHTWYTDGSSYLDSGTRRAGAAVVDGHNTIWAQSLPPGTSAQKAELIALTKALELSKGKKANIYTDSRYAFATAHTHGSIYERRGWLTSEGKEIKNKAEIIALLKALFLPQEVAIIHCPGHQKGQDPVAVGNRQADRVARQAAMAEVLTLATEPDNTSHITAGKRTADGSEFEKRTADGSEFESPKKKAKVE

SEQ ID NO: 2022 - protein, 2102 aa, synthetic construct
MPAAKRVKLDGGDKKYSIGLDIGTNSVGWAVITDEYKVPSKKFKVLGNTDRHSIKKNLIGALLFDSGETAEATRLKRTARRRYTRRKNRICYLQEIFSNEMAKVDDSFFHRLEESFLVEEDKKHERHPIFGNIVDEVAYHEKYPTIYHLRKKLVDSTDKADLRLIYLALAHMIKFRGHFLIEGDLNPDNSDVDKLFIQLVQTYNQLFEENPINASGVDAKAILSARLSKSRRLENLIAQLPGEKKNGLFGNLIALSLGLTPNFKSNFDLAEDAKLQLSKDTYDDDLDNLLAQIGDQYADLFLAAKNLSDAILLSDILRVNTEITKAPLSASMIKRYDEHHQDLTLLKALVRQQLPEKYKEIFFDQSKNGYAGYIDGGASQEEFYKFIKPILEKMDGTEELLVKLNREDLLRKQRTFDNGSIPHQIHLGELHAILRRQEDFYPFLKDNREKIEKILTFRIPYYVGPLARGNSRFAWMTRKSEETITPWNFEEVVDKGASAQSFIERMTNFDKNLPNEKVLPKHSLLYEYFTVYNELTKVKYVTEGMRKPAFLSGEQKKAIVDLLFKTNRKVTVKQLKEDYFKKIECFDSVEISGVEDRFNASLGTYHDLLKIIKDKDFLDNEENEDILEDIVLTLTLFEDREMIEERLKTYAHLFDDKVMKQLKRRRYTGWGRLSRKLINGIRDKQSGKTILDFLKSDGFANRNFMQLIHDDSLTFKEDIQKAQVSGQGDSLHEHIANLAGSPAIKKGILQTVKVVDELVKVMGRHKPENIVIEMARENQTTQKGQKNSRERMKRIEEGIKELGSQILKEHPVENTQLQNEKLYLYYLQNGRDMYVDQELDINRLSDYDVDHIVPQSFLKDDSIDNKVLTRSDKARGKSDNVPSEEVVKKMKNYWRQLLNAKLITQRKFDNLTKAERGGLSELDKAGFIKRQLVETRQITKHVAQILDSRMNTKYDENDKLIREVKVITLKSKLVSDFRKDFQFYKVREINNYHHAHDAYLNAVVGTALIKKYPKLESEFVYGDYKVYDVRKMIAKSEQEIGKATAKYFFYSNIMNFFKTEITLANGEIRKRPLIETNGETGEIVWDKGRDFATVRKVLSMPQVNIVKKTEVQTGGFSKESILPKRNSDKLIARKKDWDPKKYGGFDSPTVAYSVLVVAKVEKGKSKKLKSVKELLGITIMERSSFEKNPIDFLEAKGYKEVKKDLIIKLPKYSLFELENGRKRMLASAGELQKGNELALPSKYVNFLYLASHYEKLKGSPEDNEQKQLFVEQHKHYLDEIIEQISEFSKRVILADANLDKVLSAYNKHRDKPIREQAENIIHLFTLTNLGAPAAFKYFDTTIDRKRYTSTKEVLDATLIHQSITGLYETRIDLSQLGGDGGEAAAKPAPGSSGGTVSLQDEHRLFDIPVTTSLPDVWLQDFPQAWAETGGLGRAKCQAPIIIDLKPTAVPVSIKQYPMSLEAHMGIRQHIIKFLELGVLRPCRSPWNTPLLPVKKPGTQDYRPVQDLREINKRTVDIHPTVPNPYNLLSTLKPDYSWYTVLDLKDAFFCLPLAPQSQELFAFEWKDPERGISGQLTWTRLPQGFKNSPTLFNEALHRDLTDFRTQHPEVTLLQYVDDLLLAAPTKKACTQGTRHLLQELGEKGYRASAKKAQICQTKVTYLGYILSEGKRWLTPGRIETVARIPPPRNPREVREFLGKAGFCRLFIPGFAELAAPLYALTKPSTPFTWQTEHQLAFEALKKALLSAPALGLPDTSKPFTLFLDERQGIAKGVLTQKLGPWKRPVAYLSKKLDPVAAGWPPCLRIMAATAMLVKDSAKLTLGQPLTVITPHTLEAIVRQPPDRWITNARLTHYQALLLDTDRVQFGPPVTLNPATLLPVPENQPSPHDCRQVLAETHGTREDLKDQELPDADHTWYTDGSSYLDSGTRRAGAAVVDGHNTIWAQSLPPGTSAQKAELIALTKALELSKGKKANIYTDSRYAFATAHTHGSIYERRGWLTSEGKEIKNKAEIIALLKALFLPQEVAIIHCPGHQKGQDPVAVGNRQADRVARQAAMAEVLTLATEPDNTSHITAGKRTADGSEFEKRTADGSEFESPKKKAKVE

SEQ ID NO: 2023 - protein, 2094 aa, synthetic construct
MPAAKRVKLDGGDKKYSIGLDIGTNSVGWAVITDEYKVPSKKFKVLGNTDRHSIKKNLIGALLFDSGETAEATRLKRTARRRYTRRKNRICYLQEIFSNEMAKVDDSFFHRLEESFLVEEDKKHERHPIFGNIVDEVAYHEKYPTIYHLRKKLVDSTDKADLRLIYLALAHMIKFRGHFLIEGDLNPDNSDVDKLFIQLVQTYNQLFEENPINASGVDAKAILSARLSKSRRLENLIAQLPGEKKNGLFGNLIALSLGLTPNFKSNFDLAEDAKLQLSKDTYDDDLDNLLAQIGDQYADLFLAAKNLSDAILLSDILRVNTEITKAPLSASMIKRYDEHHQDLTLLKALVRQQLPEKYKEIFFDQSKNGYAGYIDGGASQEEFYKFIKPILEKMDGTEELLVKLNREDLLRKQRTFDNGSIPHQIHLGELHAILRRQEDFYPFLKDNREKIEKILTFRIPYYVGPLARGNSRFAWMTRKSEETITPWNFEEVVDKGASAQSFIERMTNFDKNLPNEKVLPKHSLLYEYFTVYNELTKVKYVTEGMRKPAFLSGEQKKAIVDLLFKTNRKVTVKQLKEDYFKKIECFDSVEISGVEDRFNASLGTYHDLLKIIKDKDFLDNEENEDILEDIVLTLTLFEDREMIEERLKTYAHLFDDKVMKQLKRRRYTGWGRLSRKLINGIRDKQSGKTILDFLKSDGFANRNFMQLIHDDSLTFKEDIQKAQVSGQGDSLHEHIANLAGSPAIKKGILQTVKVVDELVKVMGRHKPENIVIEMARENQTTQKGQKNSRERMKRIEEGIKELGSQILKEHPVENTQLQNEKLYLYYLQNGRDMYVDQELDINRLSDYDVDHIVPQSFLKDDSIDNKVLTRSDKARGKSDNVPSEEVVKKMKNYWRQLLNAKLITQRKFDNLTKAERGGLSELDKAGFIKRQLVETRQITKHVAQILDSRMNTKYDENDKLIREVKVITLKSKLVSDFRKDFQFYKVREINNYHHAHDAYLNAVVGTALIKKYPKLESEFVYGDYKVYDVRKMIAKSEQEIGKATAKYFFYSNIMNFFKTEITLANGEIRKRPLIETNGETGEIVWDKGRDFATVRKVLSMPQVNIVKKTEVQTGGFSKESILPKRNSDKLIARKKDWDPKKYGGFDSPTVAYSVLVVAKVEKGKSKKLKSVKELLGITIMERSSFEKNPIDFLEAKGYKEVKKDLIIKLPKYSLFELENGRKRMLASAGELQKGNELALPSKYVNFLYLASHYEKLKGSPEDNEQKQLFVEQHKHYLDEIIEQISEFSKRVILADANLDKVLSAYNKHRDKPIREQAENIIHLFTLTNLGAPAAFKYFDTTIDRKRYTSTKEVLDATLIHQSITGLYETRIDLSQLGGDGGPAPGGTVSLQDEHRLFDIPVTTSLPDVWLQDFPQAWAETGGLGRAKCQAPIIIDLKPTAVPVSIKQYPMSLEAHMGIRQHIIKFLELGVLRPCRSPWNTPLLPVKKPGTQDYRPVQDLREINKRTVDIHPTVPNPYNLLSTLKPDYSWYTVLDLKDAFFCLPLAPQSQELFAFEWKDPERGISGQLTWTRLPQGFKNSPTLFNEALHRDLTDFRTQHPEVTLLQYVDDLLLAAPTKKACTQGTRHLLQELGEKGYRASAKKAQICQTKVTYLGYILSEGKRWLTPGRIETVARIPPPRNPREVREFLGKAGFCRLFIPGFAELAAPLYALTKPSTPFTWQTEHQLAFEALKKALLSAPALGLPDTSKPFTLFLDERQGIAKGVLTQKLGPWKRPVAYLSKKLDPVAAGWPPCLRIMAATAMLVKDSAKLTLGQPLTVITPHTLEAIVRQPPDRWITNARLTHYQALLLDTDRVQFGPPVTLNPATLLPVPENQPSPHDCRQVLAETHGTREDLKDQELPDADHTWYTDGSSYLDSGTRRAGAAVVDGHNTIWAQSLPPGTSAQKAELIALTKALELSKGKKANIYTDSRYAFATAHTHGSIYERRGWLTSEGKEIKNKAEIIALLKALFLPQEVAIIHCPGHQKGQDPVAVGNRQADRVARQAAMAEVLTLATEPDNTSHITAGKRTADGSEFEKRTADGSEFESPKKKAKVE

SEQ ID NO: 2024 - protein, 2097 aa, synthetic construct
MPAAKRVKLDGGDKKYSIGLDIGTNSVGWAVITDEYKVPSKKFKVLGNTDRHSIKKNLIGALLFDSGETAEATRLKRTARRRYTRRKNRICYLQEIFSNEMAKVDDSFFHRLEESFLVEEDKKHERHPIFGNIVDEVAYHEKYPTIYHLRKKLVDSTDKADLRLIYLALAHMIKFRGHFLIEGDLNPDNSDVDKLFIQLVQTYNQLFEENPINASGVDAKAILSARLSKSRRLENLIAQLPGEKKNGLFGNLIALSLGLTPNFKSNFDLAEDAKLQLSKDTYDDDLDNLLAQIGDQYADLFLAAKNLSDAILLSDILRVNTEITKAPLSASMIKRYDEHHQDLTLLKALVRQQLPEKYKEIFFDQSKNGYAGYIDGGASQEEFYKFIKPILEKMDGTEELLVKLNREDLLRKQRTFDNGSIPHQIHLGELHAILRRQEDFYPFLKDNREKIEKILTFRIPYYVGPLARGNSRFAWMTRKSEETITPWNFEEVVDKGASAQSFIERMTNFDKNLPNEKVLPKHSLLYEYFTVYNELTKVKYVTEGMRKPAFLSGEQKKAIVDLLFKTNRKVTVKQLKEDYFKKIECFDSVEISGVEDRFNASLGTYHDLLKIIKDKDFLDNEENEDILEDIVLTLTLFEDREMIEERLKTYAHLFDDKVMKQLKRRRYTGWGRLSRKLINGIRDKQSGKTILDFLKSDGFANRNFMQLIHDDSLTFKEDIQKAQVSGQGDSLHEHIANLAGSPAIKKGILQTVKVVDELVKVMGRHKPENIVIEMARENQTTQKGQKNSRERMKRIEEGIKELGSQILKEHPVENTQLQNEKLYLYYLQNGRDMYVDQELDINRLSDYDVDHIVPQSFLKDDSIDNKVLTRSDKARGKSDNVPSEEVVKKMKNYWRQLLNAKLITQRKFDNLTKAERGGLSELDKAGFIKRQLVETRQITKHVAQILDSRMNTKYDENDKLIREVKVITLKSKLVSDFRKDFQFYKVREINNYHHAHDAYLNAVVGTALIKKYPKLESEFVYGDYKVYDVRKMIAKSEQEIGKATAKYFFYSNIMNFFKTEITLANGEIRKRPLIETNGETGEIVWDKGRDFATVRKVLSMPQVNIVKKTEVQTGGFSKESILPKRNSDKLIARKKDWDPKKYGGFDSPTVAYSVLVVAKVEKGKSKKLKSVKELLGITIMERSSFEKNPIDFLEAKGYKEVKKDLIIKLPKYSLFELENGRKRMLASAGELQKGNELALPSKYVNFLYLASHYEKLKGSPEDNEQKQLFVEQHKHYLDEIIEQISEFSKRVILADANLDKVLSAYNKHRDKPIREQAENIIHLFTLTNLGAPAAFKYFDTTIDRKRYTSTKEVLDATLIHQSITGLYETRIDLSQLGGDGGGGSGGSGGTVSLQDEHRLFDIPVTTSLPDVWLQDFPQAWAETGGLGRAKCQAPIIIDLKPTAVPVSIKQYPMSLEAHMGIRQHIIKFLELGVLRPCRSPWNTPLLPVKKPGTQDYRPVQDLREINKRTVDIHPTVPNPYNLLSTLKPDYSWYTVLDLKDAFFCLPLAPQSQELFAFEWKDPERGISGQLTWTRLPQGFKNSPTLFNEALHRDLTDFRTQHPEVTLLQYVDDLLLAAPTKKACTQGTRHLLQELGEKGYRASAKKAQICQTKVTYLGYILSEGKRWLTPGRIETVARIPPPRNPREVREFLGKAGFCRLFIPGFAELAAPLYALTKPSTPFTWQTEHQLAFEALKKALLSAPALGLPDTSKPFTLFLDERQGIAKGVLTQKLGPWKRPVAYLSKKLDPVAAGWPPCLRIMAATAMLVKDSAKLTLGQPLTVITPHTLEAIVRQPPDRWITNARLTHYQALLLDTDRVQFGPPVTLNPATLLPVPENQPSPHDCRQVLAETHGTREDLKDQELPDADHTWYTDGSSYLDSGTRRAGAAVVDGHNTIWAQSLPPGTSAQKAELIALTKALELSKGKKANIYTDSRYAFATAHTHGSIYERRGWLTSEGKEIKNKAEIIALLKALFLPQEVAIIHCPGHQKGQDPVAVGNRQADRVARQAAMAEVLTLATEPDNTSHITAGKRTADGSEFEKRTADGSEFESPKKKAKVE

SEQ ID NO: 2025 - protein, 2102 aa, synthetic construct
MPAAKRVKLDGGDKKYSIGLDIGTNSVGWAVITDEYKVPSKKFKVLGNTDRHSIKKNLIGALLFDSGETAEATRLKRTARRRYTRRKNRICYLQEIFSNEMAKVDDSFFHRLEESFLVEEDKKHERHPIFGNIVDEVAYHEKYPTIYHLRKKLVDSTDKADLRLIYLALAHMIKFRGHFLIEGDLNPDNSDVDKLFIQLVQTYNQLFEENPINASGVDAKAILSARLSKSRRLENLIAQLPGEKKNGLFGNLIALSLGLTPNFKSNFDLAEDAKLQLSKDTYDDDLDNLLAQIGDQYADLFLAAKNLSDAILLSDILRVNTEITKAPLSASMIKRYDEHHQDLTLLKALVRQQLPEKYKEIFFDQSKNGYAGYIDGGASQEEFYKFIKPILEKMDGTEELLVKLNREDLLRKQRTFDNGSIPHQIHLGELHAILRRQEDFYPFLKDNREKIEKILTFRIPYYVGPLARGNSRFAWMTRKSEETITPWNFEEVVDKGASAQSFIERMTNFDKNLPNEKVLPKHSLLYEYFTVYNELTKVKYVTEGMRKPAFLSGEQKKAIVDLLFKTNRKVTVKQLKEDYFKKIECFDSVEISGVEDRFNASLGTYHDLLKIIKDKDFLDNEENEDILEDIVLTLTLFEDREMIEERLKTYAHLFDDKVMKQLKRRRYTGWGRLSRKLINGIRDKQSGKTILDFLKSDGFANRNFMQLIHDDSLTFKEDIQKAQVSGQGDSLHEHIANLAGSPAIKKGILQTVKVVDELVKVMGRHKPENIVIEMARENQTTQKGQKNSRERMKRIEEGIKELGSQILKEHPVENTQLQNEKLYLYYLQNGRDMYVDQELDINRLSDYDVDHIVPQSFLKDDSIDNKVLTRSDKARGKSDNVPSEEVVKKMKNYWRQLLNAKLITQRKFDNLTKAERGGLSELDKAGFIKRQLVETRQITKHVAQILDSRMNTKYDENDKLIREVKVITLKSKLVSDFRKDFQFYKVREINNYHHAHDAYLNAVVGTALIKKYPKLESEFVYGDYKVYDVRKMIAKSEQEIGKATAKYFFYSNIMNFFKTEITLANGEIRKRPLIETNGETGEIVWDKGRDFATVRKVLSMPQVNIVKKTEVQTGGFSKESILPKRNSDKLIARKKDWDPKKYGGFDSPTVAYSVLVVAKVEKGKSKKLKSVKELLGITIMERSSFEKNPIDFLEAKGYKEVKKDLIIKLPKYSLFELENGRKRMLASAGELQKGNELALPSKYVNFLYLASHYEKLKGSPEDNEQKQLFVEQHKHYLDEIIEQISEFSKRVILADANLDKVLSAYNKHRDKPIREQAENIIHLFTLTNLGAPAAFKYFDTTIDRKRYTSTKEVLDATLIHQSITGLYETRIDLSQLGGDGGGSSGGSEAAAKGGTVSLQDEHRLFDIPVTTSLPDVWLQDFPQAWAETGGLGRAKCQAPIIIDLKPTAVPVSIKQYPMSLEAHMGIRQHIIKFLELGVLRPCRSPWNTPLLPVKKPGTQDYRPVQDLREINKRTVDIHPTVPNPYNLLSTLKPDYSWYTVLDLKDAFFCLPLAPQSQELFAFEWKDPERGISGQLTWTRLPQGFKNSPTLFNEALHRDLTDFRTQHPEVTLLQYVDDLLLAAPTKKACTQGTRHLLQELGEKGYRASAKKAQICQTKVTYLGYILSEGKRWLTPGRIETVARIPPPRNPREVREFLGKAGFCRLFIPGFAELAAPLYALTKPSTPFTWQTEHQLAFEALKKALLSAPALGLPDTSKPFTLFLDERQGIAKGVLTQKLGPWKRPVAYLSKKLDPVAAGWPPCLRIMAATAMLVKDSAKLTLGQPLTVITPHTLEAIVRQPPDRWITNARLTHYQALLLDTDRVQFGPPVTLNPATLLPVPENQPSPHDCRQVLAETHGTREDLKDQELPDADHTWYTDGSSYLDSGTRRAGAAVVDGHNTIWAQSLPPGTSAQKAELIALTKALELSKGKKANIYTDSRYAFATAHTHGSIYERRGWLTSEGKEIKNKAEIIALLKALFLPQEVAIIHCPGHQKGQDPVAVGNRQADRVARQAAMAEVLTLATEPDNTSHITAGKRTADGSEFEKRTADGSEFESPKKKAKVE

SEQ ID NO: 2026 - protein, 2100 aa, synthetic construct
MPAAKRVKLDGGDKKYSIGLDIGTNSVGWAVITDEYKVPSKKFKVLGNTDRHSIKKNLIGALLFDSGETAEATRLKRTARRRYTRRKNRICYLQEIFSNEMAKVDDSFFHRLEESFLVEEDKKHERHPIFGNIVDEVAYHEKYPTIYHLRKKLVDSTDKADLRLIYLALAHMIKFRGHFLIEGDLNPDNSDVDKLFIQLVQTYNQLFEENPINASGVDAKAILSARLSKSRRLENLIAQLPGEKKNGLFGNLIALSLGLTPNFKSNFDLAEDAKLQLSKDTYDDDLDNLLAQIGDQYADLFLAAKNLSDAILLSDILRVNTEITKAPLSASMIKRYDEHHQDLTLLKALVRQQLPEKYKEIFFDQSKNGYAGYIDGGASQEEFYKFIKPILEKMDGTEELLVKLNREDLLRKQRTFDNGSIPHQIHLGELHAILRRQEDFYPFLKDNREKIEKILTFRIPYYVGPLARGNSRFAWMTRKSEETITPWNFEEVVDKGASAQSFIERMTNFDKNLPNEKVLPKHSLLYEYFTVYNELTKVKYVTEGMRKPAFLSGEQKKAIVDLLFKTNRKVTVKQLKEDYFKKIECFDSVEISGVEDRFNASLGTYHDLLKIIKDKDFLDNEENEDILEDIVLTLTLFEDREMIEERLKTYAHLFDDKVMKQLKRRRYTGWGRLSRKLINGIRDKQSGKTILDFLKSDGFANRNFMQLIHDDSLTFKEDIQKAQVSGQGDSLHEHIANLAGSPAIKKGILQTVKVVDELVKVMGRHKPENIVIEMARENQTTQKGQKNSRERMKRIEEGIKELGSQILKEHPVENTQLQNEKLYLYYLQNGRDMYVDQELDINRLSDYDVDHIVPQSFLKDDSIDNKVLTRSDKARGKSDNVPSEEVVKKMKNYWRQLLNAKLITQRKFDNLTKAERGGLSELDKAGFIKRQLVETRQITKHVAQILDSRMNTKYDENDKLIREVKVITLKSKLVSDFRKDFQFYKVREINNYHHAHDAYLNAVVGTALIKKYPKLESEFVYGDYKVYDVRKMIAKSEQEIGKATAKYFFYSNIMNFFKTEITLANGEIRKRPLIETNGETGEIVWDKGRDFATVRKVLSMPQVNIVKKTEVQTGGFSKESILPKRNSDKLIARKKDWDPKKYGGFDSPTVAYSVLVVAKVEKGKSKKLKSVKELLGITIMERSSFEKNPIDFLEAKGYKEVKKDLIIKLPKYSLFELENGRKRMLASAGELQKGNELALPSKYVNFLYLASHYEKLKGSPEDNEQKQLFVEQHKHYLDEIIEQISEFSKRVILADANLDKVLSAYNKHRDKPIREQAENIIHLFTLTNLGAPAAFKYFDTTIDRKRYTSTKEVLDATLIHQSITGLYETRIDLSQLGGDGGGGGGGSGSSGGTVSLQDEHRLFDIPVTTSLPDVWLQDFPQAWAETGGLGRAKCQAPIIIDLKPTAVPVSIKQYPMSLEAHMGIRQHIIKFLELGVLRPCRSPWNTPLLPVKKPGTQDYRPVQDLREINKRTVDIHPTVPNPYNLLSTLKPDYSWYTVLDLKDAFFCLPLAPQSQELFAFEWKDPERGISGQLTWTRLPQGFKNSPTLFNEALHRDLTDFRTQHPEVTLLQYVDDLLLAAPTKKACTQGTRHLLQELGEKGYRASAKKAQICQTKVTYLGYILSEGKRWLTPGRIETVARIPPPRNPREVREFLGKAGFCRLFIPGFAELAAPLYALTKPSTPFTWQTEHQLAFEALKKALLSAPALGLPDTSKPFTLFLDERQGIAKGVLTQKLGPWKRPVAYLSKKLDPVAAGWPPCLRIMAATAMLVKDSAKLTLGQPLTVITPHTLEAIVRQPPDRWITNARLTHYQALLLDTDRVQFGPPVTLNPATLLPVPENQPSPHDCRQVLAETHGTREDLKDQELPDADHTWYTDGSSYLDSGTRRAGAAVVDGHNTIWAQSLPPGTSAQKAELIALTKALELSKGKKANIYTDSRYAFATAHTHGSIYERRGWLTSEGKEIKNKAEIIALLKALFLPQEVAIIHCPGHQKGQDPVAVGNRQADRVARQAAMAEVLTLATEPDNTSHITAGKRTADGSEFEKRTADGSEFESPKKKAKVE

SEQ ID NO: 2027 - protein, 2102 aa, synthetic construct
MPAAKRVKLDGGDKKYSIGLDIGTNSVGWAVITDEYKVPSKKFKVLGNTDRHSIKKNLIGALLFDSGETAEATRLKRTARRRYTRRKNRICYLQEIFSNEMAKVDDSFFHRLEESFLVEEDKKHERHPIFGNIVDEVAYHEKYPTIYHLRKKLVDSTDKADLRLIYLALAHMIKFRGHFLIEGDLNPDNSDVDKLFIQLVQTYNQLFEENPINASGVDAKAILSARLSKSRRLENLIAQLPGEKKNGLFGNLIALSLGLTPNFKSNFDLAEDAKLQLSKDTYDDDLDNLLAQIGDQYADLFLAAKNLSDAILLSDILRVNTEITKAPLSASMIKRYDEHHQDLTLLKALVRQQLPEKYKEIFFDQSKNGYAGYIDGGASQEEFYKFIKPILEKMDGTEELLVKLNREDLLRKQRTFDNGSIPHQIHLGELHAILRRQEDFYPFLKDNREKIEKILTFRIPYYVGPLARGNSRFAWMTRKSEETITPWNFEEVVDKGASAQSFIERMTNFDKNLPNEKVLPKHSLLYEYFTVYNELTKVKYVTEGMRKPAFLSGEQKKAIVDLLFKTNRKVTVKQLKEDYFKKIECFDSVEISGVEDRFNASLGTYHDLLKIIKDKDFLDNEENEDILEDIVLTLTLFEDREMIEERLKTYAHLFDDKVMKQLKRRRYTGWGRLSRKLINGIRDKQSGKTILDFLKSDGFANRNFMQLIHDDSLTFKEDIQKAQVSGQGDSLHEHIANLAGSPAIKKGILQTVKVVDELVKVMGRHKPENIVIEMARENQTTQKGQKNSRERMKRIEEGIKELGSQILKEHPVENTQLQNEKLYLYYLQNGRDMYVDQELDINRLSDYDVDHIVPQSFLKDDSIDNKVLTRSDKARGKSDNVPSEEVVKKMKNYWRQLLNAKLITQRKFDNLTKAERGGLSELDKAGFIKRQLVETRQITKHVAQILDSRMNTKYDENDKLIREVKVITLKSKLVSDFRKDFQFYKVREINNYHHAHDAYLNAVVGTALIKKYPKLESEFVYGDYKVYDVRKMIAKSEQEIGKATAKYFFYSNIMNFFKTEITLANGEIRKRPLIETNGETGEIVWDKGRDFATVRKVLSMPQVNIVKKTEVQTGGFSKESILPKRNSDKLIARKKDWDPKKYGGFDSPTVAYSVLVVAKVEKGKSKKLKSVKELLGITIMERSSFEKNPIDFLEAKGYKEVKKDLIIKLPKYSLFELENGRKRMLASAGELQKGNELALPSKYVNFLYLASHYEKLKGSPEDNEQKQLFVEQHKHYLDEIIEQISEFSKRVILADANLDKVLSAYNKHRDKPIREQAENIIHLFTLTNLGAPAAFKYFDTTIDRKRYTSTKEVLDATLIHQSITGLYETRIDLSQLGGDGGEAAAKGGSPAPGGTVSLQDEHRLFDIPVTTSLPDVWLQDFPQAWAETGGLGRAKCQAPIIIDLKPTAVPVSIKQYPMSLEAHMGIRQHIIKFLELGVLRPCRSPWNTPLLPVKKPGTQDYRPVQDLREINKRTVDIHPTVPNPYNLLSTLKPDYSWYTVLDLKDAFFCLPLAPQSQELFAFEWKDPERGISGQLTWTRLPQGFKNSPTLFNEALHRDLTDFRTQHPEVTLLQYVDDLLLAAPTKKACTQGTRHLLQELGEKGYRASAKKAQICQTKVTYLGYILSEGKRWLTPGRIETVARIPPPRNPREVREFLGKAGFCRLFIPGFAELAAPLYALTKPSTPFTWQTEHQLAFEALKKALLSAPALGLPDTSKPFTLFLDERQGIAKGVLTQKLGPWKRPVAYLSKKLDPVAAGWPPCLRIMAATAMLVKDSAKLTLGQPLTVITPHTLEAIVRQPPDRWITNARLTHYQALLLDTDRVQFGPPVTLNPATLLPVPENQPSPHDCRQVLAETHGTREDLKDQELPDADHTWYTDGSSYLDSGTRRAGAAVVDGHNTIWAQSLPPGTSAQKAELIALTKALELSKGKKANIYTDSRYAFATAHTHGSIYERRGWLTSEGKEIKNKAEIIALLKALFLPQEVAIIHCPGHQKGQDPVAVGNRQADRVARQAAMAEVLTLATEPDNTSHITAGKRTADGSEFEKRTADGSEFESPKKKAKVE

SEQ ID NO: 2028 - protein, 2102 aa, synthetic construct
MPAAKRVKLDGGDKKYSIGLDIGTNSVGWAVITDEYKVPSKKFKVLGNTDRHSIKKNLIGALLFDSGETAEATRLKRTARRRYTRRKNRICYLQEIFSNEMAKVDDSFFHRLEESFLVEEDKKHERHPIFGNIVDEVAYHEKYPTIYHLRKKLVDSTDKADLRLIYLALAHMIKFRGHFLIEGDLNPDNSDVDKLFIQLVQTYNQLFEENPINASGVDAKAILSARLSKSRRLENLIAQLPGEKKNGLFGNLIALSLGLTPNFKSNFDLAEDAKLQLSKDTYDDDLDNLLAQIGDQYADLFLAAKNLSDAILLSDILRVNTEITKAPLSASMIKRYDEHHQDLTLLKALVRQQLPEKYKEIFFDQSKNGYAGYIDGGASQEEFYKFIKPILEKMDGTEELLVKLNREDLLRKQRTFDNGSIPHQIHLGELHAILRRQEDFYPFLKDNREKIEKILTFRIPYYVGPLARGNSRFAWMTRKSEETITPWNFEEVVDKGASAQSFIERMTNFDKNLPNEKVLPKHSLLYEYFTVYNELTKVKYVTEGMRKPAFLSGEQKKAIVDLLFKTNRKVTVKQLKEDYFKKIECFDSVEISGVEDRFNASLGTYHDLLKIIKDKDFLDNEENEDILEDIVLTLTLFEDREMIEERLKTYAHLFDDKVMKQLKRRRYTGWGRLSRKLINGIRDKQSGKTILDFLKSDGFANRNFMQLIHDDSLTFKEDIQKAQVSGQGDSLHEHIANLAGSPAIKKGILQTVKVVDELVKVMGRHKPENIVIEMARENQTTQKGQKNSRERMKRIEEGIKELGSQILKEHPVENTQLQNEKLYLYYLQNGRDMYVDQELDINRLSDYDVDHIVPQSFLKDDSIDNKVLTRSDKARGKSDNVPSEEVVKKMKNYWRQLLNAKLITQRKFDNLTKAERGGLSELDKAGFIKRQLVETRQITKHVAQILDSRMNTKYDENDKLIREVKVITLKSKLVSDFRKDFQFYKVREINNYHHAHDAYLNAVVGTALIKKYPKLESEFVYGDYKVYDVRKMIAKSEQEIGKATAKYFFYSNIMNFFKTEITLANGEIRKRPLIETNGETGEIVWDKGRDFATVRKVLSMPQVNIVKKTEVQTGGFSKESILPKRNSDKLIARKKDWDPKKYGGFDSPTVAYSVLVVAKVEKGKSKKLKSVKELLGITIMERSSFEKNPIDFLEAKGYKEVKKDLIIKLPKYSLFELENGRKRMLASAGELQKGNELALPSKYVNFLYLASHYEKLKGSPEDNEQKQLFVEQHKHYLDEIIEQISEFSKRVILADANLDKVLSAYNKHRDKPIREQAENIIHLFTLTNLGAPAAFKYFDTTIDRKRYTSTKEVLDATLIHQSITGLYETRIDLSQLGGDGGEAAAKPAPGGSGGTVSLQDEHRLFDIPVTTSLPDVWLQDFPQAWAETGGLGRAKCQAPIIIDLKPTAVPVSIKQYPMSLEAHMGIRQHIIKFLELGVLRPCRSPWNTPLLPVKKPGTQDYRPVQDLREINKRTVDIHPTVPNPYNLLSTLKPDYSWYTVLDLKDAFFCLPLAPQSQELFAFEWKDPERGISGQLTWTRLPQGFKNSPTLFNEALHRDLTDFRTQHPEVTLLQYVDDLLLAAPTKKACTQGTRHLLQELGEKGYRASAKKAQICQTKVTYLGYILSEGKRWLTPGRIETVARIPPPRNPREVREFLGKAGFCRLFIPGFAELAAPLYALTKPSTPFTWQTEHQLAFEALKKALLSAPALGLPDTSKPFTLFLDERQGIAKGVLTQKLGPWKRPVAYLSKKLDPVAAGWPPCLRIMAATAMLVKDSAKLTLGQPLTVITPHTLEAIVRQPPDRWITNARLTHYQALLLDTDRVQFGPPVTLNPATLLPVPENQPSPHDCRQVLAETHGTREDLKDQELPDADHTWYTDGSSYLDSGTRRAGAAVVDGHNTIWAQSLPPGTSAQKAELIALTKALELSKGKKANIYTDSRYAFATAHTHGSIYERRGWLTSEGKEIKNKAEIIALLKALFLPQEVAIIHCPGHQKGQDPVAVGNRQADRVARQAAMAEVLTLATEPDNTSHITAGKRTADGSEFEKRTADGSEFESPKKKAKVE

SEQ ID NO: 2029 - protein, 2097 aa, synthetic construct
MPAAKRVKLDGGDKKYSIGLDIGTNSVGWAVITDEYKVPSKKFKVLGNTDRHSIKKNLIGALLFDSGETAEATRLKRTARRRYTRRKNRICYLQEIFSNEMAKVDDSFFHRLEESFLVEEDKKHERHPIFGNIVDEVAYHEKYPTIYHLRKKLVDSTDKADLRLIYLALAHMIKFRGHFLIEGDLNPDNSDVDKLFIQLVQTYNQLFEENPINASGVDAKAILSARLSKSRRLENLIAQLPGEKKNGLFGNLIALSLGLTPNFKSNFDLAEDAKLQLSKDTYDDDLDNLLAQIGDQYADLFLAAKNLSDAILLSDILRVNTEITKAPLSASMIKRYDEHHQDLTLLKALVRQQLPEKYKEIFFDQSKNGYAGYIDGGASQEEFYKFIKPILEKMDGTEELLVKLNREDLLRKQRTFDNGSIPHQIHLGELHAILRRQEDFYPFLKDNREKIEKILTFRIPYYVGPLARGNSRFAWMTRKSEETITPWNFEEVVDKGASAQSFIERMTNFDKNLPNEKVLPKHSLLYEYFTVYNELTKVKYVTEGMRKPAFLSGEQKKAIVDLLFKTNRKVTVKQLKEDYFKKIECFDSVEISGVEDRFNASLGTYHDLLKIIKDKDFLDNEENEDILEDIVLTLTLFEDREMIEERLKTYAHLFDDKVMKQLKRRRYTGWGRLSRKLINGIRDKQSGKTILDFLKSDGFANRNFMQLIHDDSLTFKEDIQKAQVSGQGDSLHEHIANLAGSPAIKKGILQTVKVVDELVKVMGRHKPENIVIEMARENQTTQKGQKNSRERMKRIEEGIKELGSQILKEHPVENTQLQNEKLYLYYLQNGRDMYVDQELDINRLSDYDVDHIVPQSFLKDDSIDNKVLTRSDKARGKSDNVPSEEVVKKMKNYWRQLLNAKLITQRKFDNLTKAERGGLSELDKAGFIKRQLVETRQITKHVAQILDSRMNTKYDENDKLIREVKVITLKSKLVSDFRKDFQFYKVREINNYHHAHDAYLNAVVGTALIKKYPKLESEFVYGDYKVYDVRKMIAKSEQEIGKATAKYFFYSNIMNFFKTEITLANGEIRKRPLIETNGETGEIVWDKGRDFATVRKVLSMPQVNIVKKTEVQTGGFSKESILPKRNSDKLIARKKDWDPKKYGGFDSPTVAYSVLVVAKVEKGKSKKLKSVKELLGITIMERSSFEKNPIDFLEAKGYKEVKKDLIIKLPKYSLFELENGRKRMLASAGELQKGNELALPSKYVNFLYLASHYEKLKGSPEDNEQKQLFVEQHKHYLDEIIEQISEFSKRVILADANLDKVLSAYNKHRDKPIREQAENIIHLFTLTNLGAPAAFKYFDTTIDRKRYTSTKEVLDATLIHQSITGLYETRIDLSQLGGDGGGGGGGSGGTVSLQDEHRLFDIPVTTSLPDVWLQDFPQAWAETGGLGRAKCQAPIIIDLKPTAVPVSIKQYPMSLEAHMGIRQHIIKFLELGVLRPCRSPWNTPLLPVKKPGTQDYRPVQDLREINKRTVDIHPTVPNPYNLLSTLKPDYSWYTVLDLKDAFFCLPLAPQSQELFAFEWKDPERGISGQLTWTRLPQGFKNSPTLFNEALHRDLTDFRTQHPEVTLLQYVDDLLLAAPTKKACTQGTRHLLQELGEKGYRASAKKAQICQTKVTYLGYILSEGKRWLTPGRIETVARIPPPRNPREVREFLGKAGFCRLFIPGFAELAAPLYALTKPSTPFTWQTEHQLAFEALKKALLSAPALGLPDTSKPFTLFLDERQGIAKGVLTQKLGPWKRPVAYLSKKLDPVAAGWPPCLRIMAATAMLVKDSAKLTLGQPLTVITPHTLEAIVRQPPDRWITNARLTHYQALLLDTDRVQFGPPVTLNPATLLPVPENQPSPHDCRQVLAETHGTREDLKDQELPDADHTWYTDGSSYLDSGTRRAGAAVVDGHNTIWAQSLPPGTSAQKAELIALTKALELSKGKKANIYTDSRYAFATAHTHGSIYERRGWLTSEGKEIKNKAEIIALLKALFLPQEVAIIHCPGHQKGQDPVAVGNRQADRVARQAAMAEVLTLATEPDNTSHITAGKRTADGSEFEKRTADGSEFESPKKKAKVE

SEQ ID NO: 2030 - protein, 2100 aa, synthetic construct
MPAAKRVKLDGGDKKYSIGLDIGTNSVGWAVITDEYKVPSKKFKVLGNTDRHSIKKNLIGALLFDSGETAEATRLKRTARRRYTRRKNRICYLQEIFSNEMAKVDDSFFHRLEESFLVEEDKKHERHPIFGNIVDEVAYHEKYPTIYHLRKKLVDSTDKADLRLIYLALAHMIKFRGHFLIEGDLNPDNSDVDKLFIQLVQTYNQLFEENPINASGVDAKAILSARLSKSRRLENLIAQLPGEKKNGLFGNLIALSLGLTPNFKSNFDLAEDAKLQLSKDTYDDDLDNLLAQIGDQYADLFLAAKNLSDAILLSDILRVNTEITKAPLSASMIKRYDEHHQDLTLLKALVRQQLPEKYKEIFFDQSKNGYAGYIDGGASQEEFYKFIKPILEKMDGTEELLVKLNREDLLRKQRTFDNGSIPHQIHLGELHAILRRQEDFYPFLKDNREKIEKILTFRIPYYVGPLARGNSRFAWMTRKSEETITPWNFEEVVDKGASAQSFIERMTNFDKNLPNEKVLPKHSLLYEYFTVYNELTKVKYVTEGMRKPAFLSGEQKKAIVDLLFKTNRKVTVKQLKEDYFKKIECFDSVEISGVEDRFNASLGTYHDLLKIIKDKDFLDNEENEDILEDIVLTLTLFEDREMIEERLKTYAHLFDDKVMKQLKRRRYTGWGRLSRKLINGIRDKQSGKTILDFLKSDGFANRNFMQLIHDDSLTFKEDIQKAQVSGQGDSLHEHIANLAGSPAIKKGILQTVKVVDELVKVMGRHKPENIVIEMARENQTTQKGQKNSRERMKRIEEGIKELGSQILKEHPVENTQLQNEKLYLYYLQNGRDMYVDQELDINRLSDYDVDHIVPQSFLKDDSIDNKVLTRSDKARGKSDNVPSEEVVKKMKNYWRQLLNAKLITQRKFDNLTKAERGGLSELDKAGFIKRQLVETRQITKHVAQILDSRMNTKYDENDKLIREVKVITLKSKLVSDFRKDFQFYKVREINNYHHAHDAYLNAVVGTALIKKYPKLESEFVYGDYKVYDVRKMIAKSEQEIGKATAKYFFYSNIMNFFKTEITLANGEIRKRPLIETNGETGEIVWDKGRDFATVRKVLSMPQVNIVKKTEVQTGGFSKESILPKRNSDKLIARKKDWDPKKYGGFDSPTVAYSVLVVAKVEKGKSKKLKSVKELLGITIMERSSFEKNPIDFLEAKGYKEVKKDLIIKLPKYSLFELENGRKRMLASAGELQKGNELALPSKYVNFLYLASHYEKLKGSPEDNEQKQLFVEQHKHYLDEIIEQISEFSKRVILADANLDKVLSAYNKHRDKPIREQAENIIHLFTLTNLGAPAAFKYFDTTIDRKRYTSTKEVLDATLIHQSITGLYETRIDLSQLGGDGGGGSGGSGGSGGTVSLQDEHRLFDIPVTTSLPDVWLQDFPQAWAETGGLGRAKCQAPIIIDLKPTAVPVSIKQYPMSLEAHMGIRQHIIKFLELGVLRPCRSPWNTPLLPVKKPGTQDYRPVQDLREINKRTVDIHPTVPNPYNLLSTLKPDYSWYTVLDLKDAFFCLPLAPQSQELFAFEWKDPERGISGQLTWTRLPQGFKNSPTLFNEALHRDLTDFRTQHPEVTLLQYVDDLLLAAPTKKACTQGTRHLLQELGEKGYRASAKKAQICQTKVTYLGYILSEGKRWLTPGRIETVARIPPPRNPREVREFLGKAGFCRLFIPGFAELAAPLYALTKPSTPFTWQTEHQLAFEALKKALLSAPALGLPDTSKPFTLFLDERQGIAKGVLTQKLGPWKRPVAYLSKKLDPVAAGWPPCLRIMAATAMLVKDSAKLTLGQPLTVITPHTLEAIVRQPPDRWITNARLTHYQALLLDTDRVQFGPPVTLNPATLLPVPENQPSPHDCRQVLAETHGTREDLKDQELPDADHTWYTDGSSYLDSGTRRAGAAVVDGHNTIWAQSLPPGTSAQKAELIALTKALELSKGKKANIYTDSRYAFATAHTHGSIYERRGWLTSEGKEIKNKAEIIALLKALFLPQEVAIIHCPGHQKGQDPVAVGNRQADRVARQAAMAEVLTLATEPDNTSHITAGKRTADGSEFEKRTADGSEFESPKKKAKVE

SEQ ID NO: 2031 - protein, 2097 aa, synthetic construct
MPAAKRVKLDGGDKKYSIGLDIGTNSVGWAVITDEYKVPSKKFKVLGNTDRHSIKKNLIGALLFDSGETAEATRLKRTARRRYTRRKNRICYLQEIFSNEMAKVDDSFFHRLEESFLVEEDKKHERHPIFGNIVDEVAYHEKYPTIYHLRKKLVDSTDKADLRLIYLALAHMIKFRGHFLIEGDLNPDNSDVDKLFIQLVQTYNQLFEENPINASGVDAKAILSARLSKSRRLENLIAQLPGEKKNGLFGNLIALSLGLTPNFKSNFDLAEDAKLQLSKDTYDDDLDNLLAQIGDQYADLFLAAKNLSDAILLSDILRVNTEITKAPLSASMIKRYDEHHQDLTLLKALVRQQLPEKYKEIFFDQSKNGYAGYIDGGASQEEFYKFIKPILEKMDGTEELLVKLNREDLLRKQRTFDNGSIPHQIHLGELHAILRRQEDFYPFLKDNREKIEKILTFRIPYYVGPLARGNSRFAWMTRKSEETITPWNFEEVVDKGASAQSFIERMTNFDKNLPNEKVLPKHSLLYEYFTVYNELTKVKYVTEGMRKPAFLSGEQKKAIVDLLFKTNRKVTVKQLKEDYFKKIECFDSVEISGVEDRFNASLGTYHDLLKIIKDKDFLDNEENEDILEDIVLTLTLFEDREMIEERLKTYAHLFDDKVMKQLKRRRYTGWGRLSRKLINGIRDKQSGKTILDFLKSDGFANRNFMQLIHDDSLTFKEDIQKAQVSGQGDSLHEHIANLAGSPAIKKGILQTVKVVDELVKVMGRHKPENIVIEMARENQTTQKGQKNSRERMKRIEEGIKELGSQILKEHPVENTQLQNEKLYLYYLQNGRDMYVDQELDINRLSDYDVDHIVPQSFLKDDSIDNKVLTRSDKARGKSDNVPSEEVVKKMKNYWRQLLNAKLITQRKFDNLTKAERGGLSELDKAGFIKRQLVETRQITKHVAQILDSRMNTKYDENDKLIREVKVITLKSKLVSDFRKDFQFYKVREINNYHHAHDAYLNAVVGTALIKKYPKLESEFVYGDYKVYDVRKMIAKSEQEIGKATAKYFFYSNIMNFFKTEITLANGEIRKRPLIETNGETGEIVWDKGRDFATVRKVLSMPQVNIVKKTEVQTGGFSKESILPKRNSDKLIARKKDWDPKKYGGFDSPTVAYSVLVVAKVEKGKSKKLKSVKELLGITIMERSSFEKNPIDFLEAKGYKEVKKDLIIKLPKYSLFELENGRKRMLASAGELQKGNELALPSKYVNFLYLASHYEKLKGSPEDNEQKQLFVEQHKHYLDEIIEQISEFSKRVILADANLDKVLSAYNKHRDKPIREQAENIIHLFTLTNLGAPAAFKYFDTTIDRKRYTSTKEVLDATLIHQSITGLYETRIDLSQLGGDGGGGSGSSGGTVSLQDEHRLFDIPVTTSLPDVWLQDFPQAWAETGGLGRAKCQAPIIIDLKPTAVPVSIKQYPMSLEAHMGIRQHIIKFLELGVLRPCRSPWNTPLLPVKKPGTQDYRPVQDLREINKRTVDIHPTVPNPYNLLSTLKPDYSWYTVLDLKDAFFCLPLAPQSQELFAFEWKDPERGISGQLTWTRLPQGFKNSPTLFNEALHRDLTDFRTQHPEVTLLQYVDDLLLAAPTKKACTQGTRHLLQELGEKGYRASAKKAQICQTKVTYLGYILSEGKRWLTPGRIETVARIPPPRNPREVREFLGKAGFCRLFIPGFAELAAPLYALTKPSTPFTWQTEHQLAFEALKKALLSAPALGLPDTSKPFTLFLDERQGIAKGVLTQKLGPWKRPVAYLSKKLDPVAAGWPPCLRIMAATAMLVKDSAKLTLGQPLTVITPHTLEAIVRQPPDRWITNARLTHYQALLLDTDRVQFGPPVTLNPATLLPVPENQPSPHDCRQVLAETHGTREDLKDQELPDADHTWYTDGSSYLDSGTRRAGAAVVDGHNTIWAQSLPPGTSAQKAELIALTKALELSKGKKANIYTDSRYAFATAHTHGSIYERRGWLTSEGKEIKNKAEIIALLKALFLPQEVAIIHCPGHQKGQDPVAVGNRQADRVARQAAMAEVLTLATEPDNTSHITAGKRTADGSEFEKRTADGSEFESPKKKAKVE

SEQ ID NO: 2032 - protein, 2097 aa, synthetic construct
MPAAKRVKLDGGDKKYSIGLDIGTNSVGWAVITDEYKVPSKKFKVLGNTDRHSIKKNLIGALLFDSGETAEATRLKRTARRRYTRRKNRICYLQEIFSNEMAKVDDSFFHRLEESFLVEEDKKHERHPIFGNIVDEVAYHEKYPTIYHLRKKLVDSTDKADLRLIYLALAHMIKFRGHFLIEGDLNPDNSDVDKLFIQLVQTYNQLFEENPINASGVDAKAILSARLSKSRRLENLIAQLPGEKKNGLFGNLIALSLGLTPNFKSNFDLAEDAKLQLSKDTYDDDLDNLLAQIGDQYADLFLAAKNLSDAILLSDILRVNTEITKAPLSASMIKRYDEHHQDLTLLKALVRQQLPEKYKEIFFDQSKNGYAGYIDGGASQEEFYKFIKPILEKMDGTEELLVKLNREDLLRKQRTFDNGSIPHQIHLGELHAILRRQEDFYPFLKDNREKIEKILTFRIPYYVGPLARGNSRFAWMTRKSEETITPWNFEEVVDKGASAQSFIERMTNFDKNLPNEKVLPKHSLLYEYFTVYNELTKVKYVTEGMRKPAFLSGEQKKAIVDLLFKTNRKVTVKQLKEDYFKKIECFDSVEISGVEDRFNASLGTYHDLLKIIKDKDFLDNEENEDILEDIVLTLTLFEDREMIEERLKTYAHLFDDKVMKQLKRRRYTGWGRLSRKLINGIRDKQSGKTILDFLKSDGFANRNFMQLIHDDSLTFKEDIQKAQVSGQGDSLHEHIANLAGSPAIKKGILQTVKVVDELVKVMGRHKPENIVIEMARENQTTQKGQKNSRERMKRIEEGIKELGSQILKEHPVENTQLQNEKLYLYYLQNGRDMYVDQELDINRLSDYDVDHIVPQSFLKDDSIDNKVLTRSDKARGKSDNVPSEEVVKKMKNYWRQLLNAKLITQRKFDNLTKAERGGLSELDKAGFIKRQLVETRQITKHVAQILDSRMNTKYDENDKLIREVKVITLKSKLVSDFRKDFQFYKVREINNYHHAHDAYLNAVVGTALIKKYPKLESEFVYGDYKVYDVRKMIAKSEQEIGKATAKYFFYSNIMNFFKTEITLANGEIRKRPLIETNGETGEIVWDKGRDFATVRKVLSMPQVNIVKKTEVQTGGFSKESILPKRNSDKLIARKKDWDPKKYGGFDSPTVAYSVLVVAKVEKGKSKKLKSVKELLGITIMERSSFEKNPIDFLEAKGYKEVKKDLIIKLPKYSLFELENGRKRMLASAGELQKGNELALPSKYVNFLYLASHYEKLKGSPEDNEQKQLFVEQHKHYLDEIIEQISEFSKRVILADANLDKVLSAYNKHRDKPIREQAENIIHLFTLTNLGAPAAFKYFDTTIDRKRYTSTKEVLDATLIHQSITGLYETRIDLSQLGGDGGPAPGGSGGTVSLQDEHRLFDIPVTTSLPDVWLQDFPQAWAETGGLGRAKCQAPIIIDLKPTAVPVSIKQYPMSLEAHMGIRQHIIKFLELGVLRPCRSPWNTPLLPVKKPGTQDYRPVQDLREINKRTVDIHPTVPNPYNLLSTLKPDYSWYTVLDLKDAFFCLPLAPQSQELFAFEWKDPERGISGQLTWTRLPQGFKNSPTLFNEALHRDLTDFRTQHPEVTLLQYVDDLLLAAPTKKACTQGTRHLLQELGEKGYRASAKKAQICQTKVTYLGYILSEGKRWLTPGRIETVARIPPPRNPREVREFLGKAGFCRLFIPGFAELAAPLYALTKPSTPFTWQTEHQLAFEALKKALLSAPALGLPDTSKPFTLFLDERQGIAKGVLTQKLGPWKRPVAYLSKKLDPVAAGWPPCLRIMAATAMLVKDSAKLTLGQPLTVITPHTLEAIVRQPPDRWITNARLTHYQALLLDTDRVQFGPPVTLNPATLLPVPENQPSPHDCRQVLAETHGTREDLKDQELPDADHTWYTDGSSYLDSGTRRAGAAVVDGHNTIWAQSLPPGTSAQKAELIALTKALELSKGKKANIYTDSRYAFATAHTHGSIYERRGWLTSEGKEIKNKAEIIALLKALFLPQEVAIIHCPGHQKGQDPVAVGNRQADRVARQAAMAEVLTLATEPDNTSHITAGKRTADGSEFEKRTADGSEFESPKKKAKVE

SEQ ID NO: 2033 - protein, 2094 aa, synthetic construct
MPAAKRVKLDGGDKKYSIGLDIGTNSVGWAVITDEYKVPSKKFKVLGNTDRHSIKKNLIGALLFDSGETAEATRLKRTARRRYTRRKNRICYLQEIFSNEMAKVDDSFFHRLEESFLVEEDKKHERHPIFGNIVDEVAYHEKYPTIYHLRKKLVDSTDKADLRLIYLALAHMIKFRGHFLIEGDLNPDNSDVDKLFIQLVQTYNQLFEENPINASGVDAKAILSARLSKSRRLENLIAQLPGEKKNGLFGNLIALSLGLTPNFKSNFDLAEDAKLQLSKDTYDDDLDNLLAQIGDQYADLFLAAKNLSDAILLSDILRVNTEITKAPLSASMIKRYDEHHQDLTLLKALVRQQLPEKYKEIFFDQSKNGYAGYIDGGASQEEFYKFIKPILEKMDGTEELLVKLNREDLLRKQRTFDNGSIPHQIHLGELHAILRRQEDFYPFLKDNREKIEKILTFRIPYYVGPLARGNSRFAWMTRKSEETITPWNFEEVVDKGASAQSFIERMTNFDKNLPNEKVLPKHSLLYEYFTVYNELTKVKYVTEGMRKPAFLSGEQKKAIVDLLFKTNRKVTVKQLKEDYFKKIECFDSVEISGVEDRFNASLGTYHDLLKIIKDKDFLDNEENEDILEDIVLTLTLFEDREMIEERLKTYAHLFDDKVMKQLKRRRYTGWGRLSRKLINGIRDKQSGKTILDFLKSDGFANRNFMQLIHDDSLTFKEDIQKAQVSGQGDSLHEHIANLAGSPAIKKGILQTVKVVDELVKVMGRHKPENIVIEMARENQTTQKGQKNSRERMKRIEEGIKELGSQILKEHPVENTQLQNEKLYLYYLQNGRDMYVDQELDINRLSDYDVDHIVPQSFLKDDSIDNKVLTRSDKARGKSDNVPSEEVVKKMKNYWRQLLNAKLITQRKFDNLTKAERGGLSELDKAGFIKRQLVETRQITKHVAQILDSRMNTKYDENDKLIREVKVITLKSKLVSDFRKDFQFYKVREINNYHHAHDAYLNAVVGTALIKKYPKLESEFVYGDYKVYDVRKMIAKSEQEIGKATAKYFFYSNIMNFFKTEITLANGEIRKRPLIETNGETGEIVWDKGRDFATVRKVLSMPQVNIVKKTEVQTGGFSKESILPKRNSDKLIARKKDWDPKKYGGFDSPTVAYSVLVVAKVEKGKSKKLKSVKELLGITIMERSSFEKNPIDFLEAKGYKEVKKDLIIKLPKYSLFELENGRKRMLASAGELQKGNELALPSKYVNFLYLASHYEKLKGSPEDNEQKQLFVEQHKHYLDEIIEQISEFSKRVILADANLDKVLSAYNKHRDKPIREQAENIIHLFTLTNLGAPAAFKYFDTTIDRKRYTSTKEVLDATLIHQSITGLYETRIDLSQLGGDGGGSSGGTVSLQDEHRLFDIPVTTSLPDVWLQDFPQAWAETGGLGRAKCQAPIIIDLKPTAVPVSIKQYPMSLEAHMGIRQHIIKFLELGVLRPCRSPWNTPLLPVKKPGTQDYRPVQDLREINKRTVDIHPTVPNPYNLLSTLKPDYSWYTVLDLKDAFFCLPLAPQSQELFAFEWKDPERGISGQLTWTRLPQGFKNSPTLFNEALHRDLTDFRTQHPEVTLLQYVDDLLLAAPTKKACTQGTRHLLQELGEKGYRASAKKAQICQTKVTYLGYILSEGKRWLTPGRIETVARIPPPRNPREVREFLGKAGFCRLFIPGFAELAAPLYALTKPSTPFTWQTEHQLAFEALKKALLSAPALGLPDTSKPFTLFLDERQGIAKGVLTQKLGPWKRPVAYLSKKLDPVAAGWPPCLRIMAATAMLVKDSAKLTLGQPLTVITPHTLEAIVRQPPDRWITNARLTHYQALLLDTDRVQFGPPVTLNPATLLPVPENQPSPHDCRQVLAETHGTREDLKDQELPDADHTWYTDGSSYLDSGTRRAGAAVVDGHNTIWAQSLPPGTSAQKAELIALTKALELSKGKKANIYTDSRYAFATAHTHGSIYERRGWLTSEGKEIKNKAEIIALLKALFLPQEVAIIHCPGHQKGQDPVAVGNRQADRVARQAAMAEVLTLATEPDNTSHITAGKRTADGSEFEKRTADGSEFESPKKKAKVE

SEQ ID NO: 2034 - protein, 2100 aa, synthetic construct
MPAAKRVKLDGGDKKYSIGLDIGTNSVGWAVITDEYKVPSKKFKVLGNTDRHSIKKNLIGALLFDSGETAEATRLKRTARRRYTRRKNRICYLQEIFSNEMAKVDDSFFHRLEESFLVEEDKKHERHPIFGNIVDEVAYHEKYPTIYHLRKKLVDSTDKADLRLIYLALAHMIKFRGHFLIEGDLNPDNSDVDKLFIQLVQTYNQLFEENPINASGVDAKAILSARLSKSRRLENLIAQLPGEKKNGLFGNLIALSLGLTPNFKSNFDLAEDAKLQLSKDTYDDDLDNLLAQIGDQYADLFLAAKNLSDAILLSDILRVNTEITKAPLSASMIKRYDEHHQDLTLLKALVRQQLPEKYKEIFFDQSKNGYAGYIDGGASQEEFYKFIKPILEKMDGTEELLVKLNREDLLRKQRTFDNGSIPHQIHLGELHAILRRQEDFYPFLKDNREKIEKILTFRIPYYVGPLARGNSRFAWMTRKSEETITPWNFEEVVDKGASAQSFIERMTNFDKNLPNEKVLPKHSLLYEYFTVYNELTKVKYVTEGMRKPAFLSGEQKKAIVDLLFKTNRKVTVKQLKEDYFKKIECFDSVEISGVEDRFNASLGTYHDLLKIIKDKDFLDNEENEDILEDIVLTLTLFEDREMIEERLKTYAHLFDDKVMKQLKRRRYTGWGRLSRKLINGIRDKQSGKTILDFLKSDGFANRNFMQLIHDDSLTFKEDIQKAQVSGQGDSLHEHIANLAGSPAIKKGILQTVKVVDELVKVMGRHKPENIVIEMARENQTTQKGQKNSRERMKRIEEGIKELGSQILKEHPVENTQLQNEKLYLYYLQNGRDMYVDQELDINRLSDYDVDHIVPQSFLKDDSIDNKVLTRSDKARGKSDNVPSEEVVKKMKNYWRQLLNAKLITQRKFDNLTKAERGGLSELDKAGFIKRQLVETRQITKHVAQILDSRMNTKYDENDKLIREVKVITLKSKLVSDFRKDFQFYKVREINNYHHAHDAYLNAVVGTALIKKYPKLESEFVYGDYKVYDVRKMIAKSEQEIGKATAKYFFYSNIMNFFKTEITLANGEIRKRPLIETNGETGEIVWDKGRDFATVRKVLSMPQVNIVKKTEVQTGGFSKESILPKRNSDKLIARKKDWDPKKYGGFDSPTVAYSVLVVAKVEKGKSKKLKSVKELLGITIMERSSFEKNPIDFLEAKGYKEVKKDLIIKLPKYSLFELENGRKRMLASAGELQKGNELALPSKYVNFLYLASHYEKLKGSPEDNEQKQLFVEQHKHYLDEIIEQISEFSKRVILADANLDKVLSAYNKHRDKPIREQAENIIHLFTLTNLGAPAAFKYFDTTIDRKRYTSTKEVLDATLIHQSITGLYETRIDLSQLGGDGGGGGGGSPAPGGTVSLQDEHRLFDIPVTTSLPDVWLQDFPQAWAETGGLGRAKCQAPIIIDLKPTAVPVSIKQYPMSLEAHMGIRQHIIKFLELGVLRPCRSPWNTPLLPVKKPGTQDYRPVQDLREINKRTVDIHPTVPNPYNLLSTLKPDYSWYTVLDLKDAFFCLPLAPQSQELFAFEWKDPERGISGQLTWTRLPQGFKNSPTLFNEALHRDLTDFRTQHPEVTLLQYVDDLLLAAPTKKACTQGTRHLLQELGEKGYRASAKKAQICQTKVTYLGYILSEGKRWLTPGRIETVARIPPPRNPREVREFLGKAGFCRLFIPGFAELAAPLYALTKPSTPFTWQTEHQLAFEALKKALLSAPALGLPDTSKPFTLFLDERQGIAKGVLTQKLGPWKRPVAYLSKKLDPVAAGWPPCLRIMAATAMLVKDSAKLTLGQPLTVITPHTLEAIVRQPPDRWITNARLTHYQALLLDTDRVQFGPPVTLNPATLLPVPENQPSPHDCRQVLAETHGTREDLKDQELPDADHTWYTDGSSYLDSGTRRAGAAVVDGHNTIWAQSLPPGTSAQKAELIALTKALELSKGKKANIYTDSRYAFATAHTHGSIYERRGWLTSEGKEIKNKAEIIALLKALFLPQEVAIIHCPGHQKGQDPVAVGNRQADRVARQAAMAEVLTLATEPDNTSHITAGKRTADGSEFEKRTADGSEFESPKKKAKVE

SEQ ID NO: 2035 - protein, 2109 aa, synthetic construct
MPAAKRVKLDGGDKKYSIGLDIGTNSVGWAVITDEYKVPSKKFKVLGNTDRHSIKKNLIGALLFDSGETAEATRLKRTARRRYTRRKNRICYLQEIFSNEMAKVDDSFFHRLEESFLVEEDKKHERHPIFGNIVDEVAYHEKYPTIYHLRKKLVDSTDKADLRLIYLALAHMIKFRGHFLIEGDLNPDNSDVDKLFIQLVQTYNQLFEENPINASGVDAKAILSARLSKSRRLENLIAQLPGEKKNGLFGNLIALSLGLTPNFKSNFDLAEDAKLQLSKDTYDDDLDNLLAQIGDQYADLFLAAKNLSDAILLSDILRVNTEITKAPLSASMIKRYDEHHQDLTLLKALVRQQLPEKYKEIFFDQSKNGYAGYIDGGASQEEFYKFIKPILEKMDGTEELLVKLNREDLLRKQRTFDNGSIPHQIHLGELHAILRRQEDFYPFLKDNREKIEKILTFRIPYYVGPLARGNSRFAWMTRKSEETITPWNFEEVVDKGASAQSFIERMTNFDKNLPNEKVLPKHSLLYEYFTVYNELTKVKYVTEGMRKPAFLSGEQKKAIVDLLFKTNRKVTVKQLKEDYFKKIECFDSVEISGVEDRFNASLGTYHDLLKIIKDKDFLDNEENEDILEDIVLTLTLFEDREMIEERLKTYAHLFDDKVMKQLKRRRYTGWGRLSRKLINGIRDKQSGKTILDFLKSDGFANRNFMQLIHDDSLTFKEDIQKAQVSGQGDSLHEHIANLAGSPAIKKGILQTVKVVDELVKVMGRHKPENIVIEMARENQTTQKGQKNSRERMKRIEEGIKELGSQILKEHPVENTQLQNEKLYLYYLQNGRDMYVDQELDINRLSDYDVDHIVPQSFLKDDSIDNKVLTRSDKARGKSDNVPSEEVVKKMKNYWRQLLNAKLITQRKFDNLTKAERGGLSELDKAGFIKRQLVETRQITKHVAQILDSRMNTKYDENDKLIREVKVITLKSKLVSDFRKDFQFYKVREINNYHHAHDAYLNAVVGTALIKKYPKLESEFVYGDYKVYDVRKMIAKSEQEIGKATAKYFFYSNIMNFFKTEITLANGEIRKRPLIETNGETGEIVWDKGRDFATVRKVLSMPQVNIVKKTEVQTGGFSKESILPKRNSDKLIARKKDWDPKKYGGFDSPTVAYSVLVVAKVEKGKSKKLKSVKELLGITIMERSSFEKNPIDFLEAKGYKEVKKDLIIKLPKYSLFELENGRKRMLASAGELQKGNELALPSKYVNFLYLASHYEKLKGSPEDNEQKQLFVEQHKHYLDEIIEQISEFSKRVILADANLDKVLSAYNKHRDKPIREQAENIIHLFTLTNLGAPAAFKYFDTTIDRKRYTSTKEVLDATLIHQSITGLYETRIDLSQLGGDGGGSSGSSGSSGSSGSSGSSGGTVSLQDEHRLFDIPVTTSLPDVWLQDFPQAWAETGGLGRAKCQAPIIIDLKPTAVPVSIKQYPMSLEAHMGIRQHIIKFLELGVLRPCRSPWNTPLLPVKKPGTQDYRPVQDLREINKRTVDIHPTVPNPYNLLSTLKPDYSWYTVLDLKDAFFCLPLAPQSQELFAFEWKDPERGISGQLTWTRLPQGFKNSPTLFNEALHRDLTDFRTQHPEVTLLQYVDDLLLAAPTKKACTQGTRHLLQELGEKGYRASAKKAQICQTKVTYLGYILSEGKRWLTPGRIETVARIPPPRNPREVREFLGKAGFCRLFIPGFAELAAPLYALTKPSTPFTWQTEHQLAFEALKKALLSAPALGLPDTSKPFTLFLDERQGIAKGVLTQKLGPWKRPVAYLSKKLDPVAAGWPPCLRIMAATAMLVKDSAKLTLGQPLTVITPHTLEAIVRQPPDRWITNARLTHYQALLLDTDRVQFGPPVTLNPATLLPVPENQPSPHDCRQVLAETHGTREDLKDQELPDADHTWYTDGSSYLDSGTRRAGAAVVDGHNTIWAQSLPPGTSAQKAELIALTKALELSKGKKANIYTDSRYAFATAHTHGSIYERRGWLTSEGKEIKNKAEIIALLKALFLPQEVAIIHCPGHQKGQDPVAVGNRQADRVARQAAMAEVLTLATEPDNTSHITAGKRTADGSEFEKRTADGSEFESPKKKAKVE

SEQ ID NO: 2036 - protein, 2097 aa, synthetic construct
MPAAKRVKLDGGDKKYSIGLDIGTNSVGWAVITDEYKVPSKKFKVLGNTDRHSIKKNLIGALLFDSGETAEATRLKRTARRRYTRRKNRICYLQEIFSNEMAKVDDSFFHRLEESFLVEEDKKHERHPIFGNIVDEVAYHEKYPTIYHLRKKLVDSTDKADLRLIYLALAHMIKFRGHFLIEGDLNPDNSDVDKLFIQLVQTYNQLFEENPINASGVDAKAILSARLSKSRRLENLIAQLPGEKKNGLFGNLIALSLGLTPNFKSNFDLAEDAKLQLSKDTYDDDLDNLLAQIGDQYADLFLAAKNLSDAILLSDILRVNTEITKAPLSASMIKRYDEHHQDLTLLKALVRQQLPEKYKEIFFDQSKNGYAGYIDGGASQEEFYKFIKPILEKMDGTEELLVKLNREDLLRKQRTFDNGSIPHQIHLGELHAILRRQEDFYPFLKDNREKIEKILTFRIPYYVGPLARGNSRFAWMTRKSEETITPWNFEEVVDKGASAQSFIERMTNFDKNLPNEKVLPKHSLLYEYFTVYNELTKVKYVTEGMRKPAFLSGEQKKAIVDLLFKTNRKVTVKQLKEDYFKKIECFDSVEISGVEDRFNASLGTYHDLLKIIKDKDFLDNEENEDILEDIVLTLTLFEDREMIEERLKTYAHLFDDKVMKQLKRRRYTGWGRLSRKLINGIRDKQSGKTILDFLKSDGFANRNFMQLIHDDSLTFKEDIQKAQVSGQGDSLHEHIANLAGSPAIKKGILQTVKVVDELVKVMGRHKPENIVIEMARENQTTQKGQKNSRERMKRIEEGIKELGSQILKEHPVENTQLQNEKLYLYYLQNGRDMYVDQELDINRLSDYDVDHIVPQSFLKDDSIDNKVLTRSDKARGKSDNVPSEEVVKKMKNYWRQLLNAKLITQRKFDNLTKAERGGLSELDKAGFIKRQLVETRQITKHVAQILDSRMNTKYDENDKLIREVKVITLKSKLVSDFRKDFQFYKVREINNYHHAHDAYLNAVVGTALIKKYPKLESEFVYGDYKVYDVRKMIAKSEQEIGKATAKYFFYSNIMNFFKTEITLANGEIRKRPLIETNGETGEIVWDKGRDFATVRKVLSMPQVNIVKKTEVQTGGFSKESILPKRNSDKLIARKKDWDPKKYGGFDSPTVAYSVLVVAKVEKGKSKKLKSVKELLGITIMERSSFEKNPIDFLEAKGYKEVKKDLIIKLPKYSLFELENGRKRMLASAGELQKGNELALPSKYVNFLYLASHYEKLKGSPEDNEQKQLFVEQHKHYLDEIIEQISEFSKRVILADANLDKVLSAYNKHRDKPIREQAENIIHLFTLTNLGAPAAFKYFDTTIDRKRYTSTKEVLDATLIHQSITGLYETRIDLSQLGGDGGPAPGSSGGTVSLQDEHRLFDIPVTTSLPDVWLQDFPQAWAETGGLGRAKCQAPIIIDLKPTAVPVSIKQYPMSLEAHMGIRQHIIKFLELGVLRPCRSPWNTPLLPVKKPGTQDYRPVQDLREINKRTVDIHPTVPNPYNLLSTLKPDYSWYTVLDLKDAFFCLPLAPQSQELFAFEWKDPERGISGQLTWTRLPQGFKNSPTLFNEALHRDLTDFRTQHPEVTLLQYVDDLLLAAPTKKACTQGTRHLLQELGEKGYRASAKKAQICQTKVTYLGYILSEGKRWLTPGRIETVARIPPPRNPREVREFLGKAGFCRLFIPGFAELAAPLYALTKPSTPFTWQTEHQLAFEALKKALLSAPALGLPDTSKPFTLFLDERQGIAKGVLTQKLGPWKRPVAYLSKKLDPVAAGWPPCLRIMAATAMLVKDSAKLTLGQPLTVITPHTLEAIVRQPPDRWITNARLTHYQALLLDTDRVQFGPPVTLNPATLLPVPENQPSPHDCRQVLAETHGTREDLKDQELPDADHTWYTDGSSYLDSGTRRAGAAVVDGHNTIWAQSLPPGTSAQKAELIALTKALELSKGKKANIYTDSRYAFATAHTHGSIYERRGWLTSEGKEIKNKAEIIALLKALFLPQEVAIIHCPGHQKGQDPVAVGNRQADRVARQAAMAEVLTLATEPDNTSHITAGKRTADGSEFEKRTADGSEFESPKKKAKVE

SEQ ID NO: 2037 - protein, 2102 aa, synthetic construct
MPAAKRVKLDGGDKKYSIGLDIGTNSVGWAVITDEYKVPSKKFKVLGNTDRHSIKKNLIGALLFDSGETAEATRLKRTARRRYTRRKNRICYLQEIFSNEMAKVDDSFFHRLEESFLVEEDKKHERHPIFGNIVDEVAYHEKYPTIYHLRKKLVDSTDKADLRLIYLALAHMIKFRGHFLIEGDLNPDNSDVDKLFIQLVQTYNQLFEENPINASGVDAKAILSARLSKSRRLENLIAQLPGEKKNGLFGNLIALSLGLTPNFKSNFDLAEDAKLQLSKDTYDDDLDNLLAQIGDQYADLFLAAKNLSDAILLSDILRVNTEITKAPLSASMIKRYDEHHQDLTLLKALVRQQLPEKYKEIFFDQSKNGYAGYIDGGASQEEFYKFIKPILEKMDGTEELLVKLNREDLLRKQRTFDNGSIPHQIHLGELHAILRRQEDFYPFLKDNREKIEKILTFRIPYYVGPLARGNSRFAWMTRKSEETITPWNFEEVVDKGASAQSFIERMTNFDKNLPNEKVLPKHSLLYEYFTVYNELTKVKYVTEGMRKPAFLSGEQKKAIVDLLFKTNRKVTVKQLKEDYFKKIECFDSVEISGVEDRFNASLGTYHDLLKIIKDKDFLDNEENEDILEDIVLTLTLFEDREMIEERLKTYAHLFDDKVMKQLKRRRYTGWGRLSRKLINGIRDKQSGKTILDFLKSDGFANRNFMQLIHDDSLTFKEDIQKAQVSGQGDSLHEHIANLAGSPAIKKGILQTVKVVDELVKVMGRHKPENIVIEMARENQTTQKGQKNSRERMKRIEEGIKELGSQILKEHPVENTQLQNEKLYLYYLQNGRDMYVDQELDINRLSDYDVDHIVPQSFLKDDSIDNKVLTRSDKARGKSDNVPSEEVVKKMKNYWRQLLNAKLITQRKFDNLTKAERGGLSELDKAGFIKRQLVETRQITKHVAQILDSRMNTKYDENDKLIREVKVITLKSKLVSDFRKDFQFYKVREINNYHHAHDAYLNAVVGTALIKKYPKLESEFVYGDYKVYDVRKMIAKSEQEIGKATAKYFFYSNIMNFFKTEITLANGEIRKRPLIETNGETGEIVWDKGRDFATVRKVLSMPQVNIVKKTEVQTGGFSKESILPKRNSDKLIARKKDWDPKKYGGFDSPTVAYSVLVVAKVEKGKSKKLKSVKELLGITIMERSSFEKNPIDFLEAKGYKEVKKDLIIKLPKYSLFELENGRKRMLASAGELQKGNELALPSKYVNFLYLASHYEKLKGSPEDNEQKQLFVEQHKHYLDEIIEQISEFSKRVILADANLDKVLSAYNKHRDKPIREQAENIIHLFTLTNLGAPAAFKYFDTTIDRKRYTSTKEVLDATLIHQSITGLYETRIDLSQLGGDGGGSSEAAAKPAPGGTVSLQDEHRLFDIPVTTSLPDVWLQDFPQAWAETGGLGRAKCQAPIIIDLKPTAVPVSIKQYPMSLEAHMGIRQHIIKFLELGVLRPCRSPWNTPLLPVKKPGTQDYRPVQDLREINKRTVDIHPTVPNPYNLLSTLKPDYSWYTVLDLKDAFFCLPLAPQSQELFAFEWKDPERGISGQLTWTRLPQGFKNSPTLFNEALHRDLTDFRTQHPEVTLLQYVDDLLLAAPTKKACTQGTRHLLQELGEKGYRASAKKAQICQTKVTYLGYILSEGKRWLTPGRIETVARIPPPRNPREVREFLGKAGFCRLFIPGFAELAAPLYALTKPSTPFTWQTEHQLAFEALKKALLSAPALGLPDTSKPFTLFLDERQGIAKGVLTQKLGPWKRPVAYLSKKLDPVAAGWPPCLRIMAATAMLVKDSAKLTLGQPLTVITPHTLEAIVRQPPDRWITNARLTHYQALLLDTDRVQFGPPVTLNPATLLPVPENQPSPHDCRQVLAETHGTREDLKDQELPDADHTWYTDGSSYLDSGTRRAGAAVVDGHNTIWAQSLPPGTSAQKAELIALTKALELSKGKKANIYTDSRYAFATAHTHGSIYERRGWLTSEGKEIKNKAEIIALLKALFLPQEVAIIHCPGHQKGQDPVAVGNRQADRVARQAAMAEVLTLATEPDNTSHITAGKRTADGSEFEKRTADGSEFESPKKKAKVE

SEQ ID NO: 2038 - protein, 2100 aa, synthetic construct
MPAAKRVKLDGGDKKYSIGLDIGTNSVGWAVITDEYKVPSKKFKVLGNTDRHSIKKNLIGALLFDSGETAEATRLKRTARRRYTRRKNRICYLQEIFSNEMAKVDDSFFHRLEESFLVEEDKKHERHPIFGNIVDEVAYHEKYPTIYHLRKKLVDSTDKADLRLIYLALAHMIKFRGHFLIEGDLNPDNSDVDKLFIQLVQTYNQLFEENPINASGVDAKAILSARLSKSRRLENLIAQLPGEKKNGLFGNLIALSLGLTPNFKSNFDLAEDAKLQLSKDTYDDDLDNLLAQIGDQYADLFLAAKNLSDAILLSDILRVNTEITKAPLSASMIKRYDEHHQDLTLLKALVRQQLPEKYKEIFFDQSKNGYAGYIDGGASQEEFYKFIKPILEKMDGTEELLVKLNREDLLRKQRTFDNGSIPHQIHLGELHAILRRQEDFYPFLKDNREKIEKILTFRIPYYVGPLARGNSRFAWMTRKSEETITPWNFEEVVDKGASAQSFIERMTNFDKNLPNEKVLPKHSLLYEYFTVYNELTKVKYVTEGMRKPAFLSGEQKKAIVDLLFKTNRKVTVKQLKEDYFKKIECFDSVEISGVEDRFNASLGTYHDLLKIIKDKDFLDNEENEDILEDIVLTLTLFEDREMIEERLKTYAHLFDDKVMKQLKRRRYTGWGRLSRKLINGIRDKQSGKTILDFLKSDGFANRNFMQLIHDDSLTFKEDIQKAQVSGQGDSLHEHIANLAGSPAIKKGILQTVKVVDELVKVMGRHKPENIVIEMARENQTTQKGQKNSRERMKRIEEGIKELGSQILKEHPVENTQLQNEKLYLYYLQNGRDMYVDQELDINRLSDYDVDHIVPQSFLKDDSIDNKVLTRSDKARGKSDNVPSEEVVKKMKNYWRQLLNAKLITQRKFDNLTKAERGGLSELDKAGFIKRQLVETRQITKHVAQILDSRMNTKYDENDKLIREVKVITLKSKLVSDFRKDFQFYKVREINNYHHAHDAYLNAVVGTALIKKYPKLESEFVYGDYKVYDVRKMIAKSEQEIGKATAKYFFYSNIMNFFKTEITLANGEIRKRPLIETNGETGEIVWDKGRDFATVRKVLSMPQVNIVKKTEVQTGGFSKESILPKRNSDKLIARKKDWDPKKYGGFDSPTVAYSVLVVAKVEKGKSKKLKSVKELLGITIMERSSFEKNPIDFLEAKGYKEVKKDLIIKLPKYSLFELENGRKRMLASAGELQKGNELALPSKYVNFLYLASHYEKLKGSPEDNEQKQLFVEQHKHYLDEIIEQISEFSKRVILADANLDKVLSAYNKHRDKPIREQAENIIHLFTLTNLGAPAAFKYFDTTIDRKRYTSTKEVLDATLIHQSITGLYETRIDLSQLGGDGGGGSGGGGSSGGTVSLQDEHRLFDIPVTTSLPDVWLQDFPQAWAETGGLGRAKCQAPIIIDLKPTAVPVSIKQYPMSLEAHMGIRQHIIKFLELGVLRPCRSPWNTPLLPVKKPGTQDYRPVQDLREINKRTVDIHPTVPNPYNLLSTLKPDYSWYTVLDLKDAFFCLPLAPQSQELFAFEWKDPERGISGQLTWTRLPQGFKNSPTLFNEALHRDLTDFRTQHPEVTLLQYVDDLLLAAPTKKACTQGTRHLLQELGEKGYRASAKKAQICQTKVTYLGYILSEGKRWLTPGRIETVARIPPPRNPREVREFLGKAGFCRLFIPGFAELAAPLYALTKPSTPFTWQTEHQLAFEALKKALLSAPALGLPDTSKPFTLFLDERQGIAKGVLTQKLGPWKRPVAYLSKKLDPVAAGWPPCLRIMAATAMLVKDSAKLTLGQPLTVITPHTLEAIVRQPPDRWITNARLTHYQALLLDTDRVQFGPPVTLNPATLLPVPENQPSPHDCRQVLAETHGTREDLKDQELPDADHTWYTDGSSYLDSGTRRAGAAVVDGHNTIWAQSLPPGTSAQKAELIALTKALELSKGKKANIYTDSRYAFATAHTHGSIYERRGWLTSEGKEIKNKAEIIALLKALFLPQEVAIIHCPGHQKGQDPVAVGNRQADRVARQAAMAEVLTLATEPDNTSHITAGKRTADGSEFEKRTADGSEFESPKKKAKVE

SEQ ID NO: 2039 - protein, 2102 aa, synthetic construct
MPAAKRVKLDGGDKKYSIGLDIGTNSVGWAVITDEYKVPSKKFKVLGNTDRHSIKKNLIGALLFDSGETAEATRLKRTARRRYTRRKNRICYLQEIFSNEMAKVDDSFFHRLEESFLVEEDKKHERHPIFGNIVDEVAYHEKYPTIYHLRKKLVDSTDKADLRLIYLALAHMIKFRGHFLIEGDLNPDNSDVDKLFIQLVQTYNQLFEENPINASGVDAKAILSARLSKSRRLENLIAQLPGEKKNGLFGNLIALSLGLTPNFKSNFDLAEDAKLQLSKDTYDDDLDNLLAQIGDQYADLFLAAKNLSDAILLSDILRVNTEITKAPLSASMIKRYDEHHQDLTLLKALVRQQLPEKYKEIFFDQSKNGYAGYIDGGASQEEFYKFIKPILEKMDGTEELLVKLNREDLLRKQRTFDNGSIPHQIHLGELHAILRRQEDFYPFLKDNREKIEKILTFRIPYYVGPLARGNSRFAWMTRKSEETITPWNFEEVVDKGASAQSFIERMTNFDKNLPNEKVLPKHSLLYEYFTVYNELTKVKYVTEGMRKPAFLSGEQKKAIVDLLFKTNRKVTVKQLKEDYFKKIECFDSVEISGVEDRFNASLGTYHDLLKIIKDKDFLDNEENEDILEDIVLTLTLFEDREMIEERLKTYAHLFDDKVMKQLKRRRYTGWGRLSRKLINGIRDKQSGKTILDFLKSDGFANRNFMQLIHDDSLTFKEDIQKAQVSGQGDSLHEHIANLAGSPAIKKGILQTVKVVDELVKVMGRHKPENIVIEMARENQTTQKGQKNSRERMKRIEEGIKELGSQILKEHPVENTQLQNEKLYLYYLQNGRDMYVDQELDINRLSDYDVDHIVPQSFLKDDSIDNKVLTRSDKARGKSDNVPSEEVVKKMKNYWRQLLNAKLITQRKFDNLTKAERGGLSELDKAGFIKRQLVETRQITKHVAQILDSRMNTKYDENDKLIREVKVITLKSKLVSDFRKDFQFYKVREINNYHHAHDAYLNAVVGTALIKKYPKLESEFVYGDYKVYDVRKMIAKSEQEIGKATAKYFFYSNIMNFFKTEITLANGEIRKRPLIETNGETGEIVWDKGRDFATVRKVLSMPQVNIVKKTEVQTGGFSKESILPKRNSDKLIARKKDWDPKKYGGFDSPTVAYSVLVVAKVEKGKSKKLKSVKELLGITIMERSSFEKNPIDFLEAKGYKEVKKDLIIKLPKYSLFELENGRKRMLASAGELQKGNELALPSKYVNFLYLASHYEKLKGSPEDNEQKQLFVEQHKHYLDEIIEQISEFSKRVILADANLDKVLSAYNKHRDKPIREQAENIIHLFTLTNLGAPAAFKYFDTTIDRKRYTSTKEVLDATLIHQSITGLYETRIDLSQLGGDGGEAAAKGSSPAPGGTVSLQDEHRLFDIPVTTSLPDVWLQDFPQAWAETGGLGRAKCQAPIIIDLKPTAVPVSIKQYPMSLEAHMGIRQHIIKFLELGVLRPCRSPWNTPLLPVKKPGTQDYRPVQDLREINKRTVDIHPTVPNPYNLLSTLKPDYSWYTVLDLKDAFFCLPLAPQSQELFAFEWKDPERGISGQLTWTRLPQGFKNSPTLFNEALHRDLTDFRTQHPEVTLLQYVDDLLLAAPTKKACTQGTRHLLQELGEKGYRASAKKAQICQTKVTYLGYILSEGKRWLTPGRIETVARIPPPRNPREVREFLGKAGFCRLFIPGFAELAAPLYALTKPSTPFTWQTEHQLAFEALKKALLSAPALGLPDTSKPFTLFLDERQGIAKGVLTQKLGPWKRPVAYLSKKLDPVAAGWPPCLRIMAATAMLVKDSAKLTLGQPLTVITPHTLEAIVRQPPDRWITNARLTHYQALLLDTDRVQFGPPVTLNPATLLPVPENQPSPHDCRQVLAETHGTREDLKDQELPDADHTWYTDGSSYLDSGTRRAGAAVVDGHNTIWAQSLPPGTSAQKAELIALTKALELSKGKKANIYTDSRYAFATAHTHGSIYERRGWLTSEGKEIKNKAEIIALLKALFLPQEVAIIHCPGHQKGQDPVAVGNRQADRVARQAAMAEVLTLATEPDNTSHITAGKRTADGSEFEKRTADGSEFESPKKKAKVE

SEQ ID NO: 2040 - protein, 2102 aa, synthetic construct
MPAAKRVKLDGGDKKYSIGLDIGTNSVGWAVITDEYKVPSKKFKVLGNTDRHSIKKNLIGALLFDSGETAEATRLKRTARRRYTRRKNRICYLQEIFSNEMAKVDDSFFHRLEESFLVEEDKKHERHPIFGNIVDEVAYHEKYPTIYHLRKKLVDSTDKADLRLIYLALAHMIKFRGHFLIEGDLNPDNSDVDKLFIQLVQTYNQLFEENPINASGVDAKAILSARLSKSRRLENLIAQLPGEKKNGLFGNLIALSLGLTPNFKSNFDLAEDAKLQLSKDTYDDDLDNLLAQIGDQYADLFLAAKNLSDAILLSDILRVNTEITKAPLSASMIKRYDEHHQDLTLLKALVRQQLPEKYKEIFFDQSKNGYAGYIDGGASQEEFYKFIKPILEKMDGTEELLVKLNREDLLRKQRTFDNGSIPHQIHLGELHAILRRQEDFYPFLKDNREKIEKILTFRIPYYVGPLARGNSRFAWMTRKSEETITPWNFEEVVDKGASAQSFIERMTNFDKNLPNEKVLPKHSLLYEYFTVYNELTKVKYVTEGMRKPAFLSGEQKKAIVDLLFKTNRKVTVKQLKEDYFKKIECFDSVEISGVEDRFNASLGTYHDLLKIIKDKDFLDNEENEDILEDIVLTLTLFEDREMIEERLKTYAHLFDDKVMKQLKRRRYTGWGRLSRKLINGIRDKQSGKTILDFLKSDGFANRNFMQLIHDDSLTFKEDIQKAQVSGQGDSLHEHIANLAGSPAIKKGILQTVKVVDELVKVMGRHKPENIVIEMARENQTTQKGQKNSRERMKRIEEGIKELGSQILKEHPVENTQLQNEKLYLYYLQNGRDMYVDQELDINRLSDYDVDHIVPQSFLKDDSIDNKVLTRSDKARGKSDNVPSEEVVKKMKNYWRQLLNAKLITQRKFDNLTKAERGGLSELDKAGFIKRQLVETRQITKHVAQILDSRMNTKYDENDKLIREVKVITLKSKLVSDFRKDFQFYKVREINNYHHAHDAYLNAVVGTALIKKYPKLESEFVYGDYKVYDVRKMIAKSEQEIGKATAKYFFYSNIMNFFKTEITLANGEIRKRPLIETNGETGEIVWDKGRDFATVRKVLSMPQVNIVKKTEVQTGGFSKESILPKRNSDKLIARKKDWDPKKYGGFDSPTVAYSVLVVAKVEKGKSKKLKSVKELLGITIMERSSFEKNPIDFLEAKGYKEVKKDLIIKLPKYSLFELENGRKRMLASAGELQKGNELALPSKYVNFLYLASHYEKLKGSPEDNEQKQLFVEQHKHYLDEIIEQISEFSKRVILADANLDKVLSAYNKHRDKPIREQAENIIHLFTLTNLGAPAAFKYFDTTIDRKRYTSTKEVLDATLIHQSITGLYETRIDLSQLGGDGGPAPEAAAKGSSGGTVSLQDEHRLFDIPVTTSLPDVWLQDFPQAWAETGGLGRAKCQAPIIIDLKPTAVPVSIKQYPMSLEAHMGIRQHIIKFLELGVLRPCRSPWNTPLLPVKKPGTQDYRPVQDLREINKRTVDIHPTVPNPYNLLSTLKPDYSWYTVLDLKDAFFCLPLAPQSQELFAFEWKDPERGISGQLTWTRLPQGFKNSPTLFNEALHRDLTDFRTQHPEVTLLQYVDDLLLAAPTKKACTQGTRHLLQELGEKGYRASAKKAQICQTKVTYLGYILSEGKRWLTPGRIETVARIPPPRNPREVREFLGKAGFCRLFIPGFAELAAPLYALTKPSTPFTWQTEHQLAFEALKKALLSAPALGLPDTSKPFTLFLDERQGIAKGVLTQKLGPWKRPVAYLSKKLDPVAAGWPPCLRIMAATAMLVKDSAKLTLGQPLTVITPHTLEAIVRQPPDRWITNARLTHYQALLLDTDRVQFGPPVTLNPATLLPVPENQPSPHDCRQVLAETHGTREDLKDQELPDADHTWYTDGSSYLDSGTRRAGAAVVDGHNTIWAQSLPPGTSAQKAELIALTKALELSKGKKANIYTDSRYAFATAHTHGSIYERRGWLTSEGKEIKNKAEIIALLKALFLPQEVAIIHCPGHQKGQDPVAVGNRQADRVARQAAMAEVLTLATEPDNTSHITAGKRTADGSEFEKRTADGSEFESPKKKAKVE

SEQ ID NO: 2041 - protein, 2102 aa, synthetic construct
MPAAKRVKLDGGDKKYSIGLDIGTNSVGWAVITDEYKVPSKKFKVLGNTDRHSIKKNLIGALLFDSGETAEATRLKRTARRRYTRRKNRICYLQEIFSNEMAKVDDSFFHRLEESFLVEEDKKHERHPIFGNIVDEVAYHEKYPTIYHLRKKLVDSTDKADLRLIYLALAHMIKFRGHFLIEGDLNPDNSDVDKLFIQLVQTYNQLFEENPINASGVDAKAILSARLSKSRRLENLIAQLPGEKKNGLFGNLIALSLGLTPNFKSNFDLAEDAKLQLSKDTYDDDLDNLLAQIGDQYADLFLAAKNLSDAILLSDILRVNTEITKAPLSASMIKRYDEHHQDLTLLKALVRQQLPEKYKEIFFDQSKNGYAGYIDGGASQEEFYKFIKPILEKMDGTEELLVKLNREDLLRKQRTFDNGSIPHQIHLGELHAILRRQEDFYPFLKDNREKIEKILTFRIPYYVGPLARGNSRFAWMTRKSEETITPWNFEEVVDKGASAQSFIERMTNFDKNLPNEKVLPKHSLLYEYFTVYNELTKVKYVTEGMRKPAFLSGEQKKAIVDLLFKTNRKVTVKQLKEDYFKKIECFDSVEISGVEDRFNASLGTYHDLLKIIKDKDFLDNEENEDILEDIVLTLTLFEDREMIEERLKTYAHLFDDKVMKQLKRRRYTGWGRLSRKLINGIRDKQSGKTILDFLKSDGFANRNFMQLIHDDSLTFKEDIQKAQVSGQGDSLHEHIANLAGSPAIKKGILQTVKVVDELVKVMGRHKPENIVIEMARENQTTQKGQKNSRERMKRIEEGIKELGSQILKEHPVENTQLQNEKLYLYYLQNGRDMYVDQELDINRLSDYDVDHIVPQSFLKDDSIDNKVLTRSDKARGKSDNVPSEEVVKKMKNYWRQLLNAKLITQRKFDNLTKAERGGLSELDKAGFIKRQLVETRQITKHVAQILDSRMNTKYDENDKLIREVKVITLKSKLVSDFRKDFQFYKVREINNYHHAHDAYLNAVVGTALIKKYPKLESEFVYGDYKVYDVRKMIAKSEQEIGKATAKYFFYSNIMNFFKTEITLANGEIRKRPLIETNGETGEIVWDKGRDFATVRKVLSMPQVNIVKKTEVQTGGFSKESILPKRNSDKLIARKKDWDPKKYGGFDSPTVAYSVLVVAKVEKGKSKKLKSVKELLGITIMERSSFEKNPIDFLEAKGYKEVKKDLIIKLPKYSLFELENGRKRMLASAGELQKGNELALPSKYVNFLYLASHYEKLKGSPEDNEQKQLFVEQHKHYLDEIIEQISEFSKRVILADANLDKVLSAYNKHRDKPIREQAENIIHLFTLTNLGAPAAFKYFDTTIDRKRYTSTKEVLDATLIHQSITGLYETRIDLSQLGGDGGEAAAKGGGPAPGGTVSLQDEHRLFDIPVTTSLPDVWLQDFPQAWAETGGLGRAKCQAPIIIDLKPTAVPVSIKQYPMSLEAHMGIRQHIIKFLELGVLRPCRSPWNTPLLPVKKPGTQDYRPVQDLREINKRTVDIHPTVPNPYNLLSTLKPDYSWYTVLDLKDAFFCLPLAPQSQELFAFEWKDPERGISGQLTWTRLPQGFKNSPTLFNEALHRDLTDFRTQHPEVTLLQYVDDLLLAAPTKKACTQGTRHLLQELGEKGYRASAKKAQICQTKVTYLGYILSEGKRWLTPGRIETVARIPPPRNPREVREFLGKAGFCRLFIPGFAELAAPLYALTKPSTPFTWQTEHQLAFEALKKALLSAPALGLPDTSKPFTLFLDERQGIAKGVLTQKLGPWKRPVAYLSKKLDPVAAGWPPCLRIMAATAMLVKDSAKLTLGQPLTVITPHTLEAIVRQPPDRWITNARLTHYQALLLDTDRVQFGPPVTLNPATLLPVPENQPSPHDCRQVLAETHGTREDLKDQELPDADHTWYTDGSSYLDSGTRRAGAAVVDGHNTIWAQSLPPGTSAQKAELIALTKALELSKGKKANIYTDSRYAFATAHTHGSIYERRGWLTSEGKEIKNKAEIIALLKALFLPQEVAIIHCPGHQKGQDPVAVGNRQADRVARQAAMAEVLTLATEPDNTSHITAGKRTADGSEFEKRTADGSEFESPKKKAKVE

SEQ ID NO: 2042 - protein, 2100 aa, synthetic construct
MPAAKRVKLDGGDKKYSIGLDIGTNSVGWAVITDEYKVPSKKFKVLGNTDRHSIKKNLIGALLFDSGETAEATRLKRTARRRYTRRKNRICYLQEIFSNEMAKVDDSFFHRLEESFLVEEDKKHERHPIFGNIVDEVAYHEKYPTIYHLRKKLVDSTDKADLRLIYLALAHMIKFRGHFLIEGDLNPDNSDVDKLFIQLVQTYNQLFEENPINASGVDAKAILSARLSKSRRLENLIAQLPGEKKNGLFGNLIALSLGLTPNFKSNFDLAEDAKLQLSKDTYDDDLDNLLAQIGDQYADLFLAAKNLSDAILLSDILRVNTEITKAPLSASMIKRYDEHHQDLTLLKALVRQQLPEKYKEIFFDQSKNGYAGYIDGGASQEEFYKFIKPILEKMDGTEELLVKLNREDLLRKQRTFDNGSIPHQIHLGELHAILRRQEDFYPFLKDNREKIEKILTFRIPYYVGPLARGNSRFAWMTRKSEETITPWNFEEVVDKGASAQSFIERMTNFDKNLPNEKVLPKHSLLYEYFTVYNELTKVKYVTEGMRKPAFLSGEQKKAIVDLLFKTNRKVTVKQLKEDYFKKIECFDSVEISGVEDRFNASLGTYHDLLKIIKDKDFLDNEENEDILEDIVLTLTLFEDREMIEERLKTYAHLFDDKVMKQLKRRRYTGWGRLSRKLINGIRDKQSGKTILDFLKSDGFANRNFMQLIHDDSLTFKEDIQKAQVSGQGDSLHEHIANLAGSPAIKKGILQTVKVVDELVKVMGRHKPENIVIEMARENQTTQKGQKNSRERMKRIEEGIKELGSQILKEHPVENTQLQNEKLYLYYLQNGRDMYVDQELDINRLSDYDVDHIVPQSFLKDDSIDNKVLTRSDKARGKSDNVPSEEVVKKMKNYWRQLLNAKLITQRKFDNLTKAERGGLSELDKAGFIKRQLVETRQITKHVAQILDSRMNTKYDENDKLIREVKVITLKSKLVSDFRKDFQFYKVREINNYHHAHDAYLNAVVGTALIKKYPKLESEFVYGDYKVYDVRKMIAKSEQEIGKATAKYFFYSNIMNFFKTEITLANGEIRKRPLIETNGETGEIVWDKGRDFATVRKVLSMPQVNIVKKTEVQTGGFSKESILPKRNSDKLIARKKDWDPKKYGGFDSPTVAYSVLVVAKVEKGKSKKLKSVKELLGITIMERSSFEKNPIDFLEAKGYKEVKKDLIIKLPKYSLFELENGRKRMLASAGELQKGNELALPSKYVNFLYLASHYEKLKGSPEDNEQKQLFVEQHKHYLDEIIEQISEFSKRVILADANLDKVLSAYNKHRDKPIREQAENIIHLFTLTNLGAPAAFKYFDTTIDRKRYTSTKEVLDATLIHQSITGLYETRIDLSQLGGDGGGSSGSSGSSGGTVSLQDEHRLFDIPVTTSLPDVWLQDFPQAWAETGGLGRAKCQAPIIIDLKPTAVPVSIKQYPMSLEAHMGIRQHIIKFLELGVLRPCRSPWNTPLLPVKKPGTQDYRPVQDLREINKRTVDIHPTVPNPYNLLSTLKPDYSWYTVLDLKDAFFCLPLAPQSQELFAFEWKDPERGISGQLTWTRLPQGFKNSPTLFNEALHRDLTDFRTQHPEVTLLQYVDDLLLAAPTKKACTQGTRHLLQELGEKGYRASAKKAQICQTKVTYLGYILSEGKRWLTPGRIETVARIPPPRNPREVREFLGKAGFCRLFIPGFAELAAPLYALTKPSTPFTWQTEHQLAFEALKKALLSAPALGLPDTSKPFTLFLDERQGIAKGVLTQKLGPWKRPVAYLSKKLDPVAAGWPPCLRIMAATAMLVKDSAKLTLGQPLTVITPHTLEAIVRQPPDRWITNARLTHYQALLLDTDRVQFGPPVTLNPATLLPVPENQPSPHDCRQVLAETHGTREDLKDQELPDADHTWYTDGSSYLDSGTRRAGAAVVDGHNTIWAQSLPPGTSAQKAELIALTKALELSKGKKANIYTDSRYAFATAHTHGSIYERRGWLTSEGKEIKNKAEIIALLKALFLPQEVAIIHCPGHQKGQDPVAVGNRQADRVARQAAMAEVLTLATEPDNTSHITAGKRTADGSEFEKRTADGSEFESPKKKAKVE

SEQ ID NO: 2043 - protein, 2106 aa, synthetic construct
MPAAKRVKLDGGDKKYSIGLDIGTNSVGWAVITDEYKVPSKKFKVLGNTDRHSIKKNLIGALLFDSGETAEATRLKRTARRRYTRRKNRICYLQEIFSNEMAKVDDSFFHRLEESFLVEEDKKHERHPIFGNIVDEVAYHEKYPTIYHLRKKLVDSTDKADLRLIYLALAHMIKFRGHFLIEGDLNPDNSDVDKLFIQLVQTYNQLFEENPINASGVDAKAILSARLSKSRRLENLIAQLPGEKKNGLFGNLIALSLGLTPNFKSNFDLAEDAKLQLSKDTYDDDLDNLLAQIGDQYADLFLAAKNLSDAILLSDILRVNTEITKAPLSASMIKRYDEHHQDLTLLKALVRQQLPEKYKEIFFDQSKNGYAGYIDGGASQEEFYKFIKPILEKMDGTEELLVKLNREDLLRKQRTFDNGSIPHQIHLGELHAILRRQEDFYPFLKDNREKIEKILTFRIPYYVGPLARGNSRFAWMTRKSEETITPWNFEEVVDKGASAQSFIERMTNFDKNLPNEKVLPKHSLLYEYFTVYNELTKVKYVTEGMRKPAFLSGEQKKAIVDLLFKTNRKVTVKQLKEDYFKKIECFDSVEISGVEDRFNASLGTYHDLLKIIKDKDFLDNEENEDILEDIVLTLTLFEDREMIEERLKTYAHLFDDKVMKQLKRRRYTGWGRLSRKLINGIRDKQSGKTILDFLKSDGFANRNFMQLIHDDSLTFKEDIQKAQVSGQGDSLHEHIANLAGSPAIKKGILQTVKVVDELVKVMGRHKPENIVIEMARENQTTQKGQKNSRERMKRIEEGIKELGSQILKEHPVENTQLQNEKLYLYYLQNGRDMYVDQELDINRLSDYDVDHIVPQSFLKDDSIDNKVLTRSDKARGKSDNVPSEEVVKKMKNYWRQLLNAKLITQRKFDNLTKAERGGLSELDKAGFIKRQLVETRQITKHVAQILDSRMNTKYDENDKLIREVKVITLKSKLVSDFRKDFQFYKVREINNYHHAHDAYLNAVVGTALIKKYPKLESEFVYGDYKVYDVRKMIAKSEQEIGKATAKYFFYSNIMNFFKTEITLANGEIRKRPLIETNGETGEIVWDKGRDFATVRKVLSMPQVNIVKKTEVQTGGFSKESILPKRNSDKLIARKKDWDPKKYGGFDSPTVAYSVLVVAKVEKGKSKKLKSVKELLGITIMERSSFEKNPIDFLEAKGYKEVKKDLIIKLPKYSLFELENGRKRMLASAGELQKGNELALPSKYVNFLYLASHYEKLKGSPEDNEQKQLFVEQHKHYLDEIIEQISEFSKRVILADANLDKVLSAYNKHRDKPIREQAENIIHLFTLTNLGAPAAFKYFDTTIDRKRYTSTKEVLDATLIHQSITGLYETRIDLSQLGGDGGEAAAKEAAAKEAAAKGGTVSLQDEHRLFDIPVTTSLPDVWLQDFPQAWAETGGLGRAKCQAPIIIDLKPTAVPVSIKQYPMSLEAHMGIRQHIIKFLELGVLRPCRSPWNTPLLPVKKPGTQDYRPVQDLREINKRTVDIHPTVPNPYNLLSTLKPDYSWYTVLDLKDAFFCLPLAPQSQELFAFEWKDPERGISGQLTWTRLPQGFKNSPTLFNEALHRDLTDFRTQHPEVTLLQYVDDLLLAAPTKKACTQGTRHLLQELGEKGYRASAKKAQICQTKVTYLGYILSEGKRWLTPGRIETVARIPPPRNPREVREFLGKAGFCRLFIPGFAELAAPLYALTKPSTPFTWQTEHQLAFEALKKALLSAPALGLPDTSKPFTLFLDERQGIAKGVLTQKLGPWKRPVAYLSKKLDPVAAGWPPCLRIMAATAMLVKDSAKLTLGQPLTVITPHTLEAIVRQPPDRWITNARLTHYQALLLDTDRVQFGPPVTLNPATLLPVPENQPSPHDCRQVLAETHGTREDLKDQELPDADHTWYTDGSSYLDSGTRRAGAAVVDGHNTIWAQSLPPGTSAQKAELIALTKALELSKGKKANIYTDSRYAFATAHTHGSIYERRGWLTSEGKEIKNKAEIIALLKALFLPQEVAIIHCPGHQKGQDPVAVGNRQADRVARQAAMAEVLTLATEPDNTSHITAGKRTADGSEFEKRTADGSEFESPKKKAKVE

SEQ ID NO: 2044 - protein, 2102 aa, synthetic construct
MPAAKRVKLDGGDKKYSIGLDIGTNSVGWAVITDEYKVPSKKFKVLGNTDRHSIKKNLIGALLFDSGETAEATRLKRTARRRYTRRKNRICYLQEIFSNEMAKVDDSFFHRLEESFLVEEDKKHERHPIFGNIVDEVAYHEKYPTIYHLRKKLVDSTDKADLRLIYLALAHMIKFRGHFLIEGDLNPDNSDVDKLFIQLVQTYNQLFEENPINASGVDAKAILSARLSKSRRLENLIAQLPGEKKNGLFGNLIALSLGLTPNFKSNFDLAEDAKLQLSKDTYDDDLDNLLAQIGDQYADLFLAAKNLSDAILLSDILRVNTEITKAPLSASMIKRYDEHHQDLTLLKALVRQQLPEKYKEIFFDQSKNGYAGYIDGGASQEEFYKFIKPILEKMDGTEELLVKLNREDLLRKQRTFDNGSIPHQIHLGELHAILRRQEDFYPFLKDNREKIEKILTFRIPYYVGPLARGNSRFAWMTRKSEETITPWNFEEVVDKGASAQSFIERMTNFDKNLPNEKVLPKHSLLYEYFTVYNELTKVKYVTEGMRKPAFLSGEQKKAIVDLLFKTNRKVTVKQLKEDYFKKIECFDSVEISGVEDRFNASLGTYHDLLKIIKDKDFLDNEENEDILEDIVLTLTLFEDREMIEERLKTYAHLFDDKVMKQLKRRRYTGWGRLSRKLINGIRDKQSGKTILDFLKSDGFANRNFMQLIHDDSLTFKEDIQKAQVSGQGDSLHEHIANLAGSPAIKKGILQTVKVVDELVKVMGRHKPENIVIEMARENQTTQKGQKNSRERMKRIEEGIKELGSQILKEHPVENTQLQNEKLYLYYLQNGRDMYVDQELDINRLSDYDVDHIVPQSFLKDDSIDNKVLTRSDKARGKSDNVPSEEVVKKMKNYWRQLLNAKLITQRKFDNLTKAERGGLSELDKAGFIKRQLVETRQITKHVAQILDSRMNTKYDENDKLIREVKVITLKSKLVSDFRKDFQFYKVREINNYHHAHDAYLNAVVGTALIKKYPKLESEFVYGDYKVYDVRKMIAKSEQEIGKATAKYFFYSNIMNFFKTEITLANGEIRKRPLIETNGETGEIVWDKGRDFATVRKVLSMPQVNIVKKTEVQTGGFSKESILPKRNSDKLIARKKDWDPKKYGGFDSPTVAYSVLVVAKVEKGKSKKLKSVKELLGITIMERSSFEKNPIDFLEAKGYKEVKKDLIIKLPKYSLFELENGRKRMLASAGELQKGNELALPSKYVNFLYLASHYEKLKGSPEDNEQKQLFVEQHKHYLDEIIEQISEFSKRVILADANLDKVLSAYNKHRDKPIREQAENIIHLFTLTNLGAPAAFKYFDTTIDRKRYTSTKEVLDATLIHQSITGLYETRIDLSQLGGDGGPAPEAAAKGGSGGTVSLQDEHRLFDIPVTTSLPDVWLQDFPQAWAETGGLGRAKCQAPIIIDLKPTAVPVSIKQYPMSLEAHMGIRQHIIKFLELGVLRPCRSPWNTPLLPVKKPGTQDYRPVQDLREINKRTVDIHPTVPNPYNLLSTLKPDYSWYTVLDLKDAFFCLPLAPQSQELFAFEWKDPERGISGQLTWTRLPQGFKNSPTLFNEALHRDLTDFRTQHPEVTLLQYVDDLLLAAPTKKACTQGTRHLLQELGEKGYRASAKKAQICQTKVTYLGYILSEGKRWLTPGRIETVARIPPPRNPREVREFLGKAGFCRLFIPGFAELAAPLYALTKPSTPFTWQTEHQLAFEALKKALLSAPALGLPDTSKPFTLFLDERQGIAKGVLTQKLGPWKRPVAYLSKKLDPVAAGWPPCLRIMAATAMLVKDSAKLTLGQPLTVITPHTLEAIVRQPPDRWITNARLTHYQALLLDTDRVQFGPPVTLNPATLLPVPENQPSPHDCRQVLAETHGTREDLKDQELPDADHTWYTDGSSYLDSGTRRAGAAVVDGHNTIWAQSLPPGTSAQKAELIALTKALELSKGKKANIYTDSRYAFATAHTHGSIYERRGWLTSEGKEIKNKAEIIALLKALFLPQEVAIIHCPGHQKGQDPVAVGNRQADRVARQAAMAEVLTLATEPDNTSHITAGKRTADGSEFEKRTADGSEFESPKKKAKVE

SEQ ID NO: 2045 - protein, 2124 aa, synthetic construct
MPAAKRVKLDGGDKKYSIGLDIGTNSVGWAVITDEYKVPSKKFKVLGNTDRHSIKKNLIGALLFDSGETAEATRLKRTARRRYTRRKNRICYLQEIFSNEMAKVDDSFFHRLEESFLVEEDKKHERHPIFGNIVDEVAYHEKYPTIYHLRKKLVDSTDKADLRLIYLALAHMIKFRGHFLIEGDLNPDNSDVDKLFIQLVQTYNQLFEENPINASGVDAKAILSARLSKSRRLENLIAQLPGEKKNGLFGNLIALSLGLTPNFKSNFDLAEDAKLQLSKDTYDDDLDNLLAQIGDQYADLFLAAKNLSDAILLSDILRVNTEITKAPLSASMIKRYDEHHQDLTLLKALVRQQLPEKYKEIFFDQSKNGYAGYIDGGASQEEFYKFIKPILEKMDGTEELLVKLNREDLLRKQRTFDNGSIPHQIHLGELHAILRRQEDFYPFLKDNREKIEKILTFRIPYYVGPLARGNSRFAWMTRKSEETITPWNFEEVVDKGASAQSFIERMTNFDKNLPNEKVLPKHSLLYEYFTVYNELTKVKYVTEGMRKPAFLSGEQKKAIVDLLFKTNRKVTVKQLKEDYFKKIECFDSVEISGVEDRFNASLGTYHDLLKIIKDKDFLDNEENEDILEDIVLTLTLFEDREMIEERLKTYAHLFDDKVMKQLKRRRYTGWGRLSRKLINGIRDKQSGKTILDFLKSDGFANRNFMQLIHDDSLTFKEDIQKAQVSGQGDSLHEHIANLAGSPAIKKGILQTVKVVDELVKVMGRHKPENIVIEMARENQTTQKGQKNSRERMKRIEEGIKELGSQILKEHPVENTQLQNEKLYLYYLQNGRDMYVDQELDINRLSDYDVDHIVPQSFLKDDSIDNKVLTRSDKARGKSDNVPSEEVVKKMKNYWRQLLNAKLITQRKFDNLTKAERGGLSELDKAGFIKRQLVETRQITKHVAQILDSRMNTKYDENDKLIREVKVITLKSKLVSDFRKDFQFYKVREINNYHHAHDAYLNAVVGTALIKKYPKLESEFVYGDYKVYDVRKMIAKSEQEIGKATAKYFFYSNIMNFFKTEITLANGEIRKRPLIETNGETGEIVWDKGRDFATVRKVLSMPQVNIVKKTEVQTGGFSKESILPKRNSDKLIARKKDWDPKKYGGFDSPTVAYSVLVVAKVEKGKSKKLKSVKELLGITIMERSSFEKNPIDFLEAKGYKEVKKDLIIKLPKYSLFELENGRKRMLASAGELQKGNELALPSKYVNFLYLASHYEKLKGSPEDNEQKQLFVEQHKHYLDEIIEQISEFSKRVILADANLDKVLSAYNKHRDKPIREQAENIIHLFTLTNLGAPAAFKYFDTTIDRKRYTSTKEVLDATLIHQSITGLYETRIDLSQLGGDGGSGGSSGGSSGSETPGTSESATPESSGGSSGGSSGGTVSLQDEHRLFDIPVTTSLPDVWLQDFPQAWAETGGLGRAKCQAPIIIDLKPTAVPVSIKQYPMSLEAHMGIRQHIIKFLELGVLRPCRSPWNTPLLPVKKPGTQDYRPVQDLREINKRTVDIHPTVPNPYNLLSTLKPDYSWYTVLDLKDAFFCLPLAPQSQELFAFEWKDPERGISGQLTWTRLPQGFKNSPTLFNEALHRDLTDFRTQHPEVTLLQYVDDLLLAAPTKKACTQGTRHLLQELGEKGYRASAKKAQICQTKVTYLGYILSEGKRWLTPGRIETVARIPPPRNPREVREFLGKAGFCRLFIPGFAELAAPLYALTKPSTPFTWQTEHQLAFEALKKALLSAPALGLPDTSKPFTLFLDERQGIAKGVLTQKLGPWKRPVAYLSKKLDPVAAGWPPCLRIMAATAMLVKDSAKLTLGQPLTVITPHTLEAIVRQPPDRWITNARLTHYQALLLDTDRVQFGPPVTLNPATLLPVPENQPSPHDCRQVLAETHGTREDLKDQELPDADHTWYTDGSSYLDSGTRRAGAAVVDGHNTIWAQSLPPGTSAQKAELIALTKALELSKGKKANIYTDSRYAFATAHTHGSIYERRGWLTSEGKEIKNKAEIIALLKALFLPQEVAIIHCPGHQKGQDPVAVGNRQADRVARQAAMAEVLTLATEPDNTSHITAGKRTADGSEFEKRTADGSEFESPKKKAKVE

SEQ ID NO: 2046 - protein, 2102 aa, synthetic construct
MPAAKRVKLDGGDKKYSIGLDIGTNSVGWAVITDEYKVPSKKFKVLGNTDRHSIKKNLIGALLFDSGETAEATRLKRTARRRYTRRKNRICYLQEIFSNEMAKVDDSFFHRLEESFLVEEDKKHERHPIFGNIVDEVAYHEKYPTIYHLRKKLVDSTDKADLRLIYLALAHMIKFRGHFLIEGDLNPDNSDVDKLFIQLVQTYNQLFEENPINASGVDAKAILSARLSKSRRLENLIAQLPGEKKNGLFGNLIALSLGLTPNFKSNFDLAEDAKLQLSKDTYDDDLDNLLAQIGDQYADLFLAAKNLSDAILLSDILRVNTEITKAPLSASMIKRYDEHHQDLTLLKALVRQQLPEKYKEIFFDQSKNGYAGYIDGGASQEEFYKFIKPILEKMDGTEELLVKLNREDLLRKQRTFDNGSIPHQIHLGELHAILRRQEDFYPFLKDNREKIEKILTFRIPYYVGPLARGNSRFAWMTRKSEETITPWNFEEVVDKGASAQSFIERMTNFDKNLPNEKVLPKHSLLYEYFTVYNELTKVKYVTEGMRKPAFLSGEQKKAIVDLLFKTNRKVTVKQLKEDYFKKIECFDSVEISGVEDRFNASLGTYHDLLKIIKDKDFLDNEENEDILEDIVLTLTLFEDREMIEERLKTYAHLFDDKVMKQLKRRRYTGWGRLSRKLINGIRDKQSGKTILDFLKSDGFANRNFMQLIHDDSLTFKEDIQKAQVSGQGDSLHEHIANLAGSPAIKKGILQTVKVVDELVKVMGRHKPENIVIEMARENQTTQKGQKNSRERMKRIEEGIKELGSQILKEHPVENTQLQNEKLYLYYLQNGRDMYVDQELDINRLSDYDVDHIVPQSFLKDDSIDNKVLTRSDKARGKSDNVPSEEVVKKMKNYWRQLLNAKLITQRKFDNLTKAERGGLSELDKAGFIKRQLVETRQITKHVAQILDSRMNTKYDENDKLIREVKVITLKSKLVSDFRKDFQFYKVREINNYHHAHDAYLNAVVGTALIKKYPKLESEFVYGDYKVYDVRKMIAKSEQEIGKATAKYFFYSNIMNFFKTEITLANGEIRKRPLIETNGETGEIVWDKGRDFATVRKVLSMPQVNIVKKTEVQTGGFSKESILPKRNSDKLIARKKDWDPKKYGGFDSPTVAYSVLVVAKVEKGKSKKLKSVKELLGITIMERSSFEKNPIDFLEAKGYKEVKKDLIIKLPKYSLFELENGRKRMLASAGELQKGNELALPSKYVNFLYLASHYEKLKGSPEDNEQKQLFVEQHKHYLDEIIEQISEFSKRVILADANLDKVLSAYNKHRDKPIREQAENIIHLFTLTNLGAPAAFKYFDTTIDRKRYTSTKEVLDATLIHQSITGLYETRIDLSQLGGDGGGGSEAAAKGSSGGTVSLQDEHRLFDIPVTTSLPDVWLQDFPQAWAETGGLGRAKCQAPIIIDLKPTAVPVSIKQYPMSLEAHMGIRQHIIKFLELGVLRPCRSPWNTPLLPVKKPGTQDYRPVQDLREINKRTVDIHPTVPNPYNLLSTLKPDYSWYTVLDLKDAFFCLPLAPQSQELFAFEWKDPERGISGQLTWTRLPQGFKNSPTLFNEALHRDLTDFRTQHPEVTLLQYVDDLLLAAPTKKACTQGTRHLLQELGEKGYRASAKKAQICQTKVTYLGYILSEGKRWLTPGRIETVARIPPPRNPREVREFLGKAGFCRLFIPGFAELAAPLYALTKPSTPFTWQTEHQLAFEALKKALLSAPALGLPDTSKPFTLFLDERQGIAKGVLTQKLGPWKRPVAYLSKKLDPVAAGWPPCLRIMAATAMLVKDSAKLTLGQPLTVITPHTLEAIVRQPPDRWITNARLTHYQALLLDTDRVQFGPPVTLNPATLLPVPENQPSPHDCRQVLAETHGTREDLKDQELPDADHTWYTDGSSYLDSGTRRAGAAVVDGHNTIWAQSLPPGTSAQKAELIALTKALELSKGKKANIYTDSRYAFATAHTHGSIYERRGWLTSEGKEIKNKAEIIALLKALFLPQEVAIIHCPGHQKGQDPVAVGNRQADRVARQAAMAEVLTLATEPDNTSHITAGKRTADGSEFEKRTADGSEFESPKKKAKVE

SEQ ID NO: 2047 - protein, 2097 aa, synthetic construct
MPAAKRVKLDGGDKKYSIGLDIGTNSVGWAVITDEYKVPSKKFKVLGNTDRHSIKKNLIGALLFDSGETAEATRLKRTARRRYTRRKNRICYLQEIFSNEMAKVDDSFFHRLEESFLVEEDKKHERHPIFGNIVDEVAYHEKYPTIYHLRKKLVDSTDKADLRLIYLALAHMIKFRGHFLIEGDLNPDNSDVDKLFIQLVQTYNQLFEENPINASGVDAKAILSARLSKSRRLENLIAQLPGEKKNGLFGNLIALSLGLTPNFKSNFDLAEDAKLQLSKDTYDDDLDNLLAQIGDQYADLFLAAKNLSDAILLSDILRVNTEITKAPLSASMIKRYDEHHQDLTLLKALVRQQLPEKYKEIFFDQSKNGYAGYIDGGASQEEFYKFIKPILEKMDGTEELLVKLNREDLLRKQRTFDNGSIPHQIHLGELHAILRRQEDFYPFLKDNREKIEKILTFRIPYYVGPLARGNSRFAWMTRKSEETITPWNFEEVVDKGASAQSFIERMTNFDKNLPNEKVLPKHSLLYEYFTVYNELTKVKYVTEGMRKPAFLSGEQKKAIVDLLFKTNRKVTVKQLKEDYFKKIECFDSVEISGVEDRFNASLGTYHDLLKIIKDKDFLDNEENEDILEDIVLTLTLFEDREMIEERLKTYAHLFDDKVMKQLKRRRYTGWGRLSRKLINGIRDKQSGKTILDFLKSDGFANRNFMQLIHDDSLTFKEDIQKAQVSGQGDSLHEHIANLAGSPAIKKGILQTVKVVDELVKVMGRHKPENIVIEMARENQTTQKGQKNSRERMKRIEEGIKELGSQILKEHPVENTQLQNEKLYLYYLQNGRDMYVDQELDINRLSDYDVDHIVPQSFLKDDSIDNKVLTRSDKARGKSDNVPSEEVVKKMKNYWRQLLNAKLITQRKFDNLTKAERGGLSELDKAGFIKRQLVETRQITKHVAQILDSRMNTKYDENDKLIREVKVITLKSKLVSDFRKDFQFYKVREINNYHHAHDAYLNAVVGTALIKKYPKLESEFVYGDYKVYDVRKMIAKSEQEIGKATAKYFFYSNIMNFFKTEITLANGEIRKRPLIETNGETGEIVWDKGRDFATVRKVLSMPQVNIVKKTEVQTGGFSKESILPKRNSDKLIARKKDWDPKKYGGFDSPTVAYSVLVVAKVEKGKSKKLKSVKELLGITIMERSSFEKNPIDFLEAKGYKEVKKDLIIKLPKYSLFELENGRKRMLASAGELQKGNELALPSKYVNFLYLASHYEKLKGSPEDNEQKQLFVEQHKHYLDEIIEQISEFSKRVILADANLDKVLSAYNKHRDKPIREQAENIIHLFTLTNLGAPAAFKYFDTTIDRKRYTSTKEVLDATLIHQSITGLYETRIDLSQLGGDGGGSSGGSGGTVSLQDEHRLFDIPVTTSLPDVWLQDFPQAWAETGGLGRAKCQAPIIIDLKPTAVPVSIKQYPMSLEAHMGIRQHIIKFLELGVLRPCRSPWNTPLLPVKKPGTQDYRPVQDLREINKRTVDIHPTVPNPYNLLSTLKPDYSWYTVLDLKDAFFCLPLAPQSQELFAFEWKDPERGISGQLTWTRLPQGFKNSPTLFNEALHRDLTDFRTQHPEVTLLQYVDDLLLAAPTKKACTQGTRHLLQELGEKGYRASAKKAQICQTKVTYLGYILSEGKRWLTPGRIETVARIPPPRNPREVREFLGKAGFCRLFIPGFAELAAPLYALTKPSTPFTWQTEHQLAFEALKKALLSAPALGLPDTSKPFTLFLDERQGIAKGVLTQKLGPWKRPVAYLSKKLDPVAAGWPPCLRIMAATAMLVKDSAKLTLGQPLTVITPHTLEAIVRQPPDRWITNARLTHYQALLLDTDRVQFGPPVTLNPATLLPVPENQPSPHDCRQVLAETHGTREDLKDQELPDADHTWYTDGSSYLDSGTRRAGAAVVDGHNTIWAQSLPPGTSAQKAELIALTKALELSKGKKANIYTDSRYAFATAHTHGSIYERRGWLTSEGKEIKNKAEIIALLKALFLPQEVAIIHCPGHQKGQDPVAVGNRQADRVARQAAMAEVLTLATEPDNTSHITAGKRTADGSEFEKRTADGSEFESPKKKAKVE
